United States Patent Application Publication US 2004/0214272 A1 - sequence listing, part 22

SEQ ID NO: 90573 - DNA, 2157 bp, Zea mays
  Clone ID: MRT4577_182603C.1
cgtgattctaaacttacaagattgcttaaagattcatttggaggtactgcaagaacatcattggttgtgacaattggtccatctccaagacatcgtggggaaactaccagtacaataatgtttggacaaagggcaatgaaagttgagaacatggtgaaattgaaggaagagtttgattacaagagcttatgtaggaaacttgatattgaattggataaattaattgcagaaaatgaaaggcaaaggaaacattttgacgatgaagttgagagaataagagctgaagctcaatgccgcattgctgaggctgaaagggaatgcaaaatcacattagagaatgagaaaatgaagtatcatgaagaatacttagactcaataagaatactggaggagaagtggaaagtacatcagcaatcacccaagaaacaaaataaagaggctgagtctacatccaatgatactggagaagtgcataatttactgcagaatgagaaaatgctacgtcaatcggctgaagatgaggccagtgacctcaagaatcaaatatcacactggaaaaagctggaggctacagctacagctgagataataaaactacagaaaatgctagatgctgaagctagccagaaagagaaacttgaagaagaaataggtgttttgagaagccagttattgcagatgagtatggaagccgatgagacaagaagtcttgataaaggagatgggccaggaaaaatatttcctggtttagattcattggtgtctcagactcgaggttcacaacccagagagcaggacaatggacagaagcaaccgattgccaaactctttgaacaagttgggttacaaaagatattgtcattgcttgaatctgaagaacctgatgtccgcgttcatgcagtgaaagttgtcgcaaatctggcagctgaagaggcaaatcaagaaaagattgtagaagcaggtggcctcacttccctgcttatgctacttaggagctctgaggatgagacaattcgtagagtagcagcaggagcaattgctaaccttgcaatgaatgaaacaaaccaagatcttatcatggctcaagggggtgtaaccttgttgtctatgacagcatctgatgcagaggatccacaaactcttagaatggtggccggagcaatagctaacctttgtggcaacgacaaactgcaaacacggttgcggggagaaggtggaattaaagcgttgcttggaatggttaggtgtgggcaccctgatgtccttgctcaagttgcacgtggcattgcaaattttgcgaaatgtgaatctagagcagctactcaaggaaataagatggggaaatcactattaatcgatgatggagcgcttccctggattgtaaaaaatgctaacaacgaagctgccccaattaggcggcacatcgagcttgcactgtgtcatttggcacaacatgaagtaaattcaaaagacattatcaatgaaggtgccctatgggagcttgttcggatctcaagggactgttctcgagaagatataaggaatttggcataccggacattgacatccagccccactcttgaagcagagatgaggagattaggaataaaaatgtgataacagaacagagtgcagctggggctcacactatgaagttccatttctcgtgcacatacagaggtgtccgttgctatgggcgctggtaatcaagcacatcttcccttgatctacctgatttttggcaggcatacacgggcaccgcactgactaatcagaagaggcaatggccttcgcaccaactttctcctcgagagttcatttttctttggtttgagggggcagttgaaaatctcgacagcactagcaattcgtttattttgtaaaataatgctagcatagcagatgttacctaccccccaatgcagggtttgtaaattttttgctgtaaaaatatcaaggccaaaaggagtgcttttgcagtttgaagcataactgtattccctgatccctagaaggtttaacttttatttatttatttatttcagatgagccatatttgtaactgattttgtttctttcttaagcgttgacactgccatttcttttaccatatctgttctcagatgatctatgtgaggcacagcttttggaatgcga

SEQ ID NO: 90574 - DNA, 526 bp, Zea mays
  Clone ID: MRT4577_182604C.1
aaacgccccccccattctttttgctttgcaggccccccccaaccaccaaaaggggggcaaatcttcccttatcccgccacaaagggaacccccttagccccaaaacacaaatttcccggaaaaaatttgggggggggcaaaaaaaaacccccggaaaaaaccggggggggaaccccccacccccccccgggtaaacaataaagggggcctaaaacagcccctttaaggacgggcccaattttttgccctagtggaaggcaggctttcccgggaaaaacccccccgggccctggataaaaaccttgggggaaaaaaaccccccccccacccagttttaaaggcccttgcctaaaaccaacggggaaaggaaccccccaacaaaagcatccccgggcccggggggggaaacaagcttttccttgggcaaaaggaccccagggaacgttttccccttcccatcctaagaaacccccaggggatccgccccttgggtaataacagaaatccttttttgcttccccgaacc

SEQ ID NO: 90575 - DNA, 752 bp, Zea mays
  Clone ID: MRT4577_182605C.1
gggtaccctcggtcctcgggtaggggcgtatactgagtattcatttgagaatacggatccgaataaaatagtcgaacatagatcaaagttcgaggaattagactcgggctcaaatcaaataacagccatcgagagtttgattaaacgagcttcagatgagatttataagtcgagaatgatttttgagtttgcattcatgctgagaataaaagttttaacaggctccaaatttggccttctgtgagactgagtaactccgaattcggtgaaatgtgcatgaatagtctagataatcagagacatacgcgagcgagaaatagaaattttcaccgagcatccgagattaggataaaactcctgtcataacacaaaacttacacctggggtgtcacactaaggtgtttccaagatagatcttcgctccagctatcatcagatcaagatacgagcaagtgatattccaaagactgccttctcaactagatatggaatgtatgagtatctggtgatgtcgtttggacttagtgtacctgatgaacttagtctttatgcctgaactggacaaattcgaggttgtcttcatcgatgatatcttggtgtactcaagaaacaaagaagagcatgccagtcatttgcatgtagtgctccaacgtatgagagaacaccgcctttatgccaaattgtcaaaatgtgatttctagctaaaggagatcaagttcttgggtcacactatgtctcaaaagggaataaca

SEQ ID NO: 90576 - DNA, 282 bp, Zea mays
  Clone ID: MRT4577_182606C.1
tcttccacccctccactttttccatccgccacagcctttttaataatgtcccccgcccccacatctctctttttccctgtgcatggcgcataaaaatctcccagccgtgcatcatctcttcgcgctcccctcagacaccatttctccctcctccctactccctgctgtcgagcagcagctccatggctcccacattttttttcatcatagatcttcttccccatgtagcttctttcctgcaagtcgccaatattctttttcctttcctcctatcttcctttt

SEQ ID NO: 90577 - DNA, 333 bp, Zea mays
  Clone ID: MRT4577_182607C.1
ggggaaaccaggttacaagaaatgggcctcctgtgggctcaaaggccctattattgcccccctttttttttacaaccagaaaacttggccaaaaaggggatttttgaaaggtgaaacaaaatttgggcctctgttcttggggtccaagtccacaaggggcagccttggtttacattggaggcctgtccagttagctaatgcaccttacccgcaccacatcaaacaccccatggccagataactgcttcatgttttgggggaagccaacaatatcttgttttggagcccggattttttaattttaatcaagcgttatgtttccccctacttgaa

SEQ ID NO: 90578 - DNA, 170 bp, Zea mays
  Clone ID: MRT4577_182608C.1
aataatggggggggtttgaacaatataacactcatcaaaaaaagcacaatgacgtatttgcccacaacccttcttaaaaattcattctaaaacgcagaatttatagttgctaaacacaaaccagcgacttaagctatctaaaaaaattaaatttggccctacacaaactg

SEQ ID NO: 90579 - DNA, 597 bp, Zea mays
  Clone ID: MRT4577_182609C.1
aggaccggtccgtaattcttttgttgacccacgcttcattacctaataaacaatgattatgtctacaggtagatcatggtctaatggatcaagagacttgcttgcacataaggcttcattgcatattagttatggcccaattcaataccataaagaggctccgctctactgcacttgcagttgactgtgttttaggttggatcgataatttaaaaccaggtgtatgtgaaaagataaataaggaaaaaaaaacatgacaatgacgatgattcttccttattgggacaattgggaggacaaatggtcacatcttatctgtgcataccatctgtttagctgggatacaatcattcctcatccatcttatcttgtttttctactttctatcagacagttaaatatctataacatttgattggacagtgacagtcaatggcgacatggtaatttgtgcaaaggggttaccatgaacgcatgtctataacatttgattgaaaacttgacatgccaacccccacctttaccaacaatatacatgcacaaaattctgcatgttttttttaattaaggaggggacatctttatatttgtttttgg

SEQ ID NO: 90580 - DNA, 414 bp, Zea mays
  unsure (1)..(414): unsure at all n locations
  Clone ID: MRT4577_18260C.1
gctgcccctgctggcggcggcggcggcgctcctgcagctgaggcgaagaaagaagagaaggtggaggagaaggaagaaagtgatgacgacatgggcttcagcctcttcgactaagcctgtgcaatagtcaagagtattgtttttgagtcgcggaagcagagggaagaaaaatcgtagtcatgtttggacttcaactttgttttatgttggaaagtacttgaaagacttttcctgtggtaattctaggcgtaggttgctgtgctggttggggtttactggtgaaccagagtttttctatcccactatgaatttgttacctcaagttacctggatgttcactgttttgttggtacatgtcgattttgcctcgttaaaaannnanaaaaaaaaaaaaaggacaggccgccctgactg

SEQ ID NO: 90581 - DNA, 270 bp, Zea mays
  Clone ID: MRT4577_182610C.1
ctccctctcgtttctctgctggccgccgctcctgctcgttcttctggcagccacgcgaaccagcttctcatacatccgcgcctactgcctgctcggcgcccatctccctgctgccactctcccttgacgcccgcctgctcccttcgccgcgcgctcctcagctcgacgcccggtgctcctccatggcgctcggcttcttcctcctaaagtcccttcgtcgccatgtcacctttgctatttccatttcttccttctccgtactttctgttt

SEQ ID NO: 90582 - DNA, 417 bp, Zea mays
  Clone ID: MRT4577_182611C.1
caagcatataccgaaagcaagcaaggcttcttttttttttctttctctcccaagaacatggaggctccctccaccttgctccagctctccctctcctcctcctcgtctctgggtcttcttctgctgctgctgctgcttgtgcagttgccgtccatggccagctgccacgaggagatgaagtccatctacgtgggccagagggttctccccgtgcgcctcggccggccggcgttcgggcccgagagcctcgccttcgaccaccgcggcgacgggcccttcaccggcgtctccaacggccgcatcctccggtggcgcggcgcccagcgcgggtggaccgagttcgcccacaaccacaagcacgagacggtggccatgtgcgcggcgaagaagaggctggtggtgccggagagcgcgtgc

SEQ ID NO: 90583 - DNA, 777 bp, Zea mays
  Clone ID: MRT4577_182612C.1
ctcgaggccggccgggcttccttgtcgacccctgccgccagacaccgcccgcgagggagtgaagcacggccgcctcggttgctcacagtcgccgttcctctgagatattaggaaccagggtgggcgctggtgtgtgggggtgtcatcggacatgttgtcgtggggagacccagaccccaacaccattaattgctcacgggaagtcttcctccaccgtggatcaacctctgccgtggccggaacacctacgctactaaccctctggtgtgtgctggtgccggtctagcgttctccggcgagaaatccgctgtggccagggaggctctgccgcgcgcctggacggaatagggggacggttcctgaccgtcggattcgacttgtgcgactgagatatgatcggtgattatcgtttggttggtgcgctctgatgcgtccgatctcgatcggacgaattcgggtggttgcgcgcattttaaaacctgagctgttgataatgcatcccacgcgtaggatcatcgaaatgagattgtgatcctagccgcgggattctaatctggcggctagaactccacggtaccccttcggcacagacgttttgtaaatgagcccttggcaaatacatgaatcaacccaccatcctctgcagtagaaaaagtgtaacatacaggttctctgatttatgattttgaccctgtgctttcacaatattatgcccagagtccaatcagctgtataattagtaaaaatacactggaaaaaaaaaaaaaaaaagcggcc

SEQ ID NO: 90584 - DNA, 301 bp, Zea mays
  Clone ID: MRT4577_182613C.1
cctctcctagtgtcaatgctgctcgtcaggctcgcctcagtctcctataacgacgaggaccgcggcggcgtaactaaggcccacgtcaaccacggcatgtttaaggcggcaccgtggtccaactggcacgcgacttactacagtggggcacagcggttagctgacacgaccgacaggggcgcatggtgatacaacggcgacctgtgcaaatcatgaatgtagctgtatggaggcttttcatacttcactttacaccaacggcacccggtacggtgcgtactactatctcaatggtcccagt

SEQ ID NO: 90585 - DNA, 413 bp, Zea mays
  Clone ID: MRT4577_182614C.1
cccacgcgatccgcacacgcgtccgcccacgcgtccgcccacgcgtcaggaacaactccaactcccatctctcactacggcaacacattgccagctcagccatcatcggtctcggcggatagcggggcagccggagatcactatggactgggtgcaagcggcgggagactcagcatcgtggagcttggcgctgtcgctggaggagatgctggtggtggtgtgcactctgggcacggctgaaggacggggcggagctcctgtggtggtgatacgcggagctgcgctgtcagcgcggacgtgcgatgaaatctacctagtggttcgaggcgacacactgctcagttatcaggacatctgcagtgagcctctcatcctgtagcggcacttgcatgtacacgatcccaacgaagtct

SEQ ID NO: 90586 - DNA, 1719 bp, Zea mays
  Clone ID: MRT4577_182615C.1
cgccttgggacgctagatgtcggggattttctcgctattggagtcatcttttttgcaacggattctgtgtgcgggctgcagggcctccatcaggatgagacgccctttctgtacagtctcgtgttcggtgagggagtcgtgaacgatgccacgtctgttgtgctcttcaacgcactccagaacttcgatcttaaccacatcgatgtagccgttgtgctgaatttcttgggaaacttctgttacttattcgtgtcaagcaccttacttggagtgtttactggattgctcagtgcctacataattaagaagctatatataggaaggcattccactgaccgtgaggttgcgcttatgatgctcatggcttacctctcctacatgctggccgagctgctagatctgagtggcattcttaccgtattcttctgcggcatcgtgatgtcacattacacctggcataatgtgacagagagctcaagagtcacaaccaagcatgcctttgctactttgtccttcatcgccgagacttttctcttcctgtatgttgggatggatgccctcgacatcgagaagtgggagtttgccagtgacagccccggtaaatccatcggcataagctcgattttgctagggttggttctggtggggagagctgcatttgttttcccattgtcgtttttgtccaacctgacaaagaagtctccattggagaaaataacatttagacagcaaattgtaatatggtgggccggactgatgagaggtgccgtgtccattgctctcgcttacaacaagttcacgagatctggacacactgagctgcacggcaacgcgataatgatcaccagcacgatcactgtggtcctgtttagcactatggtgtttgggatgatgacgaagccattgatccggctgctgctccctgcctgcagcaacacggccacctccgagccgtcctcacccaagtccctgcactcgcctctcctgacgagcatgcagggctcggacatcgagacggggtcggcacagattgtgaggccgtccagcctccggatgctcctaagcaagccaacccacacggtgcactactactggcgcaagttcgacgacgcgctcatgcggcccatgtttggcggccgcgggttcgtgcccttctcccctggatcgcccactgagcagagcgtccacgacggacggtgaacaaagccgcgtctgacaccaagagacgagcaggacatgcttttggctgctaatcgtcagatgatgatgtttttgtttgttgacagcttctgatggtgcgttagcaatggcaaggaggtgtcagttggtttggattagcaggatgaagaagagcaaccctggtaactggggctgggggattgagtttgtgcatgacaaggctgcaaacttttgtatgtagataaaaagaacacccatttggccatttgtattgtatgttattgtatgtaagctagcaggcctgtacaactgcttttaggtcttcgtttggatgggcgaaattctggcaaacagcagcacatccactctgtgttctgatctaagcatcttggtttgattttgaaatggactcggtgtgtaggataagcttttggaaaaaaaaaaaaaaaagttgttttgccacaactcggtttttctagggtgcgtacagtgtctatcaagtgtgtttttttggctatgcaagtcgatactgatttctgc

SEQ ID NO: 90587 - DNA, 402 bp, Zea mays
  Clone ID: MRT4577_182616C.1
ggattgtggagcttgacctccctcaggcgctacaaaaccagatggtagaacgcaggggaggacaacagggcttgcatgaagcgtaggacgcacatacggacacctgatggctgaaggcactgcacatgaattcaggttcgggatttagatggagcatgcgacttcctctaaagatagtgtactcgatggccgttgaggaagaaaaggggccgtcctggctttccgccttcttagctgctgcagagggttttgacgagccccagacttatgtggtgtacctgatccgttcttttagggagaaaggtttaacgatgtggggcaagataaaatggatttgctatggttcagggctggtcatatctagcgtatgtgaatgaagacattgctaatgttgacattcta

SEQ ID NO: 90588 - DNA, 318 bp, Zea mays
  Clone ID: MRT4577_182617C.1
acggggggtgcactttatattttgtttttttttggtactttcatccattttttcaaaccacaatttttttttttcttaagcaaggggggggacaaccaaacccccctccaaaatatccctctttttttttttccgaccggtaaactgcaaacacatttttattggggccccttttttttaagagctcccaaaaagggccggtctccctggctcgatactgaaccccaaaataaaccccttaacctatatgatcgacaaccctccctatttaaacgggaaaaaaccctaaggcctggtttaacaacccaccccccccaa

SEQ ID NO: 90589 - DNA, 255 bp, Zea mays
  unsure (1)..(255): unsure at all n locations
  Clone ID: MRT4577_182618C.1
ggggnctccacgagtccgccgggcgccggccgcgactgtaagcactgcgcctgcgcgcgtgcgtccgtccgcccgtctaacggtccccgcgtctcgcagtcccgcttccggctccttggctcctgtcctgccggcgcgcagcgcgctgcagtagctccagctcgggcgctcggctactcacctgctgcctgatggctgctccgctggacgctgctcgtggggggggctgtccagggtgctagattggtccactgg

SEQ ID NO: 90590 - DNA, 329 bp, Zea mays
  Clone ID: MRT4577_182619C.1
tttcttgccggcggacgcgcctgtgtatgatgcggcgctggaggaacacgaagcatactgagggaagtgcaggaaggatatgcaaccggggtttaagaaagcacacatggcctcaggctagtatgtcacacgacgtagagtaacatacaagtaggcgctcacggggacactatgcatatgcaccctgatccagtatatgaagcacgagtgcaaattgactattttaaggacatgtgagttgaacaaaagttgactttaaattaaagatgccaggcctgcatagactaccgcaggactgttactgtagggaagcggtgataaatctgctt

SEQ ID NO: 90591 - DNA, 311 bp, Zea mays
  Clone ID: MRT4577_18261C.1
aaaaaaaagggtttcgcaacccttttttaaaaaattcccccccccatatacaaaaaaaaattattaccctggctacaaacaaaatagtttagcacacaccctagcttggtgcccttgcacaaaaatttaaggggcaggccccccccacacaaatccatttttgcattttgctataaacatgcctgtttaaagggaaacaaacgggtaatttccatcacaacggaaaccaaatcccaccctggggggcccacccggaaaaaaaactttgaagcaaaaaacggctcctgggggggagcagggggctttaacta

SEQ ID NO: 90592 - DNA, 289 bp, Zea mays
  Clone ID: MRT4577_182620C.1
cccgtgtgggacttcctgagcaaagagaccccagctcggctggcccggcttcgggaggagcaccgtgtgtccatcctcatagatggcgagacttctgacatctatgttctccagctttccccacagggtcctcccccggcccctccaaatcctgctctacctagcccggaaggctctcaaggggctgctaaaagaggcagagaaagagctgaagaaagctcagaggcagggggagctgatgggctgcctggctctggggggtggaggggagcaccctgagatgcaccgc

SEQ ID NO: 90593 - DNA, 254 bp, Zea mays
  Clone ID: MRT4577_182621C.1
caagcttccttcgcggtctcccgtcgagcaaccatggcggcggcggttaccctcctacggcttactctcgaccgactctcctaccacctgcgctccgtacctttctctcgtatggcgtatacgcgcctacgtatctttgccttccatcgacttttctactacctggaccatgtcttctgctttgcttacggcttcgcggtcgtagcccaggttgtaagccagccgtacgccgaagaatctgtagaagatgaatc

SEQ ID NO: 90594 - DNA, 285 bp, Zea mays
  Clone ID: MRT4577_182622C.1
agaggctttattcaaaatgtttgggcactaaaattttgtctaaagcccctagccagattcattccaatttattaaattattaagtaccagccaccttcttgggaggcttttttaatcaaagttattaggccccaaaaataacttaaggccgccttatattcttggggccggattaaaaatttattttaagaccattgccttattgggtggtgggtcaaggtccccggttttgaatccatgccctattattaccagatggaaggtcaagattaataacctcaaaaa

SEQ ID NO: 90595 - DNA, 229 bp, Zea mays
  unsure (1)..(229): unsure at all n locations
  Clone ID: MRT4577_182623C.1
aaangaaccnnaggncgncaggggacgaaannaaacaagggggcaaagaacagcacncaancgggaggcacaacagcaaagggggctacgacgcncgnnncaaagcagggaggggcagaaaaacccnngttttnnaaaacnccaacctactgccggggggcnaagcgggcaccgggacaaaaacccccccaagcnncncaaagacggngagncnagacggccgngaagn

SEQ ID NO: 90596 - DNA, 1083 bp, Zea mays
  Clone ID: MRT4577_182624C.1
gtcagattcttggcaacatgagtgctttgaaccctacacatctaacatctacagtcggcgggttctaagtggggagtttgtcgtggttaacaagcatcttctccatgacttgactgagatgggtatctggacacctgctctgaaaaataagataatttatgaagatggttctattcagaagatggaagaaatccctgatgatcttaaagcaatttacaagactgtttgggagattaagcagaaaactctggttgacatggctgttgatcgtggatgctacatcgaccagagccagagccttaatgtccacatggatcaaccaaactttgcaaagctaacttcgttgcatttccatgcttggtccaagggcctgaaaactgggatgtactatttgagaacaagggcagctgctgatgcaatcaagtttactgtggacactggctttctgaaggtcaatggggatgctaatggcactaatggcactaacggcaaactagcagaggaagacgatgaagccaaaatggcgcaagtcgtctgctccttgaacaaccgggaagaatgcctggcatgcgggagctagatgcatctcttgcatctgtttttctcttaaccaaggcaggcattacatgccgccaagtggtctgatcattggcgttgaataattgagaagtgagtcgagtttgaaaacttcccataatgggaacaataccttgtctctgaaatactgttaggactagtttggtaactctattttttcaagagattcatattttttcaagtgaaaatgaattaattttcttttgagaaaatagaaagaaatcccttgaaaaaaatgagattctctaggagccataaaaccggagtaaattggaggagctaaattcatcctttttattcaattttgaataagaggaatttagctcctctggttttgtggcttccaaactaaggttgtattctctaagatatttgtgctgctgctgctgccaatgtactgtaaatatctactaccatcaaagttattgatgttctctaagctattttttaaaaaaaaaaaggcaaaacaaaagaaaaaaaaataaa

SEQ ID NO: 90597 - DNA, 1421 bp, Zea mays
  Clone ID: MRT4577_182625C.1
ttgggtacctcgaggccggccgggagtacagtggtacttgaagtcgaaggcagcgcagcaggtacgccaggacgccattagcagcggttggccaccacccgacgccggaggcccggaggaggaggcggcgatggcggggaagcacgggcgcaacggcttcgacgacgacaacgtcaaccctttcgcgggaggaagtgttccacctgccaccaattctcgtctctcacctctatcacatgaaccggctgatttctacaatgtggacattcctctcgactcatcaaaggatctgaagaaaaaggagaaagaactccaggctatggaggctgagctaaacaaaagagaacgggaattgaaaaggaaggaagaggcggcatcccgagctggcgttgtgatagaagagaaaaactggcctccctttttccccctcatccaccacgacatttccaatgaaatacctatccatctacaaaggatgcagtaccttgcattctcatcattcttgggattgatagcgtgtctcttttggaatgtcatagcaactacaacagcatggattaaaggggaaggtgttatgatctggctgcttgccattatctacttcatatctggtgcgcctggggcttatgtgctatggtatcggcctctttataatgcaatgagaactgagagcgctttgaagtttgggtggttttttctattttacatgattcatataatcttctgtgtctgggcagctgtggctcctccatttcctttcaaaggaaaatctttggctgggattttgccagcaattgatgtcataggcaagaatgctattgtggggatattttacttcgttggattcggcttgttctgccttgaatcacttatgagtatcggtgtcattcagcaagtatacatgtatttccgtggaagtggaaaagctgcagagattaaacgtgaggcagcacgtagtgctctaagttcagccttctgatgaacatctttttgtaaggtctggttacagccagtcgatggatagaagggaacgagatgtgccgattgagccacgggacggtgtcttgtacatcactgcagtacgtggatttggatctctgaaagcgtacagctgatacctgataatctttttgcacttctgtaaaatatgaactatcctcatggatgcgtcagtgtgctggtgccatttcttgtcatggtttaggtgtggttgatagggaaaacggtgttttttttttagtggcgaatataatgtatcttcacgtgagtgtaatagccagtttatttttgtggcatgaatgcagttcgctgtgttttttggccaaaaaaaacaacatgtcaaaaaaattctctgaacgcacctgtacctgaggcttgcagtcctacagttctagcaaacggtcggtatctacagtagactt

SEQ ID NO: 90598 - DNA, 1460 bp, Zea mays
  Clone ID: MRT4577_182626C.1
gtaccttgcatgcacgaggtcgggcacttggaagtttgggtccttctgccgcgctgggaggacgccattagcagcggttggccaccagcccaccacccgacgccggaggcccggaggaggaggcggcgatggcggggaagcacgggcgcaacggcttcgacgacgacaacgtcaaccctttcgcgggaggaagtgttccacctgccaccaattctcgtctctcacctctatcacatgaaccggctgatttctacaatgtggacattcctctcgactcatcaaaggatctgaagaaaaaggagaaagaactccaggctatggaggctgagctaaacaaaagagaacgggaattgaaaaggaaggaagaggcggcatcccgagctggcgttgtgatagaagagaaaaactggcctccctttttccccctcatccaccacgacatttccaatgaaatacctatccatctacaaaggatgcagtaccttgcattctcatcattcttgggattgatagcgtgtctcttttggaatgtcatagcaactacaacagcatggattaaaggggaaggtgttatgatctggctgcttgccattatctacttcatatctggtgcgcctggggcttatgtgttatggtatcgacctctttataatgcaatgagaactgagagcgctttgaagtttgggtggtttttcctattttacatgattcatataatattctgtgtgtgggcagctgtggctcctccattccctttcaaaggaaaatctttggctgggattttaccagcaattgatgtcataagcaagaatgctattgtcgggatattttacttcgttggatttggcttgttctgccttgaatcacttctgagcatcggtgtcattcagcaagtctacatgtatttccgtggaagtggaaaagctgcagagatgaaacgtgaggcagcacgtagtgctctaagttcagccttctgatgaacatagggcggtctgattagagcagtagatggataagggaagggaacgagatgtgccaattaagccacgcggtcttgtacatcactgcagtacgtggatttggatcgctgaaagcgtacagctgatcgtctttttgctcttctgtaaaatatgaacaatcatcatatggtccggatgcgtcagggtgttggtttcatttcttgccatggtttagatgtggttgatagggaaaacggtgaagtatttttttggagcagcgaatataatgtatcttcatcgtacttttacatgtgagtgtaatagcttatttcttgtggtaggaatacagctttgctgtgttttcgggaaaaaaaaaaaaaaaaaaaaaaaaaaaaaaaaaaaaaaaaaaaaaaaaaaaaaaaaaaaaaaaaaaaaaaaaaaaaaaaaaaaaaaaaaaaaaaaaaaaaaaaaaaaaaaaaaaaaaaaagacatttgttgtgt

SEQ ID NO: 90599 - DNA, 589 bp, Zea mays
  Clone ID: MRT4577_182627C.1
actgccggagaccgatgttgaacttggggtcgaacacatcaagtccgtggacaacgcggtacaggccaggcagttgtgaacgccatgtgtgactcgtactggccgacggtgtccttgtttccagcgccttgagaaggtccttggcaccgagcactgccatatccttcgcgtgccattcagaacagaaaacggaatcgttcgcaagtggatctcgcgatttgagagggggccgtacctggagtacttatcactgatgacgtggcgcatgagattgctggagagcttcaggccaatcctgacctgatcatcggaaactacagtgacggaaaccttgttgcgtgtttgctcgcccacaagatgggtgttactcactgtaccattgcccatgcgcttgagaaaactaagtaccctaactccgacctctactggaagaagtttgaggatcactaccacttctcgtgccagttcaccactgacttgattgcaatgaaccatgccgactttatcatcaccagtaccttccaagagatcgccggaaacaaggacaccgtcggccagtacgagtcacacatggggttcacattgcctg

SEQ ID NO: 90600 - DNA, 229 bp, Zea mays
  Clone ID: MRT4577_182628C.1
cttacgcttcatgtacaaccactaaggtagccgcctttgcgtttctttcttttaactactgcatgaatatgatgtacttagccttgttgtatttggcatgacaaccgacaacctctccatttcacctggttatgctagatctgtagggccataagctgctatgatatgcacatgagaactctgtacttgcggtttgatcttctctgtggaattctgaactatttgagga

SEQ ID NO: 90601 - DNA, 423 bp, Zea mays
  Clone ID: MRT4577_182629C.1
ctccgattctctttttttttgataaaaaacaacaaagggggaaaagcccgaaaaaaaccaccgcccaaaatttcaggttgagggcgtttgaaattaatgctccacaactttgaataaaaaggtcatttactttttctttcaaaatttttttaaacacacataaatgaatcccccttgccaaaaaaatgtgtaacaaaacgctttaccacgggcttcccaaaaaatctctagctgaccacacaagtggtgagttctcagattatcacaccagacatgaaacaacagctaaattccatgttgtaggtgaagacaaaccccatgccggaaaatttgtaaacaatctttttttaaaacttggctcatccaaggtctgaaagatcgttcaaaaaaataaggccccccctcaaaacaagctggtaaagg

SEQ ID NO: 90602 - DNA, 294 bp, Zea mays
  Clone ID: MRT4577_18262C.1
ctgaggcgaagaaagaagagaaggtggaggagaaggaagaaagtgatgacgacatgagcttcaaactcttcgactaagtctgtacaatacccttggctattgcacagacttagtcgaagaggctgaagccaagggtattgtttttgagtcgaggaagcagagggaagaaaaatagtagtcatgtttggactttaactttgttttatgttggaaagtacttgaaagacttttcctatagtaattctaggcgtaggttgctgtgctggttggggtttactggtgaaccagagtttt

SEQ ID NO: 90603 - DNA, 763 bp, Zea mays
  Clone ID: MRT4577_182630C.1
cacatcgacccttaccagggcgacaaggcgtcggccctgctcgtggacttcttcgacaagtgccagcgtatcgaggagaagtacacctggaagctgtactcggagaggctgatgaccctcaccggcgtgtacgggttctggaagtacgtgtccaacctggagaggcgcgagacccggcggtacctggagatgctgtacgcgctcaagtaccgcaccatggcgagcaccgtgccgctggccgtggagggagagccctccagcaagtgatgcgtgacggcggccacagacctgatcgatcgatgagcgagagggagcactcggagtgtcgtgtcttttcccttgccatttctttctttcttctttttccttcccggaggcgaaaaaaaaagagtctgcttttgctaggcggcgggcgttcgttgctgctctttgcttcaagagttaaatttacctaccttgtcaaggtcttgttccatcattgatccgggtgtcgcttttagtagtctgatggactgttagtagtttgcgttgcgtcggttgagagggaacggtggtggtggtggtgtgtgtgcagtcgggtgtggtgctccctttgtttcctggatgggatgttgctccttgaataataatcgtagtggccttggagcccttttcctgaaataagagcagcatcctagtgcttcactttgcaaaaaaaaaaaaaaaaaaaaaaaaaaaaaaaaaaaaaaaaaaaaaaaaaaaaaaaaaaaaaaaaaaactcgag

SEQ ID NO: 90604 - DNA, 327 bp, Zea mays
  Clone ID: MRT4577_182631C.1
attcggctcgagcgtagaccaaggtgtttctcaaccttatgaccagcgccactgcggaggcctgctgagggggcagcttcataaggaacaaaaaaactcatggtatcctgaatgcgttgagctgggggcttacgctgaccatgggagccatcttgacgagatacctgaagacgtccaagcagactgacccgtcgaggacatacctagtacgtatctcgacaaatgctatcatactggatacgggtgtccggatggaagaacaaattcatctgggaaacgctgtccatggggatcacgtgactgctacacagaagcattcggatcaca

SEQ ID NO: 90605 - DNA, 182 bp, Zea mays
  unsure (1)..(182): unsure at all n locations
  Clone ID: MRT4577_182632C.1
aacaaaacaagcctaatgggtaatggcttcctcagttcctctccatctcacgccactgcgctgccctagaaccttcgacgccgcncctctttaggattaccgtgtcnacgatcgccctctggcacgctcgccccgatcgccccctggcacgctcgcccggatcctgcaccggaattccgtgt

SEQ ID NO: 90606 - DNA, 4106 bp, Zea mays
  Clone ID: MRT4577_182633C.1
ttctagaagactctcgagttttttttttttttttttagagaattttaagcacaagtccatagaagggaggagcaaaaatcctgaggcaaacaccagttacagctgcaaaggtaagcactaggatgctgctcttatttcaggaaaagggctccaaggccactacgattattattcaaggagcaacatcccatccaggaaacaaagggagcaccacgcctgactgcacacacaccaccaccaccaacgttccctctcaaccgacgcaacgcaaactactaacagtccatcagactactacaagcgacacccggatcaatgatggaacaagaccttgacaaggtaggtaaattttaactcttgaagcaaagagcagcaacgaacgcccgccgcctagcaaaagcagactcttttttttcgcctccgggaaggaaaaaaaaagaaagaaagaaatggcaagggaaaagacacgacactccgagtgctccctctcgctcatcgatcgatcaggtctgtggccgccgtggcgcatcacttgctggagggctctccctccacggccagcggcacggtgctcgccatggtgcggtacttgagcgcgtacagcatctccaggtaccgccgggtctcgcgcctctccaggttggacacgtacttccagaacccgtacacgccggtgagggtcatcagcctctccgagtacagcttccaggtgtacttctcctcgatacgctggagcccgccctgggagatcttgctccagtggctcggctccgcctggcacttgtcgaagaagtccacgagcagggccgacgccttgtcgccctggtaagggtcgatgtggtagccagacacgccgtgcacgatgatctcggccggaccgccgtaggctgtggcaaacgtgggcaggccgcaggtcatggcctcaaccaccgtcagcccgaaagcctcgtagaaagcaggctgcacgaaggcgcccttggtgtcgcagatgtagcggtacagctcgccgttgcggacgcggttcatctgggcggagatccagcggatgtgcccgttcaggttgtactgctcgatgaggtcaaacatcttcttgaactcggcctgctcctccttgtccttggaagggttgccatggtcgccgcagacgaccacgaggttcaccagctcctgcagccgcttgttccggccgtacagctccaccagcccagtcaagttcttcacacggtcgagacgagccatggagaagatgattggcttgttcctgtcgttcagaacgaacttgtgctccgtgttctcggtttggctgtacaggagctcctcaatctccgggtgaagggaggtcagcctcttgtgcgactcggtgtacgggaagtagatggacaggtccgcgccaggagacacgatgttgaacttggggtcgaacacatcaatgccgtggacgacgcggtacaggccaggcattgtgaacgccatgtgtgactcgtactggccgacggtgtccttgtttccggcgatctcttggaaggtactggtgatgatgaagtccgcgtggttcatagcaatcaagtcagtggtgaactggcacgagaagtggtaatgatcctcaaacttcttccagtagaggtcggagttagggtacttagttttctcaagcgcatgggcaatggtacagtgagtaacacccatcttgtgcgcaagcaaacacgcaacaaggtttccatcactgtagtttccgatgatcaggtcaggattggcctgaagctctccagcaatctcatgcgccacgtcatcagtgtaagtctccaggtacggccagacttcaaatcgcgagatccacttgcgaacgattccgttttctgttctgaatggcacgcgaaggatatggcagtgctcggtgccaaggaccttctcaaggcgctggccacaggtggtgccagttgcatcagggagcaacctggtgacaataaggatcttcggcgtgatgtcaagaccacactgcttgatcctcagcagcatttcgttctccatagcgcgcacttgatccaagatgtagacaacctggcctccggtgtcagggtaacccaagacattagcttgagcgaagtaaccatgaggggagaggataacgacattgaacaccatggggatcgttccaaggaacttctccagggtggacggatctggggacttacactgatgacgtggcgcatgagattgctggagagcttcaggccaatcctgacctgatcatcggaaactacagtgacggaaaccttgttgcgtgtttgctcgcccacaagatgggtgttactcactgtaccattgcccatgcgcttgagaaaactaagtaccctaactccgacctctactggaagaagtttgaggatcactaccacttctcgtgccagttcaccactgacttgattgcaatgaaccatgccgacttcatcatcaccagtaccttccaagagatcgccggaaacaaggacaccgtcggccagtacgagtcacacatggcgttcacaatgcctggcctgtaccgcgttgtccacggcattgatgtgttcgaccccaagttcaacatcgtgtctcctggcgcggacctgtccatctacttcccgtacaccgagtcgcacaagaggctgacctcccttcacccggagattgaggagctcctgtacagccaaaccgagaacacggagcacaagttcgtgctgaacgacaggaacaagccaatcatcttctccatggctcgtctcgaccgtgtcaagaacttgactgggctggtggaagctgtacggccggaacaagcggctgcaggagcctggtgaacctcgtggtcgtctgcggagatcatggcaacccttccgaggacaaggatgatcaggccgagttcaagaagatgtttgacctcatcgagcagtacaacctgaacgggcacatccgctggatctccgccagatgaaccgcgtccgcaacggcgagctgtaccgctacatctgcgacaccaagggcgccttcgtgcagcctgctttctacgaggctttcgggctgacggtggttgaggccatgacctgcggcctgcccacgtttgccacagcctacggcggtccggccgagatcatcgtgcacggcgtgtctggctaccacatcgacccttaccagggcgacaaggcgtcggccctgctcgtggacttcttcgacaagtgccaggcggacccgagccactggagcaagatctcccagggcgggctccagcgtatcgaggagaagtatgcactgacgtgaagatggtttccccagccgttttttttgatgtgcttcttaccggtcgtcgcgttcggtactgcaggtacacctggaagctctactcggagaggctgatgaccctcaccggcgtgtacgggttctggaagtacgtgtccaacctggagaggcgcgagacccggcggtacctggagatgctgtacgcgctcaagtaccgcaccatggcgagcaccgtgccgctggccgtggagggagagccctccagcaagtgatgcgtgacggcggccacagacctgatcgatcgatgagcgagagggagcactcggagtgtcgtgtcttttcccttgccatttctttctttcttctttttccttcccggaggcgaaaaaaaaagagtctgcttttgctaggcggcgggcgttcgttgctgctctttgcttcaagagttaaaatttacctaccttgtcaaggtcttgttccatcattgatccgggtgtcgcttttagtagtctgatggactgttagtagtttgcgttgcgtcggttgagagggaacggtggtggtggtggtgtgtgtgcagtcgggtgtggtgctccctttgtttcctggatgggatgttgctccttgaataataatcgtagtggccttggagcccttttcctgaaataagagcagcatcctagtgcttacctttgcagctgtaactggtgtttgcctcaggatttttgctcctcccttctatggattgtgcttaaaattctctataataaccttacagataaagctttatcacctgatcctttgaagaaataaaaacaatcttgaacattttttgtagg

SEQ ID NO: 90607 - DNA, 3880 bp, Zea mays
  unsure (1)..(3880): unsure at all n locations
  Clone ID: MRT4577_182634C.1
gttttggaggccgaggccattggtgccatgcggccagcccttttcttctccatggttcccatcgatgtgtttttgttcggttctctcgtcagatctgtataaataggcgcctcccttctccgccattcctcggtcctctgaagcgtttcagttcatcgattcagttcttgtatgcctcttgttgtattggttgtttcttctttctggtctaggtactaggactatagtaccaggatctgagtcgtttttttttgggtcttgctcctgtctgccgtttctttccccccttccagagttaggttctgttggtttcttgcctgcaatatagtttcgtggcgcagcgtcaagggtgtgtcgagacttaaaagactggttgttggcagttgggtttatgtcttgctggaggggttttagttttaggatgtcatcgcagcttttatgtcaacggatctgaaccgtttttcggtttcagttttctctgctgactgaagcttccgcttccgtttcggtttcgctgtgcaggcctgaggatccaggaagaggacagcaatgggggaaggtgcaggtgaccgtgtcctgagccgcctccacagcgtcagggagcgcattggcgactcactctctgcccaccccaatgagcttgtcgccgtcttcaccaggctgaaaaaccttggaaagggtatgctgcagccccaccagatcattgccgagtacaacaatgcgatccctgaggctgagcgcgagaagctcaaggatggtgcttttgaggatgtcctgagggcagctcaggaggcgattgtcatcccccccatgggttgcacttgccatccgccctaggcctggtgtctgggagtatgtgagggtcaacgtcagtgagctcgctgttgaggagctgagagttcctgagtacctgcagttcaaggaacagcttgtggaagaaggccccaacaacaactttgttcttgagctggactttgagccattcaatgcctccttcccccgtccttctctgtcaaagtccattggcaatggcgtgcagttcctcaacaggcacctgtcatcaaagctcttccatgacaaggagagcatgtaccccttgctcaacttccttcgcgcccacaactacaaggggatgaccatgatgttgaacgacagaatccgcagtctcagtgctctgcaaggtgcgctgaggaaggctgaggagcacctgtccaccctacaagctgataccccatactctgaatttcaccacaggttccaggaacttggtctggagaagggttggggtgattgcgctaagcgtgcacaggagactatccacctcctcttggacctcctggaggccccagatccgtccaccctggagaagttccttggaacgatccccatggtgttcaatgtcgttatcctctcccctcatggttacttcgctcaagctaatgtcttgggttaccctgacaccggaggccaggttgtctacatcttggatcaagtgcgcgctatggagaacgaaatgctgctgaggatcaagcagtgtggtcttgacatcacgccgaagatccttattgtcaccaggttgctccctgatgcaactggcaccacctgtgggccagcgccttgagaaggtccttggcaccgagcactgccatatccttcgcgtgccattcagaacagaaaacggaatcgttcgcaagtggatctcgcgatttgaagtctggccgtacctggagacttacactgatgacgtggcgcatgagattgctggagagcttcaggccaatcctgacctgatcatcggaaactacagtgacggaaaccttgttgcgtgtttgctcgcccacaagatgggtgttactcactgtaccattgcccatgcgcttgagaaaactaagtaccctaactccgacctctactggaagaagtttgaggatcactaccacttctcgtgccagttcaccactgacttgattgcaatgaaccatgccgacttcatcatcaccagtaccttccaagagatcgccggaaacaaggacaccgtcggccagtacgagtcacacatggcgttcacaatgcctggcctgtaccgcgttgtccacggcattgatgtgttcgaccccaagttcaacatcgtgtctcctggcgcggacctgtccatctacttcccgtacaccgagtcgcacaagaggctgacctcccttcacccggagattgaggagctcctgtacagccaaaccgagaacacggagcacaagttcgttctgaacgacaggaacaagccaatcatcttctccatggctcgtctcgaccgtgtgaagaacttgactgggctggtggagctgtacggccggaacaagcggctgcaggagctggtgaacctcgtggtcgtctgcggcgaccatggcaacccttccaaggacaaggaggagcaggccgagttcaagaagatgtttgacctcatcgagcagtacaacctgaacgggcacatccgctggatctccgcccagatgaaccgcgtccgcaacggcgagctgtaccgctacatctgcgacaccaagggcgccttcgtgcagcctgctttctacgaggctttcgggctgacggtggttgaggccatgacctgcggcctgcccacgttcgccaccgcctacggcggtccggccgagatcatcgtgcacggcgtgtctggctaccacatcgacccttaccagggcgacaaggcgtcggccctgctcgtggacttcttcgacaagtgccaggcggagccgagccactggagcaagatctcccagggcgggctccagcgtatcgaggagaagtacacctggaagctgtactcggagaggctgatgaccctcaccggcgtgtacgggttctggaagtacgtgtccaacctggagaggcgcgagacccggcggtacctggagatgctgtacgcgctcaagtaccgcaccatggcgagcaccgtgccgctggccgtggagggagagccctccagcaagtgatgcgcgacggcggccacagacctgatcgatcgatgagcgagagggagcactcggagtgtcgtgtcttttcccttgccatttctttctttcttctttttccttcccggaggcgaaaaaaaaagagtctgcttttgctaggcggcgggcgttcgttgctgctctttgcttcaagagttaaatttacctaccttgtcaaggtcttgttccatcattgatccgggtgtcgcttttttagtagtctgatggactgttagtagtttgcgttgcgtcggttgagagggaacgttggtggtggtggtgtgtgtgcagtcaggcgtggtgctccctttgtttcctggatgggatgttgctccttgaataataatcgtagtggccttggagcccttttcctgaaataagagcagcatcctagtgcttacctttgcagctgtaactggtgtttgcctcaggatttttgctcctcccttctatggattgtgcttaaaattctcaaaaaaaaaaaaaaataaaaaactccagggggggcccgggcccccattcgccctatagtgattttaatcacagcncccgcgggggggccccgccctcccgtcccttttggggcgagaattcggcccgccctttcccgcctcactcccccgaccaccgtacntccgcgcgcacgccccagaccgcgcagagcccgcgcccctggtattcccgcgcacaccgccccccccccgcccccaccgtccccatagtgttattccactctcctgtatcccgcccttagcccctccccgccgcccccaatttgacccaccatctcctccccccaagatacgccttcacgaccagatttcacccgcggccgctccccccgcacacacaaaaaaaaa

SEQ ID NO: 90608 - DNA, 144 bp, Zea mays
  Clone ID: MRT4577_182635C.1
acacaagtgcaacaagagcggcgtacgggctatgcgctaaaggcgtttcttaacctactgctacactctgtgatgacatatgccctgattacggagacggccgtacgggcctgtcgcagccccgccctgggcccgcgcagtctg

SEQ ID NO: 90609 - DNA, 382 bp, Zea mays
  Clone ID: MRT4577_182636C.1
tacctaaccatacaattcaagtccatttctcattctaaactccaaacctaaaaggggggctgcctacaacctggaatcattatccatccatttataaattctcccactccaccttagatgaagcttacacattctgccattattattttactcattaaatcactcaattcgctcattttttccaacacaattagccaaatatattccactcaacacacgaaaacctttctccacacatataagtgattccccatgaattaacattttaacccatggccagactaagtccatgaacctttataaaaacgttttcaacacttttttacataaccttctcacacctcattacattacaaaaatctacactttcgtcacttgtctc

SEQ ID NO: 90610 - DNA, 731 bp, Zea mays
  unsure (1)..(731): unsure at all n locations
  Clone ID: MRT4577_182637C.1
aattcggcacgagggtctccccaccccacctcacgcaggcggcattaatggattccgcagccgcggccacctccctccaccacacccgcctccttcccgctgcggcgagaaccctaacgtgacgcgctgcccccgaacggctcctcctccctccctccctccacgccgtcgtttgctccgggtgtgctctcgttgggggagggaaacaaaaaaggtcgctgcttcgggagcttccccacgcgacgcgagggtggcgcggcggcccaatgcggctcgatccggattgctccgcgcctcgatttgcctcgggttcggcgccggctccgtgagtccccgcgcctgctgctgccgccgccgccgccgccgccgttccgcctcggaaaggtttatttagttggtgaggagaaatggatggggagaaacctgcttccaaggggcatggtttctttgcgctcttcgattggggaaagaagtctaagaagcgcctgttcgtcgggagcacgggcagttctccaaatctgaagaatgctgcagatcggaaggatattgatgatagtacaccaagcacacggtncaaattcgatcccttgaagacaccnccaagcttgaaggaaagcactgaacatagctgctcatcttcagtaattgatgaagaggctcagtcagaaggagcccgactggtgtggctagggctatgggctngnattctatgcctgcgggcagctcaaccg

SEQ ID NO: 90611 - DNA, 193 bp, Zea mays
  Clone ID: MRT4577_182638C.1
gtcaaagggcatcgatgcgaaagcgttcggacctggtggctccttagacataaccaagttgggggcatccagcaatggcaagacagacagcactacatctttgcaggatgcatgggcatcggcgtgcagcagcactggaaagcagacgatgctcatatccagaggtgacttcattgtaggacaactcaatttc

SEQ ID NO: 90612 - DNA, 420 bp, Zea mays
  Clone ID: MRT4577_182639C.1
aaaacaaaccagaaaacactttttaacaggaaaaaacgctcccatttacggccttgggacaggttttttaccgtttgttgggccaggggttattttgttgttggggggggcaaaaaaacgagacagggttgatccatacttttttttcttgggggggatgtaacttgcaagaaaattttggaacagggggccggattgaaagtttgtgtaagcgcctaaattttttttaaaacatttttaaaattttttgtgatgacggggggggcaaagcgtccagtgtttttttgctttttggggagtttgggcgcaactttaaccaggggagcaggggcggtcctgtgaatccttgccggttttaggggagtccttttcgtactgttcgatgtaaacacggttgggggcaccaaaaaaaccggttcc

SEQ ID NO: 90613 - DNA, 362 bp, Zea mays
  Clone ID: MRT4577_18263C.1
ggcggcgctcctgcagctgaggcgaagaaagaagagaaggtggaggagaaggaagaaagtgatgacgacatgggcttcagcctcttcgactaagcctgtacaatactcttgactattgcacaggcttagtcgaagaggctgaagcctgtgcaatagtcaagagtattgtttttgagtcgcggaagcagagggaagaaaaatcgtagtcatgtttggactttaactttgttttatgttggaaagtacttgaaagacttttcctgtggtaattctaggcgtaggttgctgtgctggttggggtttactggtgaaccagagtttttctatctcccactatgaatttgttacctcaagttacctgg

SEQ ID NO: 90614 - DNA, 494 bp, Zea mays
  Clone ID: MRT4577_182640C.1
gccacgcttcctgccgtttaccttttgcgtgagcaaagaagagagcgcgtagctggcgtcatgtatggcatcatccacaagatcgaggtggaagctccacctcgggggcgaccacgaggatcacgaggaggagcaccacaagcaagccaaggagcaccacaagaaggacgacggggagcaccacaggaaggacagcggagggcacaaggaaagcatcaaggacaagatcaacgacaagatcaccgacgagcacggcgaccagtccggggaccacgacgagaagaaggacaatgagaagaaggataagaagaaccacggccagggccacgaccacaacggcggccacagtaacagcaactgcgacagcgactgagatctcatgtgccacaacaggttccacacaagtatgcttgctgaatcgaggattcataccagctgatgctgatttagtgcatgcatgcagtcatgcatgcatgtttcgcgctattataatc

SEQ ID NO: 90615 - DNA, 305 bp, Zea mays
  Clone ID: MRT4577_182641C.1
tttttctattctttggtggtgtcttttttttttttttttttcggacgaaccagaccaccatgaaccactggcaaccaatccaaaaaatccttgcaggacgcacatctttatgggggaccttgaatatttgaaagggcaactatccataaactaagccgggggtaaacgataatcaattgctaaacaagaaacgagcgcgaccctctgggtgcgctcatttgcagaaagaaactccgtcaacactcgggggtgactcatcagtagaaagaaaaggttgactgcggcttctgcacggtgggctggac

SEQ ID NO: 90616 - DNA, 286 bp, Zea mays
  unsure (1)..(286): unsure at all n locations
  Clone ID: MRT4577_182642C.1
cttccttctctgccttttttctacccctttccccctctcccccccannnnaaccctcgccgcccccatgcctttgccccggttgctactgccttctcttgccccccgaccctttccgggccatcaggttcggcgcctacttcgataccccgacgagattctttcagcagtccttgttagtgcccacgggggtttccccgctggccctttagcccctgttttgttcgggggcccctctcgaggtctgacttacacgtcgggggcctggcccctggttcctttctccc

SEQ ID NO: 90617 - DNA, 590 bp, Zea mays
  Clone ID: MRT4577_182643C.1
gtctgttgcattattaacttaaagattatccaatatctcatcagtgggctatcaatgatgacacggaaacaattgcctctctttgcttgtactgagtatctgacaacctaactaaaaaacactccaacaagaaacaaatgaaactgctaccacgcacctggaacgtggcagagcctgatcaagggcagaaaacccaatatccactctacagtaccaaaactgtttggtaacaggagaattcacaaacgagctaggttttcatacgacgtgttcggttccgattcactagcattcttccgactctcaatgcttgtgcctcagtaccaaaggagggcgttagacagtaggaccttaaccgaggcagcttcgaccgctggtatcctgcagcctttggcttcagtgcacagatttcatttgtgaatacatccatatccttgctctggcccttcaaatgacagatacctcagctctttgctagagccatggagtgggaagacctccgaaacagcgttctatgaagtttgagcaatcgtgagctagtctcatcaacacgctatggtttgcacacatggaccatgtacggtacatta

SEQ ID NO: 90618 - DNA, 287 bp, Zea mays
  Clone ID: MRT4577_182644C.1
cttccgaacctcctgggactatcttcctggattgctccctttgcaggctctgctaatggcccagtttccacctcattaagcctccctctcctttgaagccaattctgactcctttggtgatcctaccgtgagaaccagatcagacgcagggctactcagccttagcaggagctgataaagccacagtcccccttcctccggtcctttccaaacacttcctatcttgggctccccctccgtggaacacagagcttccccaaggtttatacccctcaagaccttgacgc

SEQ ID NO: 90619 - DNA, 276 bp, Zea mays
  Clone ID: MRT4577_182645C.1
gaaaaatgatgttagatgggtcaagtaaatgactattcccaaaacaccaatcattcctagtgcgccaaatagcccagaataaagcaccacaaccaaataacaccaactaagccatcgtgtcttttggtttacaaaaccaattgtcatacaaatctttgatattttttggaatagatctcaaattcagggcacttgaataactctccacatgtattgagcaatggggcaatagaaaaacaagtgatcaattgttggggtcgtgcttcggtacgccga

SEQ ID NO: 90620 - DNA, 292 bp, Zea mays
  Clone ID: MRT4577_182646C.1
aattaaaaaggggggggttttttgctgggggcccgcgtttacatacaattcaaaaaaaaacattttcacgtttatgtgggggagatagggccaaacacgaccaccttattattccgggctgcacacatgcaaaaagatgcccaccgcgctctactcatgaaacgggaattctggcgggcatgccacacaacacccggggggactatgccacccgttcttgcggtggaacaggcccccccacctataggcgtaatggcccccggcgccgggtacacacaccgggggactttgc

SEQ ID NO: 90621 - DNA, 117 bp, Zea mays
  Clone ID: MRT4577_182647C.1
aaacagaggcgccatgttgcatacgacacattgactgtgacccgatcaatttgacgcaatgctaagtcaaacgctttagaaatacgctgggttgcatgcaaaagggggaaacagctg

SEQ ID NO: 90622 - DNA, 292 bp, Zea mays
  Clone ID: MRT4577_182648C.1
gtgtttcggatgaagatgcaggagtcgatatttcagacaatcatggtacaaatcctggcatccagattgaagcagtggaagagataactgatgttgttaacgaactaaaacttcccgaagataaaactactgaacaagcacctgttgaaatggaacatcataatttgagaactgaggaaattgattctctcttggacaaatgccttctgcgagcgctatacacaagcatagaagaaaaagatcttccaatgccaggaagtacactatgggcaaatcacatactaccgaacag

SEQ ID NO: 90623 - DNA, 340 bp, Zea mays
  Clone ID: MRT4577_182649C.1
cactagtctgttgaagctcaacctgggccaatcttacgtaagaatggaaccacccaaggaatgaagggaaaggagaaggatttcgccttgggcccaaaaagtttctcggagcccaacccaatcggaacggcggccaagggcacggccaacagggactacagggagcccccgcgggccccgctcttcaaccccggagagctcatgtcctgatctttctaccgccccggtatcgcagagttcgtcgccaccttcctcttcctctacatctccatcctcaccgtcatgggcgtctccaattccacctccatgtgcgccaccgtcggtatccagggcatcccct

SEQ ID NO: 90624 - DNA, 298 bp, Zea mays
  Clone ID: MRT4577_18264C.1
gagaacacgagcgccgacctgggcgttcggatccgtcagcagcgatgaagctctactcgagcctgtggaacgccgacgactgggcgacccgggcggcgcgagaagacggactggtccaacgcgcccttcgtcgcctctaccggcttccacgtcacggctgcaggcctcccggggcgcgctttgcgcacccagggcgcgcgctgtgggaccagccggagttcagggacctcgacgccgtcagtaccgtcgcctggccgacttaggcgcctgtcaccatctacaactactgcaccgatcg

SEQ ID NO: 90625 - DNA, 281 bp, Zea mays
  Clone ID: MRT4577_182650C.1
cacacatgctataatagcagggtgcatacaccttctgtatagacagagtaaataacatgaagaagctacgcggaccatcgattttgttgtgaaccaatctgatttcactattcagacacaaaggaatgttacagaatacatgttctttgcacagacgatcacagtagcagcacactatcttccatcagaagttcaaggtcaaattgacagtctgaaaggcgatttgaacaaagcagctgacacaatatctgtgaagacagcagaaaattacaaaatgataa

SEQ ID NO: 90626 - DNA, 281 bp, Zea mays
  unsure (1)..(281): unsure at all n locations
  Clone ID: MRT4577_182651C.1
agcagtggtaacaacgcagagtacgcggggaatttacgccttcatgcactccacacacattacacagtgcgacctactctgcctgtaatcgctggccgtgaatgttggacacatgtagaaactatagattcattcgaggggaaggcaggttctcataggaactgtcaagaacaaataagtgggtcttttgccgacatgccgcgccaaactgtcagtgaccactgccctgtttgcagtacgttgttgattggtcaacctgcccacttggtgtnctgctactc

SEQ ID NO: 90627 - DNA, 1065 bp, Zea mays
  Clone ID: MRT4577_182652C.1
ttgggtgagtcgggccgggaagggcatttgctagcccctttctctcgaacgaacaaagcaggcggcgcggctggtctggtcgccgtgtctgtctgggggtgcaccatcatcggcggttcgatcgaccggtccgtctcttcgtccagccgcaagaaccagagagcttcctctctgacactgacagggcgcctctcctcgagagtcgagaagaaccacactctctcggtctcggtgctcggtagatgcgcatgcgcaatgcgaacggcagcagctggtgttcccgcgtggcggtgctgcagcaagtgcttggcgcgcaggcttctcctcatggcttcggcgtcggcgccggcgccctgcacctgcagcggctcggtgccgctaccgccccggccggcgtggagtctgcagatgacgcagtgatgccgcgcgccgccgctcctcttccgcgccctcgcgtcgctcaacctcctcctgctcgtcggctacctcctgctcgtcctcctcgccaagctcttcgcccgcctgcaccaccacagggccgccgccgaggaccgggcaagtagtggttggtatgatggccgccgctgcgaccaccgccgccgccgcgcggaagccacggccaccgatgacgaagagtacgccgccgcggataccgtcgaagggcagcaaccggacgcgctgttctggttcgacgaggccgtgttcgaggacagcgccgccctgctgatgcttggcgacgaaggaaaggatcaccacctgtacgctgccgcttctacacgttgcttgcagcaggtggagagcacgagtacctttcccgcggaggaatctgcccgcatctcgccgcgcaccgagagccccagcgccagcagcatcgatgcgattgcggagcgtatgcagcgggtgcaggaagaggaagaggccaagggcatcgtcgccgtccagcatgccccgacgacgacggtcgtcctggaaccggaacaacagagtgcccctgctgctccggtcgtcgtcgccgtaccaccggagcatgtctccgtcgaattagggaacaagcaggaaagcgac

SEQ ID NO: 90628 - DNA, 304 bp, Zea mays
  Clone ID: MRT4577_182653C.1
acgggtgattcttcatcatggttctgatggggttctgattcgtgaggatactcatggatcctgtccgataacgagcgcatcgagatggcttcgctacctgttaaccactactcgttagcacatggactgagtttgcctaataagcatcactcactgcataaatcattgactacctaaactgaagcactagaatgcaagatcatcctgaattgcgagacgcagacggcccgcgtactaggtttccctatcttgtgtacggtaaaagctatgcgtaacgatattcatagcttgaacctgtatgaaa

SEQ ID NO: 90629 - DNA, 166 bp, Zea mays
  Clone ID: MRT4577_182654C.1
gcggacgcgtgggggccgtcgctgtaagagatgtacagacccagtattgcgagggggaccataatctggaggatcttgacgacgaactcttgggtcttgtcctccttgaattactgggtctgtacgtccttattatgtcggtcatcaagcccttattcgctcattg

SEQ ID NO: 90630 - DNA, 541 bp, Zea mays
  Clone ID: MRT4577_182655C.1
tcaagctttttttttttttttttttttttttttatttttttttttttttttttttttttttttttttttttttttttttttttttttttttttttttttttttttttaccccgcccggggggccgctcaaaggggaaatcccaccccccggggggccggtactaggggacccgggcccggccccaagctgggggaaaacaggggcaaagcggttcccgggggaaaattgttacccccccacaattccccccaaaatacgacccggaagcaaaaagggaaaacccgggggggcccaagggggggcccaccccccattaatggggggggccccacggccccttttccagggggaaaaccgggcgggcccgctgtattaaagaacccccccccccccggggagggggggtttgggtatggggggcttttccccttcctcgctaaatgacccggggggccggggcgttcggggggggggaggggtttcagctcccccaaggggggaaaaacgggttcccccaaaatcgggggaaaccccaggaaa

SEQ ID NO: 90631 - DNA, 443 bp, Zea mays
  Clone ID: MRT4577_182656C.1
cctcgagggccggcgggaaagactacaaagcaggggggctgcccatcgaccttttgaggctcttggacacctgccgaccctttgagccgtcgcaatagcactatgacaatgcgggcaaggatgcgctgctgttgtcctacatagccgccgcggtgacgagctgtcacctcgcccgatccctgcggcggcggcgtctaccctcgatgagcggagcacatcccgtcttcggagagaagcgcagaacgtctgatcggtaatgtcgacgtgcgcgaggaccttcggatagctctgatggctcgtcaagaagcgcatcacactgaagatctccgggttgaaaagctgctgattgagcatatttataccgccaacctgggcgaacagcgggatgatgactacgatcacgccgactatggactcagcgacgtcggcatatagctatgatc

SEQ ID NO: 90632 - DNA, 652 bp, Zea mays
  Clone ID: MRT4577_182657C.1
ccggccgggacgaacgcagacgtatcaccttcgccttgcctatatcctaaccaccaagacaggaagatactgctctatcttgtctgactgtgtgctttttgcgggtgttcatcatcgcttcactaggcagactctcgaccaaacggtgccgatacaaaacctcgtaactgctgaccgcggcatggaccacaacttggagcgtggagttcgagaagcaggctgatcgagtgtgtgcacaaacaccggccgggctgagcgcgttcgacggcaccgagatcgtccaggcctgcgccgagggcgcacgccaacaacggcggcgcgatcaacgacatcggcctgtactccgccttaggcatctaggtccgcctctacctacccgggcaagtgcatgccaacatgatgctgcacagcagcgtgaacttgcacgggggcgcgttcatgaagcacacgggcgcgtccctggtgttccagatgtacaacgactacgtggagcgcgaggtgatggtctacaggaaccccggcgcgtacatgctgctgacggaggaggagctggacctgggcctggagaggcacgccagggtgttgcactacggcatcatctcgctcatctccgatgcgtgccgctcggaacacatagcccgtgatgcgcgca

SEQ ID NO: 90633 - DNA, 504 bp, Zea mays
  Clone ID: MRT4577_182658C.1
cgtaccaccaccaccaccaccgcacacccgccggcgccaatgacagcaagaagcccaccccgcccgccgccctgcgcgacctcttccgcttcgccgacggcctcgactgcgcgctcatgctcatcggcaccctcggcgcgctcgtccacggctgctcgctccccgtcttcctccgcttcttcgccgccgcctgtgcagttcagttcagttcagttgtcctgtgggtcggaccgttcaccgcttcactccacgggatcaggcacagtgatcagtgccgtgctagctgtgtggaacgcttgttttagtgttgtatccacatgtacgatttgtaacgtttccttgcttctcgtacctgtgggtcggaccgttcaccgcttcactccacgggatcaggcacagtgatcagtgccgtgctagctgtgtggaacgcttgttttagtgttgtatccacatgtacgatttgtaacgtttccttgcttctcccgtttcgtgttttcgtatggt

SEQ ID NO: 90634 - DNA, 1591 bp, Zea mays
  Clone ID: MRT4577_182659C.1
taatcctaagcgctcaaggccctgagcagagtccatccagatatgtcaaggtttccacccaggcgcaacaagattagctcaaagagaatataggatgaagggttcactggatcaacaatactatcatgctttaatttacttactgaactgcagtcaatactcaatgctacatttcagcgagaactcatgctcgcctatcaggtgaatctctgtcattctgacatattatatccaaaataagtcctaaacttcatataaattatctatcattgcaataaaaagctcaagtatgtgcatgaattgtcctctcacacttgcaaaacactaataacccccttgtccttctcccccaatgttctaagaaaaaaaaaaaaaaaaaaaaaaaaaaaaaaaaaaaaaaaaaaaaaaaattctttgacccgctcgaggcgcgggggatataaccacagaaatccatcgacgaacaactgagaagagctgcgcctgcgcctgcgcctgcgggaaagggagaacatggtggggaagaagaggggtgttatctccccgctggaccatctcgctgggctgctggaggtgcgcgtggtgaggggagtggacctcgccatccgcgacctccgatccagcgacccctacgtcgtccttcgcatcggcaaggcgcagaaagtgaagacgcgagtggtcaagaagagcatcaatccggaatggaacgaaaaactcaccctctctattgaagaccctgccgttcctattagactggaagtatttgacaaggacactttcgttgatgatgcaatgggtaacgcggagctggacatccgcccgttagtcgagattgtgaagatgaagctccagggtgtcgctgacaaaacggtggtaaagaagctggtgcccaacagacagaactgcctagccgaggagagctccatatacatatcggaggggaaggtgaagcaagacctggtcgtacggctaaggaacgtagagtgcggcgaaatcgagctccaacttcagtgggtccacctccctggctctaagggtgtatgaggagagttatgagcgctgcctagcttgcactgctcaggttcttcgcttcacattaaagtaatctatttgaactgtagttgtaatctatagagataaaagcagtgtaaaaatagtagaaatcgatatggattaaagacagtcgacccagctcttgctagttgaaaagaacccagctcttgccaacatgtggagagatcttgagtcagtctaaatttaaccgacagaattagattagatgtacccagtgcatgaacgattggaaatcgtgactgtaaaatgtgtgcaatgcatttactaaggggatgtttggtttgagtaattactccatccaaaatgatgtgtgtattatgtgtatattttttaaatttagtgggatgacccatttttcatattagtaataactaactataatgaataaagtggtgatcatatcaactcattccattccactaaataaccccttaatccacccacaacatttaaatattaaacagtccaaattaacctctaacccacgcgtccgcccacgcgtccgcccacgcgtccg

SEQ ID NO: 90635 - DNA, 262 bp, Zea mays
  Clone ID: MRT4577_18265C.1
aaatattaccggggatacaaacatcatttcattgcccttaacacttcttactccttatacatttcaagtaagccctcacctcatatttgccccaccaatcaaaaaacacaactttacacgcataaccaaaaaaaaaaacaagaaccccaacacccctatttctaaaaaactacccaaacacccacaccaactcacaacccaaactaattaatggcgcgcactccacctaccaccatctgaacggtgactaacagcatcgaac

SEQ ID NO: 90636 - DNA, 989 bp, Zea mays
  unsure (1)..(989): unsure at all n locations
  Clone ID: MRT4577_182660C.1
ctttccccttccgtccccggccggcgccaacgccactccagtgagccgagggcggagacggtcacggtggacagagtgacacgccgcacgcctctccgtcccgctccgctccagatgggcgcacccacccatggcgctcgacgtttgacacagcgattcctacgccttcggccgcattgccaaacctaacccgaaaacacggttgggggggggggagttcaatccggaatgggacgaagaactcaccctctctatggaagaccctgctgttcctattagactggaagnttttgacaaggacactttggtcgatgatacaatgggtaacgcagagggggacatccgcccattagaggagattgtgaaggtgaaactacaggacgtcgcttaagaaccgtggtaaagaaactggtgcccaacagacaggagtgcctagccgaggagagctcgatatacatatcggaggggaaggagaagcacgacctggtcgtacggctaaggaacgtagagtgcggcgaaatcgagctccaacttcagtgggtccacctccctggctctaagggtgtatgaggggagttatattgagcgctgcatagcttgcactgctcaggttcttcgcttcacattaaagtaatctattcaaactgtagttctaatctatagagataaaatagtgtaaaaatattagaaatcgatatggattaaagacattcgaacccagctcttgctagttgaattgagtcagtctaaatttaaccgacagaattagattagatgtacccagtgcatgaacgattggaaatcgtgactgtaaaatgtgtgcaatgcatttactaaggggatgtttggtttgagtaattactccatccaaaatgatgtgtgtattatgtgtatattttttaaatttagtgggatgacccatttttcatattagtaataactaactataatgaataaagtggtgatcatatcaactcattccattccac

SEQ ID NO: 90637 - DNA, 473 bp, Zea mays
  unsure (1)..(473): unsure at all n locations
  Clone ID: MRT4577_182661C.1
ctctttttcagacgcacgaacgtccggtgcacgcacaccgattttccctatgggtttatagcagcagactacagcgctcaagccggcatggcctcccaccattcgcactacgcgcaagctacgcgcacgacgcggccaacctgctcagttcgtgcttagccacaaccgaactctacgcaactaacacacagcagtggccactcatctcacctatgcatgcatgtagctgcacacgcaacggacgcgtcaagctactgaccgnatcaaacgcacacaacgccacggccaccaggcatgcacacacacgccgggtttatttttaacaggcgcttggccctccacagcagcggcgccgaggcggcgccccgcgtgcaggagaggcncgtggcggttgtcaacgcgtcggcgagctcagacacgggcatctncggctccaggcagcccgggtcgaggccgaaggagatcttgcagat

SEQ ID NO: 90638 - DNA, 514 bp, Zea mays
  unsure (1)..(514): unsure at all n locations
  Clone ID: MRT4577_182662C.1
ccacttctgactkaccactgtkccgcgccgtggtcaccggacggacacacagaacgacgatggccgcgtcggcgcbgcaccaraccaccagcdtsctcgggcaggccctggtctcccgcrccgccgsgcgtcgatgccggcgscgcatcaccatdckccgcaccgtcaagagcsttccccacatcatatggkacggccctyatcgccccaagtatcttggcccgttctccgagcakacgccgtcgtaccttayckgcgagttccccggcgactackggtkggacaccgcgggcctctcggccgacccggagacawtcgcrcycaaccyggagcyggaggggatccactcccsctgggcgangctgggcgcbcygggctkckttttycckgagawccttgccaagaacggcgtcaagttcggcgaggcggtgtkgttcaaggccggcgcgcagatcttctcggagggcgggctggactaccttgkgaacccaacctggtgcacgcacagarcatc

SEQ ID NO: 90639 - DNA, 899 bp, Zea mays
  Clone ID: MRT4577_182663C.1
ggtgctgccacggggctactgctacctaaccttttgcttggccgatagataagaataccggactgatggatggaagtggatgtgaacaaacagctggttggctcagggcaggctccacaccaccaacggccggagcagatggacatggacgtctcacttaggaggagaaggcagatgcggcagaagcaccagcacactgaatgcaatcattcaatactcatctacagctagccaagatgtgagaagagagcaaggaagaattgtcaagcctcccacgtttccccaatcttctctcttcttttcatttccccacttttaatatgtttattttcctcttatttgcaacagctcctttaattatatagcaacattttttttaagatatagtagtatatatattaattttatcatatctctagtccgaataccacgcaaaagtagctagtaagtaggatgtaccaactagctacagcagtgtataataaagaaaaaagtcgttgggcggtcaaaaaaaaaaaaaaaaaacatacataaaaaaaaaacttgcagtacaggtatttccccgcagtctttggagaagaagatggatttgtgaggtgatagcacaaaaaaaaaagtcatcaggcgcttctggtggtagactggagactgggctggagaaatgttggagctggaaggaaacgcacggatggctcctgcttgacaagtgtaaaggcaggcggcaagcacggacgtcgagtcgaggccccggccggctccaagagcttctttctccaatccaatccaatccaatccagaaccctgactgcagtccatggcattgtagcgctaccatttgtccacgtccgatgggtgaagtgaagcatgactgactgactgcatgggtttgagtgagttgc

SEQ ID NO: 90640 - DNA, 1019 bp, Zea mays
  Clone ID: MRT4577_182664C.1
tccggtccggcaaacccgggtgagaagactgcgcctgcgcctgccctgcgggaaaggagaggtggaagaagaggggtgttatctccccgctggaccatctcgctgggctgctggaggtgcgcgtggtgaggggagtggacctcgccatccgcgacctccgatccagcgacccctacgtcgtccttcgcatcggcaaggcgcaggtccgcttctcctcccctcccttttggtttgctttgctgctggtaggttttatcggcaagagatccggcgaattccgctcgaatcgatccccggtctacagcacagatcacgactaatatgctatatagctgtttggatttttcattttattttattttccctgttcagagttgcctgccctattgagttgtctgtctctcttctcacacttgcgtgcgccggctaaccgtgattgtttttttccccccaatgtttcacagaaagtgaagacgcgagtggtcaagaagagcatcaatccggaatggaacgaaaaactcaccctctctattgaagaccctgccgttcctattagactggaagtatttgacaaggacactttcgttgatgatgcaatgggtaacgcgagctggacatccgcccgttagtcgggtgaacgtgtcgctccgaggagagctcgatatatatatcggaggggaaggtgaagcaagacctggttctacggctaaggaacgttgagtgtggggaaatagagctccagcttcattgggtcgacctccctggctctaagctgacaacatagacgaagggtgtatgagggaggctatgagctctgccttgccagccctgctgttttcagggatccccaactctttgctgcttgaaaagaactagtggtttgcatgcgcttgcgtggagccattagttgtttgtaaggagttttggttggcgtttagtaaatagcgtcagggaaatgtatgtgcatgaacgtttgaaaatcaagactatataaaatgtatacaatgcatgtactaagt

SEQ ID NO: 90641 - DNA, 885 bp, Zea mays
  Clone ID: MRT4577_182665C.1
acatcatggcctttctgctatttgttcttgctcaaaatatcttggaagcagagggcccatggtcggacagctttcttattaatgcgtcattggtttttttgtgtgaagtacttatcgatgctatcaaacattctttccttgcaaaatttaatgagataaagccagttgcatattcagagtttttggaagatctttgcaagcagattttgaatgacaaacctgatgaccgtcagaaggacctaacattcatcccacttgccccagcttgtgttgtaattcgtgtattgaccccagtatatgctaccctccttcctgctggcccttttatctggagaatattctggattttactttggtcagttctgacctattttatgctcgccatattcaagataatcgtgggattgatactgcgctgccttgcaaattggtatgtaaatctacggctcacaagaaaacaacacgtggattgagtacatggcaccacaattctgctgctatcgttacatctgtgagtagaaattttgctgtggtgcatgaagtgcagcaagcactgcagctgctgagagttatatgacagaagtattcatagtatagtacagcgcagatgaatattatagtctcttcttccaagggttttgtcgattcgaggaacagattagtcaaattttgtggtgtttagacttctgacctccgtttgtgcatagctcagcttcatccaaaactatctgctgtcacctaaccaagatgttctggtctgtgatgtaagacatgtttatacatttttttaaaaaaagaaacaaactgtactttcgactttagcaaaaaaaaaaaaaaaaaagcggcccgcgatctagaatcgattattgagctcttcgcccgggg

SEQ ID NO: 90642 - DNA, 705 bp, Zea mays
  Clone ID: MRT4577_182666C.1
ccaagtctttcagaagactattttatagcctagcgattacacacccgtgacttcattttccaactctcttaaagagacagacgctcatgctgagtattgacaagtaataactctttctcatttttttttttcaggaagtatttgacaaggacactttcgttgatgatgcaatgggtaacgcggagctggacatccgcccgttagtcgagattgtgaagatgaagctccagggtgtcgctgacaaaacggtggtaaagaagctggtgcccaacagacagaactgcctagccgaggagagctccatatacatatcggaggggaaggtgaagcaagacctggtcgtacggctaaggaacgtagagtgtggcgaaatcgagctccaacttcagtgggtccacctccctggctctaagggtgtatgagaagagttatgagcgctgcctagcttgcactgctcaggttcttcgcttcacattaaagtaatctatttgaactgtagttgtaatctatagagataaaagcagtgtaaaaatagtagaaatcgttatggattaaagacagtcgacccagctcttgctagttgaaaagaacccagctcttgccatttgacatgttgatcatgtagcggtagccgaagaggatgcaatcctaaatggcccatgtgcattatagttctatcaaatagttatatttttttattacaag

SEQ ID NO: 90643 - DNA, 320 bp, Zea mays
  Clone ID: MRT4577_182667C.1
tttaacccttcattttcagctctagggacggacgttttttagatggcgcaaccagtgcttgcgtcctgaggaacagggcatgattaatgccaatgctcgaaataattgcatcacctggaacgataagagctgatgtcatacaccaatcgagttcatatagattgttgccgcctcaacaacaatgtattgttcggcaaacaggatattgggatgcttggatctagacaaagctgtcaccttgatgagggggaacataaggtggatatcgcaaaagtttaaccttagatggggagagttacatttactgttggtgaggccgc

SEQ ID NO: 90644 - DNA, 435 bp, Zea mays
  Clone ID: MRT4577_182668C.1
tcctctagagcggccgccctttttttttttttttttatgcgaaaagagaagcatgtgggttattactctaatggacgtacagtatacaaaaaaaaatgccaaatggttggcaggtaggcgctataggttctacacgaacaggcaggtaaccctgaacacaattcgcgaatcacataatctgtcgatgcaagggggagttactacgccctgtgcgcgctttgtgcaagttgtgccagatcttggtattgctgccgcccctggtgggggcagggacttcatccgtggtggaaaaaacaacaacggctggtgctcggtatcttgcacaaactgttcggcctgtttttgctgttgctgccggtggcttttccaagcccacaccttttttttgagcgcaggccccactttttcccttacgggcctttgggactcaatggg

SEQ ID NO: 90645 - DNA, 202 bp, Zea mays
  unsure (1)..(202): unsure at all n locations
  Clone ID: MRT4577_182669C.1
acgcgtgtgggacgacggacgccaaggcgcaagctgacggtcaagctgctcangtcgcggaggaccacgatctgtacactcgcgatggccttgatcgccgaccgtagagtgaggaaccggatcacttccaccgaggtcacctatgacctagttgatctcatcttgtgcatgacgaagggcaagcccatcgacgtgacccacg

SEQ ID NO: 90646 - DNA, 909 bp, Zea mays
  Clone ID: MRT4577_18266C.1
tgggaccctcgaggccggccgggaacgattctcggcaacggatatctcggctctcgcatcgatgaagaacgtagcaaaatgcgatacctggtgtgaattgcagaatcccgcgaaccatcgagtttttgaacgcaagttgcgcccgaagccttctggcggagggcacgtctgcctgggcgtcacgccaatagcctccgcatctccttccagtgtccgccgtcgtgcgctcgctacccctctccctcgaggcctttgccggcgaagagcgcccagtcgcccaccaggatgaagtttgttgctgcctacctgcttgctgtcctcgctgggaactccagcccctctgccgaggacttgacagccattctagagtcagttggctgtgaagttgacaatgaaaagatggaactccttctgtcccagctgagcggtaaggacattaccgagctcattgctgccggcagggagaagtttgcttcagtcccatgtggcggtggcggtgtggctgtcgcggcagctggccctgctgctggcggcggcagcgctcctgcagctgaggcgaagaaagaagagaaggtggaggagaaggaagaaagtgatgacgacatgggcttcagcctcttcgactaaacttgtgcaatagccaagggtattgtttttgagtcgcggaagcagagggaagaaaaatcgtagtcatgtttggactttaactttgttttatgttggaaagtacttgaaagacttttcctgtggtaattctaggcgtaggtttctgtgctggttggggtttactggtgaaccagagtttttatatcccactatgaatttgttacctcaagttacctggatgttcactgttttgttggtacatgtcgattttgcctcgtccacaaaaaaaaaaaaaaagcggcc

SEQ ID NO: 90647 - DNA, 327 bp, Zea mays
  Clone ID: MRT4577_182670C.1
ttgctcctaagaggtttagtcccatttgcattaaaaaaaaaaaaagtagacatagtagtagacccctccaagggcggggccttctgccggggggccgatctcgggggtccatgctcccgaacgggtgcttgcgaccgcaagcttgccttgggcggcgccggatgtcaatccaccgggggctgttggaccatgcaacctctgggaagccgccgcggttccccacctcatgtgcctcgccgagcttccccctgtctggcggtggcgttataccgagggggtcggccccgagtgtcctaaacgcagttccgcatgctggatggccattgg

SEQ ID NO: 90648 - DNA, 406 bp, Zea mays
  Clone ID: MRT4577_182671C.1
gcggcggctgcggccgcgcaacaatggcagatatatccgaagatggtgaagttggtaaaggcggggaagggccgtatccttctccaaggctccctttgccggcaggaaagcagttattgtgcgcgtgtttgaggagggcaccccgcaaccgccctatgggcccttgctttgcggaaggcttggcgaagtcccaaaaaaaggtaatcccaagggcctcccccaaaatgactgcaaaaaaatttttcgtaaagggcttatataagctggttaattttaatttacctaatgccaacccagttaacctcttacgtcattttcaaggatgtcgccaccggggggcccgacgcactttttacccacaacaagaaggtcgccgcctgcaaaacggccaaagcgcgccttgagg

SEQ ID NO: 90649 - DNA, 705 bp, Zea mays
  Clone ID: MRT4577_182673C.1
ggccgctttttttttttttttttctttttttttttttttttttttttttttttttttttttttttttttttttttttttttttttcccataaaccgttttaattcatccattaggaaaaatcattggaaacgggatccatccatcccggaacccctggaaaaaactttaaaacttggaaaggaaaaactgggatccctcggtaacacaagttctcactaggaatggaaaaaacccggtccactaaaaccctttggaaaggaaagggctaccatataaagccccacggatagccacctaaacctcgaccccgggttaaagggggatgggggggaccggctggacaacgttgggggtacggacaaaaccgacccccctttggggaaccctcatctaaaagggaccccaggggggggccccttccccacagggagacttccggggggggagggggaccacctgggggggcatccgcacggggccctggaccttgagctccttaccctgggggcccttaaccaaacccccgaaaactttttgggggttttggacccttttggaggaaagcgggatgcggatcctgggctggggatccataaggccagtttaaaacccggccttgcccgccttaatggggggggcgtaccccatatccgaccccatgggtcgggggaggagggagcggaactccggcgctagggtttccc

SEQ ID NO: 90650 - DNA, 367 bp, Zea mays
  Clone ID: MRT4577_182674C.1
ctcaatccatgtaaattttatatttttgattgaatttcaatcccgaataattcaaaatctggggtgggggggaagcaatatcatccaatccacattaaataaaaataacccaacaaactcttactgcttattaatttctactcctcacataattttataatgatacaaatatacactttttacctacacaatccatctacttcagctatcaaccatactacaattggataacatcatcaatcccctaatccatcaaatgtcttaccaacccctccatctccctcagctaatcgcacttacatctgcccctaccatggtttcaacaagtcatacatccactaatacaaactcaacactcattttaaaa

SEQ ID NO: 90651 - DNA, 631 bp, Zea mays
  unsure (1)..(631): unsure at all n locations
  Clone ID: MRT4577_182675C.1
cggagcgtgggcggaagcgtggatctgagagcggatcccggaggggtacctgcagtcgttctagcgagtcgtattgtgagtcgtattaactgaccaaattttataattatgtatgtggtgatgaatagtagntaatttttctaatgatcttgtataagatgttgaataaatgagtgggggggatgagtaaataatggattgtttttgtgntttagatagaatggaacatgtgcttgaagtttttactgatgttattnttgtttttgatggtgttatgattgttatacaaataaatgatctgagttaattgcaaactgatttaataaaagacaaaatattttattttgatgattttaatgatataaaagtatgttttttttaattgctgaaggtatatttgtttgtttaattaatttgttaagtataaaattattgaatgagatttataaagggattttgaataaaaaattataatatacatattaaaattttaataaattaatttttaaattttattaaaattataatttttgatttaagaattttataaaattttaataataaatttatattttttgtaaagttttatggttattaagttttttttatagtaataaatttaatatatagt

SEQ ID NO: 90652 - DNA, 484 bp, Zea mays
  Clone ID: MRT4577_182676C.1
ccggccgtagttccacacaaccggccgcctcatcttctgctccttttcctttcccagcgcatcagtcaggaggagattgacgaggcggagggtgtccgcggagaccatggtcacggagatactgctcatcatggtggagcgcaacccgcccgagtcccgtctctccgagctcgaagaccgccagtggcccaagtgaggcgtgcggaaagagagcaaagttcccagtgacacactatctcgcgtccgacggcatgacgctgactgacctgcatgcaggacgaaggcgaaggtgaaccccgaaggcctgggcgatctgctcgaggagatcctggcgctagtaccttgtcatcttccgcaagggcatgagctgcacctggaacgtcatcaaggccgccgacaagcactactactctcgagtagcgccaccggcgactatgcctgaggcgctcgatgtaaacttgctgtgctcttgtactctgaacct

SEQ ID NO: 90653 - DNA, 274 bp, Zea mays
  Clone ID: MRT4577_182677C.1
aataccctggtataaagaaaaacaatggtgtgcaaatgcatgggaaacggggacacatgaaaagggggcccagtataggtcagggtccaaaaggttaaggccaataatgctaacaaaaagcactgccacaaaaaatattggcacacccccggatgcggaattcccaggagggtgttgaacaggaggctcttgaccccgcggaacttgtccaagtggaaattgtaaaccaggtaaatggagcacccccgaatgaggcccgccaccgccataatgg

SEQ ID NO: 90654 - DNA, 446 bp, Zea mays
  Clone ID: MRT4577_182678C.1
aaaaaaatagatttgatgtctcaccaaatggatcttagaaggattacatgtggttattatatggggtatcttagacatttaaaccatacaggcccaagattggcttgctgcgataacatctgtattgaccaaagtaatatacagcctacaaatatggaatctgctgcagctgattaatggacatcacaaacagatcgcggtgttctttaataactacctaagttctacagttcatatgctagcatctgagcaagaaatcacgcatattgtccaacgatggagacacaagaacttccactgttcacactattagaattgtgaacactcattaaggcccatataaacacgggcacgcttgcagaattgatggcatgggctagggccacatgtgatcaaaccgacatggaagaacttgtgtagattgaacggaagcgagtggaactctt

SEQ ID NO: 90655 - DNA, 366 bp, Zea mays
  Clone ID: MRT4577_182679C.1
aatcaattgatgcacctaccttcgaggcaaaccatgtgctgacgactgacattttgtgcgcttttacttaaaaaatgttggattgcatgataattctctccccttggttttgcagaccactctttgtactgcaagattgtccatttgttaattttgaatgtattgtctgcacaaagaatcagccgtgattgaatcctactataccatgagatcacttgggtgccctgtttcacgacggagaggatgaacactatgtcatctggttttggttggtaaaggataacacacatgagtgcctactctgctcacggtactttgtgcgcaaggtcactcgagatgagggtgatccagatggccatgatgacg

SEQ ID NO: 90656 - DNA, 363 bp, Zea mays
  Clone ID: MRT4577_18267C.1
cgcacgcgtgggctgtgaagttgacactgaacagatggaactccttctgtcccaactgagcggtacggacattaccgagctcattgccgtcggcagggagaagttggcttcagtcccatgtggcggtcggcggtgtggctgtagcagcagctggccctgctgctggcagcgctcctgcagctgaggccaagaaagaagagaacgtggacgagaaggaagaaagcgatgacgacatgggcttcagcctcttggactaagcttgtgcaatagtcaagaatattgcttttgagtcgctgaagcagaggggattaaaatcttaatcatgtttggactttaactttgtactatgttggaaagttcttg

SEQ ID NO: 90657 - DNA, 695 bp, Zea mays
  Clone ID: MRT4577_182680C.1
ccgggcctgagatagactgtccggactagtcccccggacagtcctagtacaaatctacaaaaatacacagtccctgtccaaaacatgtttgacacttgcggacggtccacccatcacagccggacggtccacgctataattcagggactggcccaaaaccagccttctctggtcatgactgcggacggtccggcccaaaggcccggacggtccgcagtgcaaaagaacaaagtggctgcctaagtggttagactttggacccctctagtggatcgcggacggtccgccctcaaggcccggacggtccgcgcatccaagactttgcaattttcaaacttgcttttgaaagaacttttaactcacgaaatttgaagcgctgttagtcctcatgaaaatgcaactacttgatgctctatgaggcactaagctttacacagatcaaagacattgacccctcttaatagtatggctatctagcctacttgatgaggacatcactatgagtacgactacaccagcagcacctccacatcaagcgccacttccttcattagccgggccaatcactcgggcccgtgccagagatcttaacttcgtcatgctactgaagaatgagggcccagaagaatatacgaccagcccaactgcggcccatagtggacgacctagggttggccgccctaggggctgcgccc

SEQ ID NO: 90658 - DNA, 112 bp, Zea mays
  unsure (1)..(112): unsure at all n locations
  Clone ID: MRT4577_182681C.1
tgtggncttgancttgagcctgaanacgccgatactaagctcgatttcgatcgaggcgtctcggtccgattgtgtctctcccccgctacacaacatacgagcgcgctgatgg

SEQ ID NO: 90659 - DNA, 248 bp, Zea mays
  Clone ID: MRT4577_182682C.1
gggggggattcgaaaaatttccaaatatatactggggctttattggtgcccccctgaaccagggaatttttacaaaaattggggattgccccctggtgattttgggcctatgctcggccgttggccacacaatgctttaaccccccgaaaaagaaaatttgcactaaattttttggggtgcattatggctgcccctaccatggaatgttttcgaatcgagggggtgaccctcagatgaaccccattaa

SEQ ID NO: 90660 - DNA, 304 bp, Zea mays
  Clone ID: MRT4577_182683C.1
caggccgaaatagggctatactgttagctaatgctagtgagatcgcttgcccctttgaggggatatcatggaagctggacatgcagttcctggcattttggttttgcccatgttttaatctgctgaattagtaaatcctggagaattcaaaagcgttttcaagtactgcagttggtggttgtttctggtcctagtgtatgcatgccagaatcttatgaataatattctttgttttgttgcctatttagctgtttagttggttgttagcctgtcaagaaactggggaacggctccgttactagac

SEQ ID NO: 90661 - DNA, 526 bp, Zea mays
  unsure (1)..(526): unsure at all n locations
  Clone ID: MRT4577_182684C.1
ctttatcccacgctttttgaggccaaggaatcgcctacactgnccgccgtcgccggtcttctgcctgcaaagtgccgccaccagggaactggcgcgagttgtaggaccagaataaccaacccttgtctcatcatagcgtctggtgcagctgcagctggggatacgggagaaatgaaggagatctgggcccggtatcatgctgcgcctatcttgtcacttaaggaaaggacacatagctcgaggaactacaagacccgtactcttggaggcccatgaaggcaagaaagcgagggcatcaatgtcccagaggtgccaagctccccttgtgtccatgattgaggacggaaggcctgacaaacgcgatgagagatttcatgatggtgggtactccaactgctcgaagaaacactgcagatgtccccattggacgactgatgctgcttattcaggatcaggatgataacactaagactgtgaccatattatatggcctcaagggtactgatgatcgaccaaaaccccccat

SEQ ID NO: 90662 - DNA, 594 bp, Zea mays
  Clone ID: MRT4577_182685C.1
attgcgtaccacttcgtgatggccggacgcgtgggcggacgcgtgggcggacgcgtggggtcgtcttgtcgggtcttcaagccacaccaaaccacactgcgacacacagtaggcgaggcgaaggagaggcaaggcggcgcggcgggcaagatgtttgacgatcaagacctgggcttctttgccaatttcctgggcatcttcatctttgtcttggttattgcgtaccacttcgtgatggcagacccgaagtacgaaggaaactgatgtcctctagtgcaaagatcctattatctgcaggccgaaatagggctatactgttagctaatgctagtgagatcgcttgacactttgagtgcatatcatggaagctggacatgcagttcctggcattttggttttgcccatgttttaatctgctgaattagtaaatcctggagaattcaaaagcgttttcaagtactgcagttggtggttgtttctggtcctagtgtatgcatgccagaatcttatgaataatattctttgttttgttgcctaaaaaaaaaaaaaaaaaagaaaaaaaaaggcccctagggccaaaaaaaaggcccctag

SEQ ID NO: 90663 - DNA, 399 bp, Zea mays
  unsure (1)..(399): unsure at all n locations
  Clone ID: MRT4577_182686C.1
cccacgcgtcccgcccacgcgtccgtcctcccctgggttcggggcccccttccgggccgggggctttcaaaacggggggcacccccaaaaccgggcctttcggctggcggccccggacagcgggcgccgcccaaggggccgcgagcgccgcggaggagacccctgggcaccggcctggagcgcgcgagacggtgctcccgctctatgaggctgtggacacggccgaccgcgtctccncaggccgcggaggaggaggacggcgaggcgcacgccgcggcgcaggcgcaggggcgcacgtgcgcgcagctggggcagagccggcagaggaggtccccgcggcagtgggggcacaccccgccgccggatcttgtggcagggtgcttgctggccctccattcg

SEQ ID NO: 90664 - DNA, 1183 bp, Zea mays
  unsure (1)..(1183): unsure at all n locations
  Clone ID: MRT4577_182687C.1
gggtacctcgaggccggncggagccgccgtctcgaatcgccaaaaccaacgagcagtcagagccgaagccgccgcggcgcccgccaccaaagccaatggagcccgcgctgcgcgagctgtgggcggagtcccgggacctgttgggcctcccttcctcttctctggacgccgccgccgtggccgtgccgcgcatcgacctgcccccgacgccgctcgcgttcctccgcgaccacgtctccccgggccgcccgctcctcgtctccgccgcggccactcgccactggcccgccgcgtcgctctggcccaccgcctcctacctcaccgacgcactccgctccaccgccgtctccctccacctcacccccgacgggcgcgccgacgcgctttcctcgcacccgcacccgcacccgcacccgcggcgccccgggtcctcgaggtgctttgcgtccgcgcacgtccgccatgtcgacttccctactgcggtccggcttatcaggggatccgacccggccgctggcctggtagcgtacgcgcagcagcaggacgactgcctccgcggggagtacacggcggtcgccggtgacgtggacgcgcacgtgccgtgggccaccgaggcgctcggctgcctccccgaggccgtcaacctctggataggcaacgcccactccgtcacctccttccacaaggaccactacgacaacatttacgccgttctgtccggcgagaagcacttcctcctgctgccccccaccgagcaccaccgtctctacgtccgcgactaccccgccgcccgctacgttgccacggagcagagctccgagggggggcgccagttgaggcttaagctggagatggaagtgcccgagaggatcgttccctggagcagcgtcgacccgtgcccggcgtcgcccgaggagttggccgtgcaggcgtcgtcgtttccgctctactttgacgggccggcgccgatacggtgcacggtccgggccggcgagatgctctacctgccaagcatgtggtttcaccatgtcagccagagtccagggccgaacgggctcaccattgccgtgaactactggtacgacatgcagtttgacatcaagtatgcttacttcaacttcttgaggtcgctggagatcaatggttgttcatcgggcaaacctgatgcttcggaaggtgatct

SEQ ID NO: 90665 - DNA, 365 bp, Zea mays
  Clone ID: MRT4577_182688C.1
ggggggacaaaaaaaaccaattggccccaaaaaaatccggggcccgttaaaaaaaaaatttgaacccccccccccaaattttgggggccccaacccccccccttgttttggtacataaaacccatagcccgtttttaaaaaaaaaaggggggggccttcttcccccccccctttttgaaaaattttgtttacccccctttccaatgtttggcatttgggggggcctttttgggaccggggaataatttgcccccatgttttgcttttgggggggcctgaagggccccctcactgataaaagacttggtgccccatttgcaagggaccccaaattttgggcccaattttgggaacctgccccattt

SEQ ID NO: 90666 - DNA, 262 bp, Zea mays
  Clone ID: MRT4577_182689C.1
gtgagagcacgcttgccacgcccgagcatggggaccgcccaccgggtggccgctaccttactgtggtctttaccaagtcaccatgacgcgtccctcatcctgcggagccctagtgacaaaacctgccctacccatgtgacttatggccggtatcacaggtggtccacagctagcattccggataacagtccaccgcttgagctattgcaggcaccaatttaccacgatgaatacactggtaacgtctgcagagaaaaagatc

SEQ ID NO: 90667 - DNA, 1188 bp, Zea mays
  Clone ID: MRT4577_18268C.1
ctccgctctttgcaagggcgatcagaggtccggtgacgtttaggacatgctgcgcaagtatatgtcacttgtacagcttctagaaagtgtcgacctcggcggaatgaaaaacgaggagaagcttgctttctggatcaacgtgcataacgcgatgatgatgcatgcccatatagagtacgggatcccacagagcaacagcaaaaggatactgcttaccaaggtatcctacatcgttagtggccagagagtaaacgcggagctgatagagtaccaaatcctgtgctgccgagcacactcttctggacaggtgcggctctacagccccaagagcctgttccaggacatggaggcggccgaggaggagcacatcgccgtggatcgtgcgcgagcctggtgcacttcgcacttgcggtagctactcggatcagtggtaggtagcacgtaggcttcatcaaacgcacacccagtagtacggccggtacccccaagttccaacgagacgcgcacatacatcacgtacggcacgaaaactccgatgcattcatctccttcaatccaaccctacccttccaggtgcggctctacagccccaagagcctgttccagcagctggaggcggcgaaggaggagcacatccgcgccaacgtcgccgtcggcgtgcgcgggcgggggcagcgcaagatcatcctccccagggccctggagctgtacgcgagggacgccgggctgggtgcgcaggaggtggtggccgcggtcgcgtgccacctgcccgacggcctccgggacgccgtgcgccggagcccgccggccgggcgggcgcgcggcggcgtggagtggaagccccacaacctggcgttccggtacctgctggccaaggagctggtcggcgggtcgcccgcgtgcgggcggcagcaacttaagaaatgcggccccccgatcggtgcgccgctgcgtgctgatcggtgatccgtcagcagatcgccgtgggtccgtggccgtgccgagccgagcccgaggtgcggtgcgggggtatcagggtctgtatgtacagagggagatggacaggaagatgatctgaatagtgtgcgctctgctgtagctagtttggatcattctgattggatgggattgaaatgaatatgagtgtatcctaacttgccctcaatcccatgaaaaataagtgtatcc

SEQ ID NO: 90668 - DNA, 759 bp, Zea mays
  Clone ID: MRT4577_182690C.1
acattcttgtccagttcgtcggttggtggtggtggcgtgcgtgcctgggcgactctgcctcaaaccctcgtcaggtccctcgatcgccgcgctcgagttggttatatagaactgaagggaggtaaggtgagtataagcatcagagggagtacatagcatgagtaataccagcggcgcacggcgtgccgcaaggaggcaatcgctggatggatctgctgataaagttgttgtggacttggatgcaagctcgccggtggcggggaaccatcatgggctctcggtcttccctggtgcacgcacatcgcctattgatgtggaagctctcgatgatgaagtgcaggccctatcgccttcacaagtgcctcccccgggggtgaaccggagaactagagggcaacctgtgacacaattttctctggatgaagatgctgtcctggaagagaattggagaattataaggcaatgtgcgacaccattttgtcttgatgaagatgctgccatggaagagaatcggagaactagaagtcaatttttgacaccactttatctggatgaagatgctgccctggaagataatgcagctatgccttctcataacacgtggaacaaacgccaaagggttgcgcctttgatatgtctctccccagaaagggaagaagggtccagcctgcagtcgaacaatgcggtgcaaattagccaggggctgcctaaaggggggtggttcccaaggaaccgaatttcccttggcccggggggcct

SEQ ID NO: 90669 - DNA, 327 bp, Zea mays
  Clone ID: MRT4577_182691C.1
aaaaaaaaaaacccccccctttttttggttattcattctcagggacccccataacaatcaagccctttccccccgggggtcgttccccgtcagtccgtccaggggaaaaaaaaccaaacttttaatccttcccagggttgcaacaacaggtgccccctgaactagagcagttcaagttccacccttccccccatgtgggttaccgacctttgttttctagttccgaattttttcggtcaggggtcatgccactgtcggctgttatttttttttttcgcaattgggggggagaaactgtcctgggtccccaaattttggggggggggg

SEQ ID NO: 90670 - DNA, 128 bp, Zea mays
  Clone ID: MRT4577_182692C.1
gaaaaaccggcgcgagccacgcgtccgcccacacatccacccacgcatcctttttttttctgctatacaaccccaatctccgggggctgtattattaggagccctccctctcttatgagacctacatg

SEQ ID NO: 90671 - DNA, 418 bp, Zea mays
  Clone ID: MRT4577_182693C.1
cggacgcgtgggcggacgtatgggtgtatgtgatttaagacaagatcgccttctgtttgaggagtgggctgattgcatatttgcaaattgacgtcagttatatcgtgtatttcgctgctgcatcatggatggatcttgtattgacttggttatggataagaactttgctaatctcccttttctccgcgggatatagcttcgggggtgggctctcgcccccaaaatgatttatctgtcggattagttggatgagaggtggcacgtttcgtctcggttgattctggctggccttattagacataggtgttgtgcttggtatgtgccattggaggacccgttgtgcgagctaggcttgtggatctcggcctagatgacctacagtgatctttgcgttcttagggtgcttgtgggggttttt

SEQ ID NO: 90672 - DNA, 133 bp, Zea mays
  Clone ID: MRT4577_182694C.1
tgaatttcccaattgtggcctaccgaggaagtgcctttgcgttggtaacttgtttgccgccatcacttctcaggcgtggatcatactgcaaaccatcgcgacggcttacttatttcattatggttcgtctgaa

SEQ ID NO: 90673 - DNA, 220 bp, Zea mays
  Clone ID: MRT4577_182695C.1
ctttttggtgcatgaactgaggcagcacagtaaggcagctgatgagcgtgctgccgctgccaaaggctcttttaaaaagaaagaagtggggaatcctacggccttatggatgttaaaccattggacgattagactggttttaagaaccttggggaagctgttcatagtgcttcagattgagggtcctactttgggagcgttaaaacttgggccttttgga

SEQ ID NO: 90674 - DNA, 547 bp, Zea mays
  unsure (1)..(547): unsure at all n locations
  Clone ID: MRT4577_182696C.1
ggggggggggggcgaagcgaagccccggcgggcagagggcctccagggcaccagctagcgggcggggtgccaggggctagctaggggaacctacgtacagtgcagctcttcttcttctgcgctgctagctgcggctgctgcgcagcggggcgggggggtgcgaatgcaagcctgtccgccatgcttcccttgagttcgagcgcgcccatcagcgagagagactgaccggcaccgtaccgccagcgcgggcgggccctcgtcgaccgaccggacccaggaggcgaacaccgaagaggcggagaggcccctccctccctgcggccanaacgggtgggttgggtctgtggctcnccctcacgtgggtggaccccgagcccgacggagcgaacgctcntggttcatggggtaggctcctataatataagctatgtgtgccgtgcgcctgccgtatgcatgggtntgacgacgaccctgctaccctgcgagcctacttnctacctaccagctctgcctctgcatgggtgcctctgcatgcatgcatagcccc

SEQ ID NO: 90675 - DNA, 441 bp, Zea mays
  Clone ID: MRT4577_182697C.1
caaacaatatatgggggccgaaagtggacttattgcttgagagctttaaatttttgccggtactgatagaaaacgaaggcacacccgcacgtgattatggacgttcacgctacccatacaacggggcgcgcagcaggaaagattaacagcacgcagtaaccgtatcaaccgattacaaaacttagggaaggagcagacaagttcttaatgagaaaaaggagatacttaattaacgacaggttgcatctttagtgtttggcacactgtcttggtgaccttggggccggtcgtttccttgtggtccacactcttgatgactgacaacagcaactgttggcctcttgtttgaggacagggtacctaccagagcgtagcgatactcgtgagaatgaacttcaccaccgtcggtcttggaggagaatcattgttgaccatacgcag

SEQ ID NO: 90676 - DNA, 379 bp, Zea mays
  unsure (1)..(379): unsure at all n locations
  Clone ID: MRT4577_182698C.1
gccggnaacccaccaaggggcgccagaccaaagcgccaaccaccccagagcgcgggagaacccgaacgacaccaagagggggaagcacgccgcccccgcccaccaggcccacgcggcaagcgacaccaacacgcaaacaagcgcacaaaggcgaccggcagccaccgccaccaaaccacagacccacccaccagcaaccgcaacggccgggggacacgcaaccggccccgaaaccacaaacgccgggcaaaagggcgacgagcacagaacaaccgccagggagacacgacgcacaccgaaaccgggacaggncngaggaaaaaaacccaggaggggacaancggagagcagcacagcacaggggcaagaaagagccaga

SEQ ID NO: 90677 - DNA, 1620 bp, Zea mays
  unsure (1)..(1620): unsure at all n locations
  Clone ID: MRT4577_182699C.1
atgcgctcacatggagactcccacacgaactcgaatcacctccgcctcgccacctcttcatcttcttccccagtagccgctgccaccaccactgcagcagccaaaccacgtgacacctcccgcgccgctcaaccccacagcatccgctgccaccgccgctcacctccccggcgctcccggctacaaccactgcaagcatgaggcagccaaccagcgcgggcggcgacgctgggttcttgcgcgcggaccagatcgacctcaagagcctggacgagcagctcgagcgccacctcggacatcccgcggagcgggtagttggcccagtctctgggacagggagccgccgcggcgaaacggccaagctgggtccggaggagctgacgccactgcagcggtgccgtgaggactgggagatcgaccctaccaagctcatcatcaagggcgtcatcgcgcgcggcacctttggcaccgtccaccgcggcgtctacgacggccaggacgtcgctgtaaaattgcttgactggggcgaagatggtcatagatcagaacaagaaattggtgcactaagagcagcgtttgcacaagaggtcgctgtctggcataagcttgagcatccaaacgttactaagtttattggggctataatgggcgcaagagatttaaatatacaaacggaacatggacagcttggcatgccaagcaatatttgctgtgttgttgttgagtaccttgctggaggtgcgctgaaaaattttctgataaagaacaggagaaggaagcttgcctttaaagttgtggtccaaatagctcttgaccttgccaggggattatgctacctccactcaaagaaaatagtgcaccgtgatgtcaagactgaaaacatgcttctggacaagacgagaacggtaaaaattgctgattttggtgttgctcgagttgaggcttcaaatcctagcgatatgacgggcgaaacagggacgcttggttacatggctcctgaggttctcaatggccatgcttacaacaggaagtgtgacgtgtacagctttgggatctgcctgtgggagatatactgctgtgacatgccgtaccccgatcttagtttttctgaagtcacctctgccgtggttcgccagaacctgaggcctgagataccgcgctgctgcccgagctcgctagcgaacgtgatgaagcgatgctgggacgcgaacccggacaagcgtcccgagatggcggaggtggtgtccatgctggaggtgatcgacacgtccaagggtggcggcatgatccccaaggaccagacgcagggctggctctcgtgtttccgccggtaccgaggcccctaacgcagagttgcttttacccggcgaaatgatgatattggtctccacgactcagtgtaatctaatcgcagaactggctataattgagagttttctcgttgtcctgggcgtaaatgcatggatgggccggcagttgacgattgatgtccgttcaaatgcttgctgtaagttaattcaggtgtagagggagttgctgtggccgtttgctcacatcgtttaatttcatggccgttacgtgaggcagcaggtnncattttttagaaaaaacaacaaaaac

SEQ ID NO: 90678 - DNA, 372 bp, Zea mays
  unsure (1)..(372): unsure at all n locations
  Clone ID: MRT4577_18269C.1
aaaggacaccgtgttatgttattgaacctgtacaagctccgtttcagcatgctcccgtgtcaaaccaacaaacaaaggtactagtagtcagtagctagtcaggcactgtcacgctatcaacacaacctacacacaccgaagtacgaagaaaccaaatgtatacgcacgaacatgtcgatcagattcgcacatcaaccaccagaaaacccaacaacggaggtccgcatcgtccaccatcgtgccatgccaaccgcatagccgcggtccatccccatcatatcagctccgccgcggtctcctccgtcagtgcctccagcacggcggccgcnattgcggcgcccacgtcctccagcgttggccgcaggtcctcta

SEQ ID NO: 90679 - DNA, 300 bp, Zea mays
  Clone ID: MRT4577_1826C.1
aaccaaaaatctcacattatattcaccggggaacaatttcccgtttttccccgaaagattaaagtgaactcaaaacttatttctccagccccaacgaggggcgggcgatttggaccactttagcaaaaacccaacgttttttcttggggactttttcttggggctccaacatccaggagggcaatttaccaccaccagggttcggaccaggaaaccgtggaggaaaaacccgcggtcatgggccttatttccatggggtagctccccaacacccggaggaaggacgtgttcttctggacc

SEQ ID NO: 90680 - DNA, 410 bp, Zea mays
  Clone ID: MRT4577_182700C.1
gtaaactattggtggccggataacctcttcctcagatttcttgaactcagcttctatatgctgtgaaatacttatgatttatggaacctaacttgggtatgctaacatgggtgtctgctcctttgcagatgcgattcaggcttatgctgttgagccgcaatgacccattgtcctgtggactgctactcatgtttggtagattcgtaaatactactgttatatgcttgaaggcgtgtgttggcattgccatgtggggtttgtgtgactcgatggaaactttgctgtcttattgtactttaaaatccaataatttgcgcgattgcggaaaaaaaaaaaaaaaaaaaaaaaaaaaaaaaaaaaagggcggaacgatataaaagatccaaaattacatacaacatacatacggg

SEQ ID NO: 90681 - DNA, 1859 bp, Zea mays
  Clone ID: MRT4577_182701C.1
gcacttatgtgattgtgtctggtaatatccaagctctgtttgtcttagtgagtcgaccacatgaatgcctattatgttctgccacactcaccttcctgttccattagctgctagtgccaactgccagctaaatcctaagcgtgtgtttggaaaatattgaacaatagtgtaaatgcataaagcttgaacctttttttactgttgatggtactgttacatgattctgcattggctcaaccatataggcatgaacaagtatgagatgaagctgggtagaatcgtagtaaaaaattaactgattagtgttttatgcctgaggtgttccagtaataagattgatagtatagaagtagggaactgtcactgtcttgaatcaaagaaactgcgtgaaagataatggtttctctttgctgtaaaaggttattgtttgcaccacaaagttaaagttactatgcgactggctctataccaggaccataatattatcaatcaattcatagcatgttcacagaataagaagaggctgtgcagtgtgtgtaaatttgtgatgtagtgtgcctctgttagagaaaaattcctatttggcactagaaaacttctgctttcgtatttcacagaggtgccccccccaaatgtttgtgtatttactgttatattgcttacccaggtgtacaaagaatatttctgaaggcacgcattgcattttgcacactcgtagagttttttttttgtcttgcatataaatagcatcggctcaaattcatacttcctgagcaaattctgttaactctgttctgtttatggcagttgataaatcctctgcaaatgttctccagcttatctgtttggtaaactattggtggccggataacctcttcctcagatttcttgaactcagcttctatatgctgtgaaatacttatgatttatggaacctaacttgggtatgctaacatgggtgtctgcacggcgcccgcatctacgccgagaacgccatccgcaagcgcaccgagcaatgaactacctccgcctcgcctctcgcctcgacgccgtcgtggcccgcctcgacacgcaggccaagatgcaggtcatcggcaagtccatgcagtccatcgtcaagtcgctcgactcctcgctcgccaccgggaacctccagaagatgtccgagaccatggacaatttcgagcgccagttcgtcaacatggaggtccaggccgagttcatggagggcgccatggccggctccacctccctctccacgccggagaccgaggtcaacagcctcatgcagcaggtcgcggacgactacgggctcgaggtctccgtcggtctgccgcaggcagccgcccacgccatccctgccgccaaggataaggagaaagtcgacgaggatgacctttctcgccgcctcgccgagcttaaggcccgcggctgagaggttgtttcaggctttatcagatgcgattcaggcttatgctgttgagccgcaatgacccattgtcctgtggactgctattcacggttgcgagttcaggcttatgctgtttagccggcaatgacccattgttctgttgactgctactcatgtttggtagattcgtaaatactaatgttatatgcttgaaggcgtgtgttggcattgccatgtggggtctgtgtgactcgatggaaactttgctgtcttattgtactttaaaatccaataatttgcgcgattgcggacataaaaaaaaaatctgtgattctgtgtttctgtctgggtcgcccacatctggtatgaacaatgttgaagctgatgcttggcatcagtttgccataccgttgattctgttgccttagatgatcgagctgtcatcaac

SEQ ID NO: 90682 - DNA, 578 bp, Zea mays
  unsure (1)..(578): unsure at all n locations
  Clone ID: MRT4577_182702C.1
cggacgcgtgggctccaagtctcaccatccacacaggccagcgcgcaaacgccacaaagctagcctttctgctcccgctcgatcagctggctccgttgatcaccgggccgggccacaatccccatctcgctgactgattagtttccgctgcaatggcgtcctccatctccgctccagctccaccggcggctccggccaccgcgccggcttcgggcagacccaagaagccgtcccagttcaaccccagcaccggcaagaccaggaccccggtccccgcgcggccaatgcgcgccgccgctcccaagtggaacccgctccagcggctcgccgcggcggcgctcgacgcgctggaggaggggctcgtggcgggcgtcctcgagcgcgcgcacccgctgccacggaccgccgacccggccgtccagatcgccggcaactacgcgcccgtcggggagcgcccgcccaccggcgagctgcccgtgtccggccgcgtcccggcgtgcctcgacggcgtgtacgtccgcaacggcgccaacccgctccacgcgccgcgcgcggngcaccacctcttcgacggcgac

SEQ ID NO: 90683 - DNA, 351 bp, Zea mays
  Clone ID: MRT4577_182703C.1
acctgtcgctgacatgcccaccctaagtctggaccgggcgccggcgcaaacgctgaaactaaggaaggcgcatgcaggcgcacatttatcgcatgaccaacggaggccgtcacaaggatacaagagctcactatcacatgattgcatcatgcccagaacaaacacattcataggttggagaatgaaggggaccaattcattcacaataacacatgaagatatccatccatgacttatgatttaacgaccaactgtttgattttacaagacacctgcatgttacacggctcttataacagtagatgcaaaaaaaaaaaaaaggcgcgcgctggagctctcaccggatattcg

SEQ ID NO: 90684 - DNA, 596 bp, Zea mays
  unsure (1)..(596): unsure at all n locations
  Clone ID: MRT4577_182704C.1
gatataacancttggcaccacatccactagaagcaaacaagagagaatgtcatatgggcataagttatcactaaaatccgattttatgtaaaataaacgtaggccttgtcatacaaaacttccacaacatagacactgccacacaggtaaacaaaatctgcgcttgctgacaggagttgcgggtgcttcacgacattgacagggtcgatcaaagcctactcccctttccagagctcagcaaactcatcaggctccagcgtgttctccatctcgtgcatcttcctcctcaccttggccttcaccttcttggcatatttgcctgccttctgcctcttctctagtgcacggatcatgtaggaccaccaaaactaccaccaaatattttgattggattcaaacagaacctggggccaacctcaataagtgtcattttatccataccacctttatcaactttatcaatctcattgtggggaacagaaatctggtagtttcggaaccaaacatggccatccacaatggagaagacaaatacatggtcatggaaaggttttgctttacggtgatctttangagtagcaaatatatgagttata

SEQ ID NO: 90685 - DNA, 110 bp, Zea mays
  unsure (1)..(110): unsure at all n locations
  Clone ID: MRT4577_182705C.1
gncaaggtggcnatgtcttggatgctcnttcgtacttgtacagtactattgcttttgataangacaggcacactcnacaactggagaagcttatgtgacaangacacatt

SEQ ID NO: 90686 - DNA, 462 bp, Zea mays
  Clone ID: MRT4577_182706C.1
accgaggctgggaaaatgtggaatttcggcgtctgtcgggatgcaaatgggaaactaagtgctttccacgtgtggtgccgacgttatgcctcactccttgcatgtggaagtggtcgtaagacttgctgcccgtgcccttaccatggatggacatatggatgggctggctcccttctgagggctgcaagaatatccggaataaatagcttcaatcagactgatgggggacccataccaatcagggtggctacttgcggaccttttgtgttgatcagatgacgatgatgattccactgaaaataatgcttatgacacaattgcaaatgaaagcaggggtagggctccaaatctgccgggtacagatggcgttgacacttagctgccgcctctttgcaggcgagaatatatcatcaaccgtgaccgatagggctactgcgacaatcacctagacaggggatgcca

SEQ ID NO: 90687 - DNA, 1587 bp, Zea mays
  Clone ID: MRT4577_182707C.1
actcctatgggcgattgggtacctcgaggccggccgggaggcctacttggcgcgtctctctctgtctagcggccgagtttaacagttaaaccctagctcaccgtcgtgctcgcctccccgcgcctgctccggtgctcccttcaggcactgacagttcgccgccgcggcggcgctttcgagcccacgcggaagcgcacctagtgccatggcgaagaagcggaagcacaccgacgcccaggcagagacggccggcgcagagaagccagacgactccgcaccggcgcgcccggagcgcacgctcttcggcttcaaggatccggcccccgacgccgtgcctgactccgcggcctccagggccgcggtggcgccgtttaggaacagggagaaggtactcatcacctgctcccgccgcatcacgtacaggtatcgtcatctgatgcaggacgtgttgtcgatgctcccgcacgcgaagaaggacagcaaggtcgagtcgaagcagagcaaggggaacgctctcaacgagatgctcgagctcaggagctgctccagttgtctcttcttcgagtgcagaaaacagaaggatctttacctttggatggtgaagtctcctggaggaccatcagtgaaatttctagttaatgctgttcacaccatggaggagttgaagcttacgggtaaccatctgaaagggtcacgcccacttcttacattttctacaaattttgatgagcaacctcattggaagcttgtgaaggaaatgataactcatatatttgctactcctaaagatcaccgtaaagcaaaacctttccatgaccatgtatttgtcttctccattgtggatggccatgtttggtttcgaaactaccagatttcggttccccacaatgagattgataaagttgataaaggtggtatggataaaatgacacttattgaggttggccccaggttctgtttgaatccaatcaaaatatttggtggtagttttggtggtcctacatggtatgagaacccatactacatttcccccaatcagatccgtgcactagagaagaggcagaaggcaggcaaatatgccaagaaggtgaaggccaaggtgaggcggaagatgcacgagatggagaacacgctggagcctgatgagtttgctgagctctggaaaggggagtaactggtctttgatcgaccctgtcaaagtcgtgaagcaccagcaactccttccacccaagcgcagattttgtttaccagtgtggcagtgccgactgtcgaggttgtggaagttttgtatcacaaagcatacttttatttatataaaatcggattttagtgataagatcttatgcccatatgacattctctcttgtttgcttctagtggatgtagtgccaagtgttatatcacttatgtgattggtagctgagaatcatggggaagcgcgatcacagttcaaacctcaagatatcaatgtgatagccatagccgtgttccatatgtatactatgtacttcatttcagcaatggttttgtaaggaaaatagatcgagcttcatttaaagtaaagttttagtgtttgatgagcacaaa

SEQ ID NO: 90688 - DNA, 770 bp, Zea mays
  unsure (1)..(770): unsure at all n locations
  Clone ID: MRT4577_182708C.1
atcgcttatcatctgctcctctacctttcctatcactctgatcctccacctccggctggttcatccaagacagagatagccatgcgaggactcggaggacgaccactctcgaatcgaaggcctgactctgcctggtgcaagacctacccgtggcactgtggcaccggccgcagaaacgcgttcatcgtcatcaaaaaccgaacctgacagggtgtgaagtgttctacctccaagagtggctaacatggccaccgctagatgcacactttggccgcatgagacatattcaacgacaaaaaagcattcgcaacgatattcgctccttcatcacacgagtgctacattccgcatgggcagcgcactgacgatcacgtgattgagatttctgacgatggatttgagagccttcttacttacacagggcaacactaaggatgatcttagactcccaactgatgacgactcttgtggacccatattacggtgagaggttcgaatagccgccgaaggatcttgttgcgactgtccagcgctgctatgtgggacgagcagatctgcgcgattgacgatgctggccaccagataacttccttgtattggaagacggaaccctactgtatctcaacttagatcggaaaagaagtgtatcaccaaatgattgctaccgaganattcgcctgcctttgagctggcttttgctatagcgtgtaacggngtatgcctggggtgtcattacctacctgacttatcattatctgctggtacattct

SEQ ID NO: 90689 - DNA, 1672 bp, Zea mays
  Clone ID: MRT4577_182709C.1
cccacgcgtccggatgcgcgcctctctccctcccaacaaccaggccacaagcgcccgagcggcttaaaccctagctcgccgtcgtgctcggctcgccaccccgcgccagctcctttcaggccctaaccgttcgccgccgcgcattcgagcactcgcggaagcgcacctagtgccatggcgaagaagcggaagcgcaccgacgcccccgcagaggcgaccggcgcagagaagcctgacgactctgcgccggcgcgcccggagcgcacgctcttcggcttcaaggacccggtccccgacgccgagcccgcctccgcgggcgccgaggccgcggtggcgccgttccggaacagggagaaggtactcatcacctgctcccgccgaatcacgtataggtgagtgctccctgttttttccgcttgcagtcttgtgagatgggtgattccgttcacgcgtgcgtgctcggcgtaggtatcggcacctgatgcaggacgtgctgtcgctgctcccgcatgcgaagaaggacagcaaggtcgagtcgaagcagagcaaggggaacgcgctgaacgagctccttgagctcaggagctgctccagctgtcttttcttcgagtgcagaaaacagaaggatctttacctttggatggtgaagtctcctggaggaccatcagtaaaatttctagttaatgctgttcacaccatggaggagttgaagcttaccggtaaccatctgaaagggtcacgcccacttcttacattttctacaaattttgatgagcaacctcattggaagcttgtgaaggaaatgataactcagatatttgctactcctaaagatcaccgtaaagcaaaacctttccatgaccatgtgtttgtcttctccattgtggatggccatgtttggtttcgaaactaccagatttcggttccccacaatgagattgataaagttgataaaggtggtctggataaaatgacacttattgaggttggccccaggttctgtttgaatccaatcaagatatttggtggtagttttggtggtcctacatggtatgagaacccatactacatttcccccaatcagatccgtgcactagagaagaggcagaaggcaggcaaatatgccaagaaggtgaaggccaaggtgaggcggaagatgcacgagatggagaacacgctggagcctgatgagtttgctgagctctggaaaggggagtaactggtctttgatcgaccctgtcaaagtcgtgaagcaccagcaactccttccacttccaccaagcgcgggtcttgtttaccagtgtggcagtgcccactgtcgaggttgtggaagttttgtatcacaaagcatacttttatttatataaaatcggattttagtgataagataacttctgcctatatggcattcttctcgtgtttgcttctagtggatgtggtgccaagtggagtatatctctcttggatccaacggtcattaccgttctccgtgtcagccgcggaattttaaactatttttttataagaaaatgtttaatagtttcattgttctacataggtgaaaatataagagacaatgatgttaagtagttgcttaacaataaaatatctaggtcattcatctcttgacatcgtaaggtaacgatttatatatttctgcatacacggtcat

SEQ ID NO: 90690 - DNA, 845 bp, Zea mays
  Clone ID: MRT4577_18270C.1
ggcgattgggtatctcgaggccgggccgggaatagcctccgcctctccttccagtgtccgccgtcgtgcgctcgctacccctctccctcgaggcctttgccggcgaagagcgcccagtcgcccaccaggatgaagtttgttgctgcctacctgcttgctgtcctcgctgggaactccgagcccctctgcggaggacttgacagccattctggagtcagttggctgtgaagttgacaatgaaaagatggaactccttctgtcccaattgagcggtaaggacattaccgagctcattgctgctggccgggagaagtttgcttcagtcccatgtggcggtggcggtgtggctgttgtggcagctgcccctgctgctggcggcggcggcgctcctgcagctgaggcgaagaaagaagagaaggtggaggagaaggaagaaagtgatgacgacatgggcttcagcctcttcgactaagcctgtgcaatagccaagggtattgtttttgagtcgcggaagcagagggaagaaaaatagtagtcatgtttggactttaactttgttttatgttggaaagtacttgaaagacttttcctgtggtaattctaggcgtaggttgctgtgctggttggggtttactggtgaaccagagtttttctatctcccactatgaatttgttacctcaagttacctggatgttcactattttgttggtacatgtcgattttgcctcgtgcatgcatgtccactgagtgagtatgcgcatgtgttatctgctgtctgtgttcgtgctcttggcatgtatgtttgcatcgatgaaagtaaagagctgttgggagttgatgattc

SEQ ID NO: 90691 - DNA, 1370 bp, Zea mays
  Clone ID: MRT4577_182710C.1
cccacgcgtccggccaaccaagcagctctgcagtcgagacatgaagcgagccgtctccgctctctgggccgccgcgccgtccgccaagcctacctctacacccccaccgccgccaccgccacctcgtcgtcgcctgagtttggggcgtccacatcagaggcgtgggacgggcgtttccggctccacaagccgcgcgggcagcacctgctcaccaacccgcgcgtcctcgacgccatcgcgcgccacgccgccatcagtccaggcgacgccgtcctcgaggtcgggcccggcacgggcaacctcaccgcgcgcctcctcgcgtcccaggcggcgcgcgtcaccgccgtcgagatcgacccgcgcatggtcgaggccgtcaccgcgcgcgccgctgctctcggcctcgcgcacaagttcaaggtgattgcgggcgacgccgtggaggtagagttcccggagttcgacgtctgcgtggccaacatcccctacggcatctcctcgccgctgatcgccaagctgctgttcggcccctaccggttccggacggcgacgctgctgctccagaaggagttcgcgcggcggctcgtggccgcgccgggcgacggggagtacaaccggttggcggccaacgtgcgcctggtcgccgacgtcaggctgctcatggacgtgagcaagagggacttcgtgcccatgccccgggtggactcgtccctcgtcgagatccggccgcggggcaccgtgccaggggtcgacgtcagcgagtggctggcgttcacgcgcgtgtgtttcgggcagaagaacaagaccctcgccgccatcttcaagcagaagaggatggtcgttgagctgttgcgccggtcgctgagaacggagagatgtgccggtggtgtcagcctaggtccgcttgaggtcgacgacagtggagaagatgactgtgggggaaacgacgatggcagcaacagagtggttggtttcagcgaggaagaggtcgcggcgttcaaggagaaggttgctggagcgttggacaccgccgagctcgccggcaagaggccatcgaaggtgtccaacgacgaactgaaacgattgctccggctgttcaacgatcgcggggtgcggttccagtagaggtagcgcacggtgaggtttgtgtcgccaaggtcgcaccacgcctgatgcaatggcaggttcccagcacgctggaagtcattgtagacgtaagcgctacttgcctgtcttgttctgagttaatggcgtcagccttatccataccatgttcaatagtatgtccaatcttccattctgctgagttaatgttgaactcgagggcacgcattttgctgagttaaaacagtgaggtttgatgatatctg

SEQ ID NO: 90692 - DNA, 188 bp, Zea mays
  Clone ID: MRT4577_182711C.1
ctgaatcgaacaggaacagaaaccgattggatttgcaacacaccagacgaaccatgggctggtttatatacacacatgggcgccagactatcactagaacagcctctatgaatggcagacttgacacatcaaatggcctccaatctacactgccgctcaacataccgctaatgccataacgaacgaag

SEQ ID NO: 90693 - DNA, 311 bp, Zea mays
  Clone ID: MRT4577_182712C.1
tcgttcacgcgtccggcggaggctgggcagggagaatttcttgaacgagctggcggataacgcccacgtggacaaggtcgccgccgtgtgcagggacggcctgctaactgggaccggcgagaagctgtccccggcggagcccaagaagcccaagaccatcgaggccaaggccggctgagggagcaagcagaacacgagctattgaaacttagcctgatagggtccgcttccgaactgggcatgacgaagcatcctatctgagatagtccactggggcataagctgtctccataggaataaagtctctacat

SEQ ID NO: 90694 - DNA, 607 bp, Zea mays
  Clone ID: MRT4577_182713C.1
gagaggtcagggagacacaacaaaatctctatacaaagatttaacttatggtggtgtggtgaatcaacataaggggacgtataagactgcatagctcttacactggtgaatatctttcagtggatggcattccattgtaggatccaatcagcagtcagaattaacaaaacaaagttccaacaacttgataaaggagccaaggtggtagctggtagtggtcttattcaagctggtggccttgctgcagaactggacggtgatggtatcacagaaggataaagaaagagtggcagagcttatcaggaacatggtaaacaacattgaacaaaattagagtgttgttttctctattgtggttgaattttggctaggtagcaggagcctggtgttgttttgcatgaactgctgaaggtaaatgcagctgtggttgtatatttgtcgcatttttttgctggtaggtttttagatgagtttgcatagtggttgtttagattctggtgagtattaagttagtttgtgttttttaggtgttagagatcttcctgcagtaagctgtaccaatgatctttggtctaaaaagggaaactggaagggccccacagcaacg

SEQ ID NO: 90695 - DNA, 616 bp, Zea mays
  Clone ID: MRT4577_182714C.1
tcgagttttttttttttttttttttttttttttttttttttttttttttttttttttttttttttttttttttttttttttttttttttttttaaaaaatatttttttttgttttttatcttctggttctttgaaacaaaaacgtttttggatggggagggactaaactgggggtattggttactcgataaaaactgaagggcccggctggtatacaacaggggggggttacgggtacaagtttataccaaaaaacatcatcaaacggggggcagcaaaaagctccattggatcaacgggctttgtcccaaggcgaagagctagcaagggctgcaaaaacatacgggggggaaagtaatccccgagccgagggccatgggcccccctcccccgttttaaaaactcgaccgaacccaccggccccatcccaagggccaggcctttgggttccggcatgctcgggaagctggcccacccattgcccaaccttttggaaggagccaagcccaggaccgggatgcccggctggcccatccgggggaccccctccggggaagggttttttttacaggacccacgggccgcaaattcctgccgggggcgatggccaaccaaa

SEQ ID NO: 90696 - DNA, 215 bp, Zea mays
  Clone ID: MRT4577_182715C.1
ggcggggccggaacccccggggcgacccagcgtccggcgcaccaacacaacaaagccgccgcaagcccagaaaggcagaagagacaccacccagacacagcgaaccagagcaagcgccaggccaaagggggaggccagctcaaggaggaggagcacgagcggaccagcgcaggacacggaagcagagcagaccagagaagcaacccccaaagaaa

SEQ ID NO: 90697 - DNA, 359 bp, Zea mays
  Clone ID: MRT4577_182716C.1
ggtaccgtgtcgggcctatccgcgcattcgaataatatacattcatatatcaatactgtcatgacacagtaagcgtgaagaatgctacagtaattacctaagatgaagagtatagaaacattgaacatcatggggaaggacctcattccttctgatggggcacgcgcgcttccatgatctattcatgcaaaagcgcgcgggaaagcaaaacacggtgaagatcagggcgggacgcacgagtggtgtgcctcgcactgggtcgcagcagccgtcaaagactgcacagtatgagcccctgccaacgtcttgcactgatgaaggctggaccaggcgtggtatgaggcgacgatctagaccac

SEQ ID NO: 90698 - DNA, 502 bp, Zea mays
  Clone ID: MRT4577_182717C.1
ctctccctctcctctctcccagcccgcgctggagtgccgctcgccgagccgccggaccgtccgccgtccacgccctcgccgcgcgcgctcgagcccgcccatctcgcctcaccgttcgccgaagccggactgtccgcgccctaccccgtcgagcccctgccggccaagcctcgccagagccgaccgccaccgcccaaaccgccacgccgtgcccttggccaccgccgatcgtcgcaagtagaagctgactgtgtggtagaagaaccaaacacgttcgaagacgacccgcaggacacgttcgagcaagagggtgatgaagaagactttgcagatgatgacgagtactaagtctaacgatgtgtccgtcatcttcctgtggaagagcgtccatgttttatccgctgtacttcgatgatgatactttttaagacatttatgtctagatgatgtaataaatttactccactctctttacgtctttattgtattgtcttttgatatt

SEQ ID NO: 90699 - DNA, 773 bp, Zea mays
  Clone ID: MRT4577_182718C.1
tttttttttttttatataataacagtgtatagagacaaatgtcacaataacatcagagtacttattacattgcggaagtcttacaaaataaaagataaatataaaacgaactaaggatcatcctttggcgccataaagtcaactgagaaacgccacctagatcagatcaaactcctcgttgtgtggctcctcctgaaccaactgttcttctcctcaaatcgtggccgccaaagtgaatctaacagccacagagtccgttgcggcaacagccgccacctccgtcgtcggtacctcgactggcgcgcgcatccagagcaaagaactccgccttgcggcttgtcctggcgaaggtgtccaagatggccacaccaccggagggctggcgtcgctagaatccagggtgcaagcacacgagttgactcccgccacgagataaccacacggttgacgtggtccaacagcaggagggagttcgagcgcgcgaaggagtcggtgaaggggagcgccgtggcagcccagaagaagtggtttgtgtcgatgacgagcatgacgaggctgtcatccccggagtagagcttggagtgcgcagaggcctcgcccaaacggcggcatgttgttccacggttaagctctaattccggcgagaaatggaaggaacacagtggagcagcgaccgtcaatggggacaacgggtttctctttcttaccaggaatcactcgatttccccctgctctcagtattgtctcatggcgctattgagcggacgcgtggg

SEQ ID NO: 90700 - DNA, 231 bp, Zea mays
  unsure (1)..(231): unsure at all n locations
  Clone ID: MRT4577_182719C.1
cgtccgcccacgcgtccggcgaaaggcaagggacgtaagaagtcccctttctctctgatcgaatgacacgacttcttnggggnggggttttattaacactctaactccgtaatctccctgatctaatcaaagacttgtattacttttggactgaatggtaagccttttgaaagatcgcgtggatcggggtaccaaccttgtctaccgcgacgcatgaggcagcgatccgta

SEQ ID NO: 90701 - DNA, 740 bp, Zea mays
  Clone ID: MRT4577_18271C.1
cattgggaccctcgaggccggccgcgaatagcctccgcctctccttccagtgtccgccgtcgtgcgctcgctacccctctccctcgaggcctttgccggcgaagagcgcccagtcgcccaccaggatgaagtttgttgctgcctacctgcttgctgtcctcgctgggaactccagcccctctgccgaggacttgacagccattctggagtcagttggctgtgaagttgacaatgaaaagatggaactccttctgtcccaactgagcggtaaggacattaccgagctcattgccgccggcagggagaagtttgcttcagtcccatgtggcggtggcggtgtggctgtcgcggcagctgcccctgctgctggcggcgctcctgcagctgaggcgaagaaagaagagaaggtggaggagaaggaagaaagtgatgacgacatgggcttcagcctcttcgactaagcttgtgcaatagtcaagaatattgtttttgagtcgcggaagcagaggggataaaaatcttagtcatgtttggactttaactttgttttatgttggaaagtacttgaaagacttttcctgtggtaattctaggcgtaggttgctgtgctggttggggtttactggtgaaccagagtttttctatcccactatgaatttgttacctcaagttacctggatgttcactgttttgttggtacatgtcaattttgccttaaaaaaaaaaaaaaaaaagcggcc

SEQ ID NO: 90702 - DNA, 404 bp, Zea mays
  Clone ID: MRT4577_182720C.1
gccatcggttgctcttaacagacataggaggtcccgcgcacctctggcccaaaagaagtttgccttacgatgaattggtgccgtctaaaaatgccaaacacaaaaatggagggggggccatcatactcttggaaaaaaaaaactttagtttggttgggggtttcaaggaaagttgccaatacccaatgatcggggttgtaggatgcttgcatagagcagtctggtcttttagtgcccaggggctcgaaagcttcgaaggccgcgatgggaccactagagcctttttgtccaatatgactttggttcattcacacaagctcaagcactttgatgctcccactgggagcggaggccactcccatggaggacttccctttccagcaaacactggtcacaaattgctg

SEQ ID NO: 90703 - DNA, 405 bp, Zea mays
  Clone ID: MRT4577_182721C.1
aaaaaaaagggggccctaaaaaagaaccaaatttaagcaccggggaaagcaaaaaaaaaggttttttaaagggaaaccaaaattaaatttattggcccgggtttaaaaaaaaaaggaggggaaaaacccgggggaaccccaaaaaaaaaaccctgaaaaaaaaaccctttttaaaagggggggaaaaaaaaaaaaggcccccaccaaaagcctttccaaaaatttgggcaaacggaaagggcaatgggacccccccttaaacgggcaaaaaaaggggggggggggggggggtacccccaaagtgacccttacatttggcacggccctttggcccgttttttttttttttttcccctcctttttcggcctttccggggggtttcccaaaaaaggtttaaatggggg

SEQ ID NO: 90704 - DNA, 606 bp, Zea mays
  Clone ID: MRT4577_182722C.1
ggccgcttttttttttttttttttggagagcttaattatattacatcaactgtggactctttcatgtttcccatcaccaaaagcaaatggaatccatagataatatctgaaagctgcatgcctgtctgtcatatatacattactaaaggaatcactgacggaaattattacccaacaaggtataaaatgagagcattaactagctcatataacatgctaatgccccataatatagggccgactcgcgcatagaaaacaaagaaagagcgaaaggcggagcatattgaacacagcattgatgagcataggcaacattcctgtctgatcatactatcaccagattcagacctttgcatggagcgaggcaagcaccgtaaaacgatcttatgatagtggtgaaggcccactgccggaacaggtggctatacgacaagaacatcaacgggttctaaacaacggctgacttgaagatatggaggatcgccacgatgtcatcaaactgaggtcttttgctctgcatggtctcccagacctgaatgatcaggtggcttatagccacagggcatcaaccaagcacatgctgtcttgccttcttcaggaccacag

SEQ ID NO: 90705 - DNA, 235 bp, Zea mays
  Clone ID: MRT4577_182723C.1
catcgagccaaggcacgagcgcaaggaagtcccggaacctaagagcggctttcagcaacgaaggacgaccccaaagcgcccaaaagacgcgcgggacacggaacaaacactaacatggccgcagcgacatgttcaagtgccaatggtacaggtgacaaaacaaacgccacgacccggacatcgcgagtaccagcccatgcttaacgagcgagccccctggcagagagtgacctaa

SEQ ID NO: 90706 - DNA, 1179 bp, Zea mays
  Clone ID: MRT4577_182724C.1
cacgagcgagcaagtccctaatccccatttctaaatctctaaccctagcgtactgagcttggcatggcggcggcagtgtcccgggctcccagcggcacagtcgtgcggcgcgagcgcagcctctgtgcctaggctgcgcctgcacgtcggccggcggcacgcggtggctaataggctggaggcactgcccgagcggctgcccaccagtggtccagctcccactatggttctaaccagcaatatttcggttcagaagaccttgtacgaggttttatctgtgagtgaagacgctacatacgatgagatccgcgcagcatacagaaagcatgggaagtcctacgccatcctacatccagagcagattatgacaagcagctgcagtcatccagacagagcatcgagatcatcgcatccgaaatccaagtcggggacatgatcgtcgagagcgctgctggtgctctagagctgctgtacccatgcaggtgtggcgattatttctccatcacttcgggtgaacttagcgggatggggattgtcgtcactcgggatggagaagaagtagaagagctgcaggcgtcggattctgcatcggcttctgtcgttctgggctgtggctcctgttctctcaaaatacggctggttatagatggaagctcatgatcacatttcaggctctggttgcacgctgttcagcagtgtggtcagtttgaatgcttaacaaccacctccacatgtttgtcaaacagtatgcaattcccggtctgctgaaaatcttgcagcttatcccgatggtggttgcattgtgataaatggcattttgaccgttgttatcagctaacgaccatcgtcaagtccagctgctgggagttcaaagatgttccggtggtggttattcggtagatgtttagttaatgttgtttttctaggccaatttaatggtctcatcggtcagccattcacctaaacgatggctaaactaacgggttttttatttggtatcagctgaatgaatgctgggtgtttttgatagctgctgatgagaaagaagtgttggctgtggctgttggtgttgtattgaataacttgtgaccgtatctgtactgctaaacatgggcagcatcccatgcagaagtagaacggctatgtatctgtatctttagaatttgatattcgtaaaac

SEQ ID NO: 90707 - DNA, 3764 bp, Zea mays
  Clone ID: MRT4577_182725C.1
aatccatacccaggcccctccgctctacaatagccgaaaccctagcggccttgcgccggccatggcggcaccgcgcgccaccaagcgccccaagtttgcctccggcgcggcgccgccccagcgaggggaggacgactacgtgccggggaacatagtagagattgagctcttcaacttcatgacctacgaccgcctcgtctgctgccccggcccgcgcctcaacctcgtcgtcgggcccaacgggtctgggaagagctcgctcgtctgcgccatcgccctcggtctcgccggagaccccagcattctcgggagggcgtccagcgtgggtgcatttgtcaagagaggggaggttgccgggcacgtcaagatatctctccgcggggatacagctgacgacaagatctgcgttactaggaaaattgatacgaagaacaagtccgagtggctcctcaacggtgcaactgtcacaaaaaaggaagttattgacgtgattaagaaattcaatattcaagttaacaacttaactcagttcttgccacaagaccgggtatctgaatttgcaaagctaagtcccattcaacttctagaagagactgaaaaggctgttggtgaccctgatttacctattcagcatcgccaacttgtagagagaagtaaggaactgaaagcgtttgaagtggctataaggcaaaacgaacagactttgaataatttgaaggccctcaatgctgaacaagaaagagatgttgagcgtgttcgactaagagataatctccttagaaaggctgaatcaatgaagaagaaggtgccatggctgaaatacgacatgatgaagaaggaattcatagaagtgatacaagagaaggagaaaattgcaaagcaagaaatggaagaagcagctagagtctgggaagattcaaaaggccctattgacaaactcaagaaacacaaggcaactcatacttcaaatataaagaagataagcggccaagtaaatcaaaacatggacaaccgtcataaagttatggaccacgatttaaagctgaatgcagaactgaaagctacatttgatgaaatggatgacctgaaaaagcaagaaaaatctcgccagcgaaggatcctgaaaactaaggaagatcttgctgctgctgaaaaggaacttgaagatctacagccttatgaacttcctaaagctgaaatggcacaactaacagaccaaattgcacgaataagtgttgagataaaaaacttaaaagcggaaaggaatgccatggagtctcagttagctcgagaggaagaaagcttgaggagatgttctgataggttgaaggaaatggaaagcaagaatagtaagctactccaagcattacgaagtgctggtgctgataaaattattgaagcataccactgggtgcaagctaacaaaaagaatctcaggcaagaagtttacgggcctgttctccttgaggtaaatgttcaggataagcttcatgccacttacttggaagaccatgttccaaactatttatggaagtcattcatcactctggatgcttcggaccgtgactacattgctagagaaatgaagcagtatggcattcctgttctgaactacttagtgcgcgaaggcacaaggagacggccattaaacatcactccagagatggagcaacttgggatctactcccgacttgatcaagtatttcaagcccctgacactgtgaaagatgttttgattagtcaggcgggtttggatgattcgtacataggtacagatgaaactcatcgcagagcagatgaggtgtcaaagctaggcatctatgacttttggactccggataatcattatcgatggtccaaatcaagatatagtggttatatgtcagcatttgtagatgcaatccatccttctcgtctcttcaagagcaatctggatgtaagcggcattgaagatcttcgacttcagaaagaagaccatgtaacaaatattgaaggaatgcgtgaagctataaagacgcttcatagaaaacagagacagttagaagacgaagaggcaaatatacacaggcagaaggaagaaattattaatgcgatgagataccacaagaagacacgagaagagatacaaagacgtgttgatatcaaaaagcgaatactgaaggacatatccagagaagacgatgtagaatccagcacgagaaagcttgttaatcaggttgctaagataaatgatgagaggtttcatgcaatgataaaacttaaggatttgcttactgaagctgttgctctcaaatggagtcacacagaaaagaatatgactttaattgagctcgatacaaagatatgggagatggaaaagggtgtgaaaaaacttgaaaaggatgctaatcaggcggctagaaactacgaagattgtagaagaatcactcaggagcataggcggaggctgtctattgcaaaacagaatgcagagtcgatagccatgattactaaagaccttgaaaaagagttttgtgcgatgcccactaccttagaagagctcgaaactgcaatacaagatactgaatcagaggcaaattctatgctatttcttaaccaaaatgttttgcaggagtatcaaaaccggcaacatgagatagaatcaatctcaaataaacttaaggatgataagggtgaacatgagatctgctgttctgaaatcgaaacagtaaagggtaaatggcttccgactctgcggattcttgtttcaaaaataaacgacacattcagtcgtaactttcaagaaatggcagtcgctggagaagtttcactggatgagcacggtattgattttgatcactatggtattcttataaaggtgaaatttaggcaaactagtcagctgcaggtgctaagctctcatcaccaatctggaggggagcgatctgtatcgaccatcttgtatcttgtgtcacttcaagatcttaccaactgcccttttcgggttgttgatgagataaatcaaggaatggaccccataaacgagaggaaaatgtttcagcagcttgtcagagctgccagccaaattaacacgccgcagtgcttccttctgacgcccaagctcctacctgatctggagtacagcgatgcctgcagcattctcaacattatgaacggcccatggattgaggagccagcaaaagcttggagctccggtgattgttggaggacagtggtcagcgcagctggacactgagcgccgagtattttgccttggaccgtaggaggcttgtaaagtttagcgtgtagagctggatgcagcttttgggtggttaatttaagtttgtagttgtactacatgtaagtttaggaaagttaaggtagctggtggcattatcaatgtggaaccagatgttgagctgctcaaatcacttggcagcccttttgacacgggagggtaaggtactgtggaatgatccctaccctgtaccggccagtattcctggaagtgaccagtttacttaagtaattgttttgcagcggaaaagcagcaggcatgcaatgtctgtctacttgctgtgacaagtctgactcctttagggctttagtacttttgttaggagtagagatggaaggggattaaattaattggtagtaaaaaatgaataggaacggatttaatctcaatctccttcgattcaatgcaagggtgctgttggttcaagaaatgtaacgcaaagggtaatgatttacatttgattacgtcgggaaaaaaaaaaaaaaaa

SEQ ID NO: 90708 - DNA, 518 bp, Zea mays
  unsure (1)..(518): unsure at all n locations
  Clone ID: MRT4577_182726C.1
actgcgctcgccctctccaccggctgcgccaccgctgccctgcagacttgccttctataaaccctaactaactcccgccgcgcccgctcgccttccatcgcacgccaccaccggtcaccggatgaagggcgcgtggaggcagagcggcgtggcggccgtggccgaacacctcggccacctcggcggagcagggctcgtcgggcgagcgctgcccgtcaggctctgcctctacggcctcacgctcaccttcgccggattcgcggtcttcctctgcttcgcgccctccctcatcgtgcccccagcctcgtcgccgggcgtggcgtggttcgacgacggcctgatcgcctccgcgtcgccgtaccgcgcgcaggtctcgggcttcctctcgtccctgtttcccgccaactcctcctccacggtgcctcctggtggcgtcgcggtgagctgttcccgaggnaatggctccagcgcggttcggcgcggcgagcagttgggaagcgtaggtggagtttcggtca

SEQ ID NO: 90709 - DNA, 1414 bp, Zea mays
  Clone ID: MRT4577_182727C.1
atcggaatcacgagcgagcaagtccctaatccccatttctaaatctctaaccctagcgtactgagcttggcatggcggcggcagtgtcccgggctcccagcggcacagtcgtgcggcgcgagcgcagcctctgtgcctaggctgcgcctgcacgtcggccggcggcacgcggtggctaataggctggaggcactgcccgagcggctgcccaccaggtactagcaagggagtacccaagtggtccagctcccactatggttctaaccagcaatatttcggttcagaagaccttgtacgaggttttatctgtgagtgaagacgctacatacgatgagatccgcgcagcatacaggtctgccgctctgaacacacaccctgacaaagcgcagacaactctcgagtcatcatccgtgccttccactgagcaacaggaattttctagcgtgcagaaagcatgggaagtcctacgccatcctacatccagagcagattatgacaagcagctgcagtcatccagacagagcatcgagatcaccgcatccgaaatccaagtcggggacatgatcgtcgagagcgctgctggtgctctagagctgctgtacccatgcaggtgtggcgattatttctccatcacttcgggtgaacttagcggggatgggggattgtcgtcactcgggaatggagaagaagtagaagagctgcaggcgtcggattctgcatcggcttccgtcgttccgggctgcggctcctgttctctcaaaatacggttggttttatagatggaactccatgatggctcagcaatggtcagtttaaactttagcagccaccacatgtttctcaaacactatgcctcctggtctgccgaaatcaaaatagtgcagcttaaccttgcctgttcttatttccggtaacctgatggtggttgcgttgtgataaatgacgttttgaccgttgttatcagctaaccaccgctgtcgaatccagctgctgggaaatccaaagttgttccggtggtggttattcggtagatgagatcttcagttaatgttgttttacaggcccgatttaatggtcccatctgtcagtcattcacctaaataatagctaaactattgttttggcatcagctaaatgagtgtctttgatagatgctgatgagaagcagtgttagttgcggccgtcggtgtattgaatcaaatagcttgcagtgaccgtatctgtactgctaagcatggacagcatcccgtgcggaagtaggacggcgctgtatctttcttacaattattatctgtggtagaggaggatagtctttcaggcagcatttgatacgtgtagaaattatgcctgccgttaccggcaagtcatctctgtacaggacaatgaggtcgcatctcgtttgttctacttccat

SEQ ID NO: 90710 - DNA, 1566 bp, Zea mays
  Clone ID: MRT4577_182728C.1
gccggccccacgcgtccgatcccctagttcctagtttctcttccaaatttcagacctctacgcacgcaggtcgtaggctatcctcaatccccgatcccgtgcggcggcggttccatagcaacacagtacggcaagacggcaagtccaagtttgcagcgattgcagctccactgctccccaccttctcgccgtgcacgcctgcgcagcgcgcggcgaacggttcgtcggtgccgtggtcgtggtcgtgcgcgagcgcctgtccacggcgggcccacggcgaggtgcgaagccgctacagggcccacggcgagcactgaccgccgagcgggcgaggccgtgacaagcacccactaggagtccagcacaacagcacgccaggaacagtggtccagctcccactatggttctaaccagcaatatttcggttcagaagaccttgtacgaggttttatctgtgagtgaagacgctacatacgatgagatccgcgcagcatacaggtctgccgctctgaacacgcaccctgacaaagcgcagacaactctcgagtcatcatccgtgccttccactgagcaacaggaattttctagcgtgcagaaagcatgggaagtcctacgacatcctacatccagagcatattatgacaagcagctgcagtcatccagacaaagcatcgagatcatcgcatctgaaatccaagtcggggacatgatcgtcgagagcgctgctggtgctctagagctgctgtacccatgcaggtgtggcgattatttctccatcacttcgggtgaacttagcgggatggggattgtcgtcactggggatggagaagaggtagaagggctgcaggcgtcggattccgggtcggcttctgtcgttctgggctgtggctcctgttctctcaaaatacggctggttatagatggaacctcatgatcacatttcaggctctggttgcgcgctattcagcagtgtggtcagtttgaatgcttaacaaccaccaccacatgtttgtcaaacagtatgcaattcctgctctgctgaaaatcgtgcagcttatcccaatggtggttgcattgtgataaatggcgttttgaccgttgttatcagctaaccaccatcgtcaagtccagctgctgggagttcaaagatgttccggtggtggttattcggtagatgtttagttaatgttgttttttctaggccaatttaatggtctcatctgtcagccattcacttaaacgatggctaaactaacggttttttttatttggtatcagctgaatgaatgcctgttgtttttgatagctgctgatgagaaagaagtgttggctgtggctgttggtgttgtattgaataacttgtgaccgtatctgtactgctaaacatgggcagcatcccatgcagaagtagaacggctatgtatctgtatctttagaatttgatattcgtaaaactgtgcctgttcggctcttggggattggtatctggaacgattccttgcctgatttatataaggcttgatcagctggaatgatttctagcctgattacttgcataattaattt

SEQ ID NO: 90711 - DNA, 1852 bp, Zea mays
  Clone ID: MRT4577_182729C.1
cccacgcgtccggtagatccaccacccctccccttgtcgcatcaccttttctactgcaaaggggcacaaaaggtcctctaaaccccaccagcagcttcccctccgatctcaccccaccgccgccggcgagatctccaggatgccgttggccgggcggcgggacggccccctaatgctgcgaggcggcggaggcgggaaacccctgtcacgcgggtcccgcatcgcggtggccgtcgctgtcggcgtcgcactcggctgcgtctgcgccttcctctaccccaacggcctcttcttccgcccgtctgcctctgccctccaatggacgcaccaggttgattcaactgcttgcgaatcatcaagacaagttaccaaccttaagtcccaggtgtcatcattggagagagagaatgttgaacttaggaggcagattaatgaattatccatgaagcttcaaatcgctggacaaggggaaaatgagactttgtacaagcctggtccttttggagctgtcaaggctttgagaacaaatccaacagtaatccctgagaactctgttaaccccaggttggccaagatattggaagaggttgctgtgaaaaaggaactcattgttgcgttggcaaacaccaatgtgagggagatgcttgaagtttggtttagcaatatcaaacgagttagtattccaaactacctggttgtggcattggatgacaatatagaaagcttatgcaaatctaaaggggtgccagtctaccggcgtgatcctgatgaaggcatcgacaacattgcaaaaactggtggaaaccatgccgtttctggactcaagtttcgtgttttaagggagttcttgcaacttgggtatagtattctcctctgtgacattgatattattttcttgaggaatccatttgatcatctttatagagattctgatgtggagtccatgagtgatggccacaacaacatgacagcgtatggtttcaacgacgtgttcgacgaaccttctatgggttgggccagatatgctcacacgatgcggatttgggtgtacaactctggatttttctatataagaccaacggttccttctattgaacttcttgatcgtgtggctggccgtctttctcgtgagccaaagtcatgggaccaggcagttttcaacgaggagctgttcttcccgtcccatcctggttatgaaggcctccatgcatccaggagaaccatggatttttatcttttcatgaacagcaaagtcctcttcaagacagtgaggaaagacgccgggctcaagaagctaaagccagtgattgtgcatttgaactaccaccctaacaaactagagcgaatgaaagcggttatcgagttctatgtcaacggcaaacaagatgcactggatcatttccctgacgggtcagaatgaggaaattacagatagttgcgggtaaagaaacctataccctctgtatcctactcattttggggtgttctggcgtttggatctacatgtctcagatgtgggatctccacacgtgcgagaatgtttggcgagtgcaacatggatggatgcattggctttgaggtatttggatatctccttggtctctagtccctactaacctcaaccgttctgtagcaaatttgtacaagcttagatagatggctcatcacgtttttcccccttttccgtacgattttttgaggttcgaattttggaagtcgaggcggtttgttctggactggtgatacgttttgatgctggtgtttcttgtgtggtggtttgcttgtggtttgagaaccttttacggtttcatttttttaacgaaacaatattgtgggcaaaaaaaaaaaactc

SEQ ID NO: 90712 - DNA, 230 bp, Zea mays
  Clone ID: MRT4577_18272C.1
cggacgcgtgggcggacgcgtgggtttatgaaagagtgcacctcggttgatgttcaaaaagagcatagtgtgaaatgtaacgtttaagcattcctcggtacaggaggtgaacaaagttacatttcacattatggtctttatgaaagagtgcacctcggttgatgttcaaaaaaaaaaaaataaaacataacataaaaataaaatggtgatcgtaactatgaatccaaaaa

SEQ ID NO: 90713 - DNA, 1069 bp, Zea mays
  Clone ID: MRT4577_182730C.1
ccggccgggccacgcgtccgctggaagccggggcgcgagggtttccatccaccgcccgagcccagcgtcctgtgcaagcctcagctctctccctcaaccgccgcctgctcctccgtcgcgattccgacacacccgcctgtgttagccccggagcaggccgcgggcactggaggtgggaggcggtggctggggtcagggggttgtggctctgcgccgccttcctctccgccgacgagcaggcgcgcctcctcaacgccatccagcgagaaggatggtttattaatgcagacaaccaagcgatgagattcggtgacctcccttcgtgggtagtcgaactttctgcacttatccgcgaagctatctgcgtcggcgacgccggtgtcggtcttggtgcggaggcgacgaacgaggacgaggatgcgtgccctctgccatcagacttgctgtggcgggagccattttttgattagatgatcgcgaacagatacagactaggtgaggtgcggaactgtctcagattcacaaggaaaacgtatgtatcgttcagaaaagggatgcattcattcctttttgcgctcgtaacatggatcacgctcctgctgtcgagtgtagggcatctgtgctcacgtcgatctgatgcgctttgacgatgggatcgcaatcgtctcgctcgagtcagcctgtgtgatgcgcttcagtcgagcagaaccagcctctgataccccgaagcaagggggcagtgccagtgaatctactgcagaggtccccgttctgctgaacccgggctcccttgcgctcatgtctggcgatacatgttaaaaagtcgacttagtggtggtcgtccgacaacagagggtcatgttcgctattatgttgttgttcatgttagtcgtctcagtgttatcagtcttgtcgtgttacaaaataaacatgtcgtacgcataattttcccttatgaacaattttgcaattattcgagttgaacatgtatttgaataatcagagttgtatgtttgtgaacaagtcaaactgtggactttgtgtcactaatgttacatgaatgtgtatg

SEQ ID NO: 90714 - DNA, 128 bp, Zea mays
  unsure (1)..(128): unsure at all n locations
  Clone ID: MRT4577_182731C.1
tgggcgggggaaacccctatattttcacatccatgtnaaccaagcccaccaagcagaggaggccgcaccctaccgtggctgcacgngacggcatccaatnccctaaccatggtgccctcaccttggcc

SEQ ID NO: 90715 - DNA, 1555 bp, Zea mays
  Clone ID: MRT4577_182732C.1
cgggaagccggctattcgcgagggtttccatccaccgcccgagcccagcgtcctgtgcaagcctcagctctctccctcaaccgccgcctgctcttccgccgcatcggggcggcgacctcgaccagactcccttctccccttccgcggcattcgctcaggtcttccgtatccgctcgtcccccgttcacgtcgctagggttttcacctcgccgccgccagggcttccgcaaggttggacttcggtgattcgtcgagcagcgattccgacacatggccgccgccggcgacggcggtgagtcccactgccgggaggcgctccgcgaggccttcggtgattcgtcgagcagcgattccgacacacccgccggtgtcagccccggagcaggccgcgggcactggaggtgggaggcggtggctggggtcagggggctgtggctctgcgccgccttcctctccgccgacgagcaggcgcgcctcctcaacgccatccagcgagaaggatggtttattaatgcagacaaccaagcgatgagattcggcgacctcccttcgtgggcagtcgaactttctgcacttatccgcgaagctatctgcgtcggcgacgccagtgccggtcttggtgcggaggcgacgaacgaggacgaggatgcgtgccctctgccatcagacttgttgtggcgggagccattttttgatcagatgatcgcgaacagatacagaccagggcatctgtgctcacgtcgatctgatgcgctttgacgatgggatcgcgatcgtctcgctcgagtcagcctgtgtgatgcgcttcagtcgagcagaagcagcctctgacaccccgaagcaagggggcagtgccagtgaatctactgcagaggtccccgttctgctgaacccgggctcccttgcgctcatgtctggcgatgcaaggtatctgtggatgcatgagatcaaccggaaaccaggcaggcagctgtgggatggcagggagctcgagcagcgcaggaggacctctgttacgttgagaaaactcctgccttatacggactagatcactggtcatgacagtgaacaaactgttctgcagttacaggacagtaacctttttgtggtggaaaattgtaatatgctgtttgctaaagacagccatcattggataatcaaaaggcgcagcctaagaggagtattgttgagtgcctcgagctctatattattggcaggaagctgtagcatttaccatgcatcagatccggggaaaggagagaagatcaggggacggcggcctttgtgagtgcaggcggtgaccggcgaccaacacaaaagcactgcgtccgaagagcgccatcgggaaacgcctccaagctcgccgcacagagtatcgtaggtactagtcgtagaactgacgaaatcgtgttttgtacttatctgctattgctgtctggtgacttgaagtgaaaatacttgcagttgtgtccagtggatcatgtttgatgatttattaattatggtattgttttaggattttccaaactaaaaacccaccaaaaaaataaccctt

SEQ ID NO: 90716 - DNA, 258 bp, Zea mays
  Clone ID: MRT4577_182733C.1
catatgttcgccagagggaagtacatctatcaagactcacggggaggatgtaagggttcccctcgcgtgaatgctgcgcggcgaccgggtcactgccggcgacgtccactcggacgcgagatgttccatccctttacgcttgcttcttgcgcacgcggtctgagttgatagtaattggacactgaatacttggattgtatctctagatagtctataaggtgagtgggcttggaaggagaaatactacaagcgattatc

SEQ ID NO: 90717 - DNA, 220 bp, Zea mays
  Clone ID: MRT4577_182734C.1
agaacgaggcccaagcgttttttttttctttgttcttttttttttaccaaacatcctttttcccttaatttcatacctttccactaccaagggtacattcagggaatagctgacactgccccaccaggatgatgggggacactccgcaactcactgacgctaacagagtgaactaaagaaaggtagctagggaaaggggccgttacgttattactacaga

SEQ ID NO: 90718 - DNA, 207 bp, Zea mays
  Clone ID: MRT4577_182735C.1
ttgatatcctctaaactccaaccacacccacatgtgggttaacttccaatctcttatcaacaaacacatagctgcccgacccaaaccactattccttcaccttactctgaaagacccccgcatctctcacccagaacatgcatcagtacaacccataagctactacggtcgtgaaccagatatgcacggagaacttatgataccctt

SEQ ID NO: 90719 - DNA, 296 bp, Zea mays
  Clone ID: MRT4577_182736C.1
acgatccaatcgaacatgcatggtgagtcaacttgccgcctgcgagccgctgatcctgatgttgtggggcatctaccattcctgctggatcagaagagcatcctttggaggggatcataggcagatccaccatgtaccttagcatatgacctagttggcccagagaacctgcttgatggctcaaaagatggactccactgtaggtgctgaggcaggacacagaggatcatactgtcattacacctgacgatccaccacggcatcgcacttcgcgtgaggagatgtacatcatcatt

SEQ ID NO: 90720 - DNA, 219 bp, Zea mays
  Clone ID: MRT4577_182737C.1
gccggggatgctgagctctctgttctgatcgctctcgctctcagttgactgggctcgccgccgcgggggggcaggaggctctgcgaggatgctattcgccaaatgaagaacacgccataccccaagtgcaggtactgccgagggggacgtgaccccaacattaggatgtacgatggggaccggaatggaaagggcggggtttactgcccaccatccacc

SEQ ID NO: 90721 - DNA, 2385 bp, Zea mays
  Clone ID: MRT4577_182738C.1
tcattgctcttcagcttcgtcgtccggcttgaggtgacttcgagcttcatcaccagctaggcttcgcccaccctttgcccagatttgtgttataaatctatttcctatgcttcgggccaggctagggatatcatttaagtctgctggtgataagttgaagttaggtctattgacaattttttcgtgcgtgcaaccagttttcatgaaggcaacaactgtgccccgagaagctagcagggcacagaaattgtcgtgcccagccataacttcgtcaagagcatcaacttcaccatcaatgagttcgaaagtccctggcaggtcttcaactgaaggtttaaacttctcagaactggccccaaccgagttgaagacctgcttcagccgctggacgcatcggttgccgaagtctacgcatttatcttgaagctctttcaatgatttctgtaaatttgaacttttttcaacttcagcctcaagcttcgcaccgaatttctgcttttcctgttcgaagttttctgtctttgcgaggacttcgctattcaatctaccaattttagcttgggcttccgccaataagccttccattgattgaagttcaaaatccttcttctcaagagcagcttcgtgatcttttattttgctctctatgccttcaattataacctcatgttttttatcttcaaggtcctgttgcattcttaaggctttactcaatagcatgctctgcgcagaaacaaccatggtctcttcggcggctgcatcaacttcttccgcggccatattcaaaagcattttatcaatattagaaaaagtgccctctagatttgtatcttcggctgtttcagcttcggcatctgcagcttcggcgggggcagcttcggtagctgcagcgtcttcggcagctggtgttttcgacgccgaggctggcggtggtgtttcttcaatggcttcaatcacagtaataatcctccgctttttcggcccagcaattttcttcgctaccgagggctctcccttcttctgtaaaagcttcgtcagatgtggccccagtggacttagcgtgataggcaaggattcagtcattacctttaaaatttcttccatgtcggcagcagaaggtgttgaaggagcctcttcttcaattgcagttgttcttggctttggagctgcaaatttcctcttcttcggagcagctaccttcggctcagggcttgattttctcctcttcagaatttcctcatcttctttcaccattctagcagcatgtctgctcagaacgctaacaatcctttttcgtttttgccctttggcacccttgttcaatcgctcataattaggatattcgaagttcagggcatccatcactcgattcaaccttcgcttcggtcgggtgctgaaggctgcagtcatcaactgatcttcttttttagtgtaattccccaaaatttcgttgcacatggtttctatcatttctaaccattcttgacatggccctttgaactgtttctcaaatttgaatttataaggtagtcgcacaagttcattcttctcctttgtcccctttagcttcggcatgttccattcacttagcgtcgggaacaccttataggctaaatattcttggaccagatctctggtcccgatctcctcggctaccaccctgaattctgatacaacttctcggcatggtgaccatggcaccatgcgacacagcggcctggtcaacccgtagcttaaactcaacgggctcagtaccaatgtatttagcttctccttcttcttctcatcggctttaacataaaaccactcatttttccaaccagttggccacttggtgcaatagctaaccaccagagtcttcatatatttgcggtaggcgaagttgtagcaaccaaaattttcatgaagaccatcttctctggccttcgtctgatagtgaagctcatgcactcggcagaaggcttcggcattcaggtctattccctggcttcggagagcccagataaagacattgagccacctcatctttttcggtgttagagtggtttcttctccaccaaaatgaatcaacttcttctcagcttcttcgaagtagcctagctttatcatcatagacatatcagcctcagaaatggtggattttccaaagtccaagtgactgggtttggatggcatgagagtgctgtaatcttcttcttcttcatcaacatcatcttcctcgatgtcagcttgttcagcttcggcagcaggtgcaccttcgtcagtaaccccctctatcacaaccattcccgattgtttcatcacttcagagatcggggcagtctctgtggcttcggcctcttctccgtcatgggtcaccctagcagttgaacgaactctggccat

SEQ ID NO: 90722 - DNA, 775 bp, Zea mays
  Clone ID: MRT4577_182739C.1
attccccgagaaaaccctagctagcccctgtccagagtccagaacccgtccgcacgcccgctcgccgccgccgccgatggcgaagccccgccgcggccgctccggctcgcggtcctcgtcgggctcctcctcccgctccgcgtcctcgggctcctcccgctcgcgctcgcgctcgcgctcccgctccctctcgtcgtcctcctcatcgcccgcccgctcccggggccgctcccctcccgccgccaagcgcagttcacctggagcaaagaaaggtcgatcaccttcacccgccctcaaaaaagggtcaccatcaaggaaaggccgctcatcatctcccccaccgaagaaagcttcacctcctaggaaagcatctcctcctcctcagtcggttgtactacatgttgatcatctatcccgaaatgtgaatgaggctcatttgaaggagatatttggaaattttggtgaagtggtgaatgtggagctatcaatggacaaatttgttaatctccctcttgggtatggatacatcgagttcaagaagaggactgatgctgagaaggctcttctttacatggatggtgggcaaattgatggaagtgttgtcaagttgaagttcacactgccaccacgccaaagggcttcttcacctttaaagccacctcctcctccccccaaaagagatgctcctccgaatgataaagttgctattggtgctgaaaaggatgctcagcagcgggctgggggatcagcatctccacgaaagaagccagcttct

SEQ ID NO: 90723 - DNA, 813 bp, Zea mays
  unsure (1)..(813): unsure at all n locations
  Clone ID: MRT4577_18273C.1
cattggtacctcgaggcggccgggaactgaaaacaagagcagctgcaaataaatcgataagccgtctcacaccttgagcctgcaacaagctagcattgctgcatgccagcatccacgtagcatctgagcttcatggttcagattcagatagcagcggtgaagcggatgaaggggcgggccccgctgtcagtggtggtggcaatcatcggcgggctggctctagcgggcgtcatcttcaccgacgacctccgctcactcactgggtaaccgatctccgtgtgcggtgtgccgcatgtgcccatcttcagagatcatggagaagaaggggaaagcgaaggagcacaagaggacgacgtctctacatgccgggacgacgacgaggaagatgccgctaacgccgccgccgcagccggcgaaggcagcgttcgacccgagccggtgcagcgtggacggaggggtactgggcgtacaacaggtccaaggagctgctttacacggaccaaacatgcccgttcatcgacaggcaggtctcttgccagaggaacggcaggccggacagcgactacctgccgctgggattggcacctagacgactgcagtctcccaagttcgaccccggtggcgttgctggagacgctgcgnngngaagcggatgaatgttcgttggcgatcgctgaanaatggggcagtggctctccatggtctgctcgtcaactccgccggcctttacacggcgcggtccatggagcgcagcaccacccctggtcgtcttcaccgncacgnagtacaacgccgacgatcgagttctactgg

SEQ ID NO: 90724 - DNA, 328 bp, Zea mays
  unsure (1)..(328): unsure at all n locations
  Clone ID: MRT4577_182741C.1
tgcacagctgcagatttaggattgggataccataactgagcatttgtagtttttaaagcaactccatacaaggtttaattgtatcctcaatacatctttagataacttttactctgctaaaaaaaaaaaaaataaaaaaaaaaaaaaaaaaaaaaaaaaaaaaaaaaaaaataaatanaaagaaaataaaaaaaaaaaaaaaaaaaaaaaataaaaaaaaattaaaaaaaaaaaaaaaggcttggggggtgcccccaattttttatttttagacccgcgaaaaaaatctcgaaccggcccttggggggggcccatttttttttttaga

SEQ ID NO: 90725 - DNA, 622 bp, Zea mays
  unsure (1)..(622): unsure at all n locations
  Clone ID: MRT4577_182742C.1
accggcgacctcaacgcgtacaagaggaactggatcgagatccagaacgtcgacaacctgtccatcaacggccacggcaccatcgacgggcagggagccctggtgtggaacaagaacgagtgccagcgttcctacaactgcaaaatcctccccaacagcctggtgctggacttcgtgacgaacgcccagatccgcggcatcacgctgctgaacagcaagttcttccacatgaacatcttcgggagcaagaacgtggtgatcgacaaggtgacgatcaaggcccccgggccacggcatcagcgtcggcagcctggggcggtacaaggacgagaaggacgtggaggacgtgaaggtgacggggtgcacgctcgccggcaccaccaacggcctgcgcatcaagtcgtacgaggactccaagtcgtcgctcaaggccaccaagttcctgtaccaggacgtcaccatggacaacgtctcctaccccatcatcatagaccagaagtactgccccaacaacatctgcgtcaagtccggcgccttcaggtggccgtcaacgacgtcgtcttcaggacatncacgcacctncaacacgccgagccatacgctcactggccacacctgcctg

SEQ ID NO: 90726 - DNA, 385 bp, Zea mays
  Clone ID: MRT4577_182744C.1
gactagttctagatcgcgagcgcccgcccttgggtttttttttttttgcaagaacgctgcagctgaaggcagcaaatcggcaaagagaccttttttcgcttgatgcgatgcgaagatctagattacgctataacaaacctacttacatccatccacgcgcgtcgtctactacggcgtgtagccgtgtaccacgtatgtacatttaccaactaaaaaagccgtgtggagcagttaccagtttgccactcttccaaaggcgcgcggctgcggcgagcggtacgtggtaaaggctactgcatgtgctacgccgtcaagcggtcgcgacgtcacgcgccgcggccgtgggccgcggggagccggcggcgtgccgcgcgggcgcgaacct

SEQ ID NO: 90727 - DNA, 183 bp, Zea mays
  Clone ID: MRT4577_182745C.1
cctgctgtaccgtccgaatcccggtcgccccgcgtccgcacgccgggttgccacactagtgtggaacgcatgctgccccaattaacgaataccccgccatctagatcccgtgggttacctccaggggatggtgtgcgatctagttgttcttcttcctataaagactagcctgctgcagagaaa

SEQ ID NO: 90728 - DNA, 500 bp, Zea mays
  Clone ID: MRT4577_182746C.1
aaatgcgccaaccagcttgccttaccagggcgtgcaactcatcacggtcgacatcaagtacaacaggtccgacaccaaggccatgtccgtctgcaaaaacgccatcggcaagtccattggcatggcgaaggagctcgcctgcgtctgaaccaacttgcatccatcactcacttttggtcacctctctctttctcactctcgccagtctttttttaggcctctggcaatctgcgaactttcttattcattctactagtgtggatctataattccattcaaaatatatacatgatctaaatttcatgccaaaaaaaaaaaaaaaaaaaaaaaaaaaaaaaaaaaaaaaaaaaaaaaaaaaaaaaaaaatgaaagaaaaaaaaggaggtcgctcaaaaggttcgatgcttacttaagcttgcatgcaacgtaatagctctccaataatgtcacccagattcatttcattggccgtcgtttaaaaacaacttcattgggaaaaa

SEQ ID NO: 90729 - DNA, 448 bp, Zea mays
  Clone ID: MRT4577_182748C.1
gttttcctgggctgttgaagatgaggagactgatgctctgttgtgcaataaaaccgcttcaccattttatacgatgtctccctttatttaagagttgggttgtgttcttaaacttgtacattgcaatgtcctctgtggcatgaaatttagatcatgtatatattttgaatggaattatagatccccactagttgaatgaataaaaaagtttgcaaattgccagaggcctaaaaaaagactggcgagagtgaaaaagaaagaggtgaccaaaagtgagtgatggatgcaagtaggttcaaacgcaggcgagctccttctccatgccaaaggacttgccgatggcgttcttgcagacggacatggtcttggtggcggacctggtgcacttgatgtccaccgttgatgaactgcaccccctggcagggcaggttgttggcgcaattgaccg

SEQ ID NO: 90730 - DNA, 815 bp, Zea mays
  Clone ID: MRT4577_182749C.1
caataactaactctttgcagagagaagtttgaaaataggggataacataaaggatgtgataggggatctgctggagatagcctaatgcatgtcacgaatttaaagagttcttatagatgcccactctttatgcttggaggcacgagtcagttaacctgcatggagaggtcatcacagtatatgctttctgccatctcccatatctgcaggatgttgtcttcagacacgctggcaatggcccatttctcgctaggattccacgacagctctgatatcttgtctgtgtggcctccatgaacgaacagcagactgatccagcatgtggcaacgtcggaagttcacatgcttacagacgacaaattttcataacaatagcttggcttggctgcttcacagaataaccaaacgacaaccacgaaattgcgacgatataaaataaacaactcagaagcaaatcgaccccagaagcccgtcttactcatcaagcactcccgccttctcctccatggcatccgcttcctcctcccagcatagaagattagccagcttgtagtccttcttcataggaggaggagcactctccacgttctcgccgtcaaagcagtggaaaacagatttgggcgaggtagcaacagcgtcttcagcagcacagaagctctggtacacgaggagcccgcctccaggcagctcctgctccaccatgttgttgcagtcatagacctctgcaccaagtgcctttccccatgtcccggcatggccacgcccgcccgaagatggtcacggcaacggaaaacctccgaggggccaaagcaccg

SEQ ID NO: 90731 - DNA, 694 bp, Zea mays
  Clone ID: MRT4577_18274C.1
cctcgaggccggccgggactgatatcaagagcagctgcaaataaatcgataagccgtctcacaccttgagcctgcaacaagggagcattgctgcatgccagcatccacgtagcatctgagcttcatggttcagatagcagcggtgaagcggatgaaggggcgggccccgctgtcagtggtggtggcaatcatcggcgggctggctctcgcgggcgtcatcttcaccgacgacctccgctcactcactgagatcatggagaagaaggggaaagcgaaggagcacaagaggacgacgtctctacatgccgggacgaggacgaggacgaggaagatgccgctaacgccgccgccgcagccggcgatggcagcgttcgaccccagccggtgcagcgtgacggagggctactgggcgtacaacaggtccaaggagctgctttacacggaccaaacatgcccgttcatcgacaggcaggtctcttgccagaggaacggcaggccggacagcgactacctgcgctgggattggcacctggacgactgcagtctcccaagggtcgacccggtggcgttgctggagacgctgcgggggaagcggatgatgttcgttggcgactcgctgcagatggggcagtggctctccatgggctgcctcgtcaacttcggcgtgccctacaccggccgggccatggagcgc

SEQ ID NO: 90732 - DNA, 202 bp, Zea mays
  Clone ID: MRT4577_182750C.1
gtcgaggaccgccgcccagaccgcctccccttccccgcctccggtgcccaaggaccaggcccaaccgtttgtgcaggtggtacataggtcggaccaggactcaaccacacccactagtaccttacatacagactcaggtggaccagttgccacctagagctaccagcttactactgaaggtagtacgtggcccgtaacatct

SEQ ID NO: 90733 - DNA, 393 bp, Zea mays
  Clone ID: MRT4577_182751C.1
aaaaaaaaaccccttgggcgtaagcggccgcccgaaacaaaggcttccccgcccattgtaaaaaaaatagaaatcgcaaatgcacccctggaagtagtttcttgccagggttatccctaccatcaaaaccaggtgtaaaaccccccccatgacccaggttttactttaggcagtaccctatttaatattcaatccaaacaaaacaaagcgggttgacttgaccccaatttcccttttttacctaacagggacaaggtcttaatttttaaaagatcttttggacacattcgaaggttaacgtaggggccttggggctaaccaaaaagggttgaacgaatttctcttccaggaggttgggaatctgccttttcctaacatggaggccagggtttt

SEQ ID NO: 90734 - DNA, 1627 bp, Zea mays
  Clone ID: MRT4577_182752C.1
gggcgattgggatcctcgaggccggccggggcgcggcacgcaccctacagcacgagacatatcgatggcgttcatcagcagtgcggcgatgaaggcagccgtggccgctctgctggtgttcgccgcggtgtcgcctgccgcgcgcgcggtggcggcggaggcggaggcgaaggcgaaggctgtgggaggcgcgccgtcggtgcccgctggctcgctggacatcgcgcagctgggcgccaagggcgacggcaagtcggacagcaccccgatggtgctcaaggcgtggaagcacgcgtgcgaggcgacggggcagcagaagatcgtcatccccaagggcaactacctgacgggcgcgctggacctggtgggcccctgcaagtcctccatcatcatccgcctcgacggcaacctgctcggcaccggcgacctcaacgcgtacaagaggaactggatcgagatccagaacgtcgacaacctgtccatcaacggccacggcaccatcgacgggcagggagccctggtgtggaacaagaacgagtgccagcgttcctacaactgcaaaatcctccccaacagcctggtgctggacttcgtgacgaacgcccagatccgcggcatcacgctgctgaacagcaagttcttccacatgaacatcttcgggagcaagaacgtggtgatcgacaaggtgacgatcaaggcccccggcaacagccccaacacggacggcatccacatcggcgactcgagcaacgtgaccatcagcggcaccaccatcgccgtcggcgacgactgcgtctccatcggccccgggagcaagaccatccgcgtgaagggcgtcaagtgcgggccaggccacggcatcagcgtcggcagcctggggcggtacaaggacgagaaggacgtggaggacgtgaaggtgacggggtgcacgctcgccggcaccaccaacggcctgcgcatcaagtcgtacgaggactccaagtcgtcgctcaaggccaccaagttcctgtaccaggacgtcaccatggacaacgtctcctaccccatcatcatagaccagaagtactgccccaacaacatctgcgtcaagtccggcgcctccaaggtggccgtcaacgacgtcgtcttcaagaacatccacggcacctccaacacgccggaggccatcacgctcaactgcgccaacaacctgccctgccagggcgtgcagctcatcaacgtcgacatcaagtacaacaggtccgacaacaagaccatgtccgtctgcaagaacgccatcggcaagtccattggcatggcgaaggagctcgcctgcgtctgaacctacttgcatccatcactcactcttcgtcacctctctctttctcactctcgccagtctttttttaggcctctggcaatctgcgaactttcttattcattctactagtgtggatctataattccattcaaaatatatacatgatctaaatttcatgccacagaggacattgcaatgtacaagtttaagaacacaacccaactcttaaatagagggagacatcgtataaaatggtgaagcggttttattgcacaaaaaaaaaaattataatcttctgtaaattatttataaaaaaaagggcggccg

SEQ ID NO: 90735 - DNA, 281 bp, Zea mays
  Clone ID: MRT4577_182753C.1
ttaaagcagtggtaacaacgcagagtacttttttttttttttttttttttttttttttcggagtttagtttggtacaatctcgactcttataaatccatgctaacactataatcctaagagggagagggtccacagcgataacgtgagggaacgaattaacggtggtggaggtgccgagtgaaggaaaagggcagcgggaatgcggagagaggagagtgaagctgcgacggcaaggtcatccccgcgtactctgcgttgttaccactgcttaagggcgaat

SEQ ID NO: 90736 - DNA, 573 bp, Zea mays
  Clone ID: MRT4577_182754C.1
ttaattcggcacgagggcgacacctcctcgtcctcggctcctgcttctacggcggtaggtaggtgccgcgtcggcgcgtcgccttccttcaactgcgcctgcccgcaccgcatctcttctccttgctccatctccctactgctccagctcctatcctcttggctccgcccgtccgcggtccgcgtgtgtgcgctccatccttctccaccacctgtcgccgggccaaccgcaccgccctctgatgactgggccgggcgaggagctggccgagctgctgtgggaccgtggcccggcgctgcggagggcgccgccgccgttccagcccttcacctgcagcgccgccggcagcagcaggtcgcaggagctgaagcggcatgcctcggacaccaccaaggcgtcagcgttcgtgaccgccgtctccgtcccgctgggcacgcacgacgccggctccgggctcgggctcgccggcctccccgtccacgacgacgacgacgccgtgccgtggttgcattgccccgtcgccgacgacggcgacggcgacacggcgccgctgccgccggagttctgcgccgg

SEQ ID NO: 90737 - DNA, 274 bp, Zea mays
  Clone ID: MRT4577_182755C.1
aatgatctcaggcgcacagctggctagcaagcggcctttttacaagtaaagcctgggttgctgcgtcccacggagcatatggttcgatggcagacattgtagccgtatagagtagctaggtcgagctgtacatgcatgtgcagctacctagcccacaaagggaaagaagaggagggcccgcgtgcgctgcttcacgccctcagtgttgttggctagaggacggcccaccaggcgcgccttccgggcacggtgggacagagacaaccaaggaacg

SEQ ID NO: 90738 - DNA, 692 bp, Zea mays
  Clone ID: MRT4577_182756C.1
cattgggtacctcgaggccggccgggaagcttttcattcctatctacactaagcaaccaagcaaatctcaccaagagctcgatttttgcacaccaagatgcatttttcagcaacagttctacttgccattcttcagtcggccgctgcggacccttaccaccaaacctatgacgccgatgtgcaactcgtagtagcccctgagactgtggtggacaaggctgcgcacataatactctgcagaccattgacactcaagttcatgcatcgtgagagcagagaccttgaaatcaaaatccatgtggacgtatccacccaacctgcagcgacgatggctgagaaaattccaggatgggatttcattgaagagaaacgcatgcagggacgcattcatggcaacactttctggagaattgaggggggagctcacagaagacttcccagccgaggaattcttgtttgaccctctagtgttcactctcaaccatcctcaggactttgagggcgagtttactggtgaattctggaatggtcaaatgaaaatgaactggacttcaggtgccactattactggcaaaagtgggctaagtgatcacacgatcaaggggaagaccactatcgactattccccatagttggctgcacgaaatccaggggatcagagatacatagcctaatgtacttagctttgccgc

SEQ ID NO: 90739 - DNA, 545 bp, Zea mays
  Clone ID: MRT4577_182757C.1
ggcactcgcaccgcacccaagaaaaccgccggctgccttgcaaaacagccaacctcacagctcacagtcacactagcgttgtcctctcgcggaagcaaaggcctgctggggtgcgcgtgtccgtccgtgtgcgcgggcgcgccacagccatgacgaaccaggacgtggtggtcccggacatgggcattgcggcggctgcggccttgccgccccccggcctcttcgcgtgccgcggcgtcgcgggggccgtgtcgtcgctgcggggcacgtacggcagccttggcctccccggcgggcgccgccgccgacggtggcgagttccgttcccccgtggcggcggcggcgaatgcgccgccgggtcggaccagctgcaccagccgggtcgtcgaggccatccgcgcgtcgtcgcccgcccgctgccccgccgtcgacgagtacgacgcgtggacgaggaagcacccgtcggcgctgggcagcttcgaccagatcgcggcggcggctaaggggaagagggtcgtcatgttcatggactacgacggcacgct

SEQ ID NO: 90740 - DNA, 792 bp, Zea mays
  Clone ID: MRT4577_182758C.1
attgatgaatggatgaatcgcaacgaggcggccaaacttgacgtcgctcgtaagtcattgacttctgacagcacagaaagtgatatcctacaagcactccagtatgttgatgagatatgtcagagaagtcgatccaataggcaggctgtgagaagagatgggttgataatcatgattgctgacttgttgaagaatagcagtacgaaagtacggcaagcggcactagggactctttgctccattgcaaaagatgacaatgacaataaggttgagattgctgctggagacaatattcgcacaattgtaaagttcttaaatcatgggcagactcaggaaaaggagcaagcggtgtctctgttgtttgaactttcagagaacaaggctctttcagaaagaattggcagtgtttctggagctattcttatacttgttggcttgtcaagcagtaaagtagaaaactcgctgattgttgacagagctgagaagacattggaaaacttagagagctgcgaaaagaatgttagacagatggctgaaaatggtagattgcaaccccttctgaggctgcttcttgaaggttcacctgacatacaattatctatggctgcatacctcggagagcttgttttaagcaatgatgttaaggtacttgtggcacaaaaggctggttccacactagtcaatatcatgaaaaaaaggaataaagaggccatttaagctgctttgatggcattgaaccaaatttaatttaatgatgcttgtgcatagattttatttgaagttggtattttt

SEQ ID NO: 90741 - DNA, 512 bp, Zea mays
  Clone ID: MRT4577_182759C.1
gctgttaggtacgagctgctgctactactagctttgcctttctgagggtccatgtgtgaagtacatattgaattttatgggttaattccggccatttctatccccatttagtttgcattgttcagctttgggttcattgtattgtgatctggtttcacggctgtaatctatacattttgttgaagcgtacataatcatctggtgcagccaaaaattcaaaaaaaaaaaaaaaaaaaaaaaaaaaaaaaaaaaaaaaaaaaaaaaaaaaaaaaaaaaaaaaaaaaaaaaaaaaaaaaaaaaaaaaaaaaaaaaaaaaaaaaaaaaaaaaaaaaaaaaaaaaaaaaaggggggcccgttttaaagaaccaaattttacttccccgtccttgcaaattaaaagtttttttttggggcccccaaaatcaaatcaacggcccgggttttaacaacttggggactggaaaaaccttgggtttcccaaattaattccctttgaaaaaaacccccttttc

SEQ ID NO: 90742 - DNA, 1196 bp, Zea mays
  unsure (1)..(1196): unsure at all n locations
  Clone ID: MRT4577_18275C.1
aaaaaaataacccttctcccccaaccccatctctctctctgcctgcgttctcctggtgctgctctccctctcctcccctgctttgacctccccgcctttccccgccgtttcttggatttctaggatccagacaaccgcccctgtgagcctgccttcctgcctactacctgcgtacgtacaggagggtccttgcttgggtgatccgggtgcttggtttctcggttccccggctttcgctgctgttggattcgccgagccggagccgccggagatgactgtcgacgagctgaagctgcaggcgagggccagcggcggccacggcgccaaggaccagttccccgtcggcatgcgcgtgctcgccgtcgacgacgacccgacctgtctcaagatcctcgagaacctcttgctccgctgccagtaccatggcagccacggccctgaagctgctgagggagaagaaggaccagtttgaccttgtgatcagcgacgtccacatgccggacatggacggcttcaagctcctcgagcttgtgggcctcgagatggacctcccggtcattatgctgtctgcaaatggggagacacagacagtcatgaagggaattacccatgnagcatgtgactacctgctgaagccagtgggcattggcattcgaaaaaaaataaaaaaaaaaaaaaaaaaaaaaaaaaaatgtgaaaaaaaaaaaaaaaaaaaaaaacaaaaaaaaaaaaaaaaaaaaaaaataaaacaaaaaaaaaaaaaaaaaatgaaacatacataacaatcccgctgacgaagtgaacctcggatgagcaggagcgggaccaggtcgtgccgggacaccgagcaatgggaggcgcacggcgtcgcgcaggccaccgggtcgctggtgcacattcccgccgtcgcgctgcggagctgaccggccgggacggaacggaagcctacgatcgactgtacatacaggggttgggacttgttgggttttcctttgggtggagagcgagggagcgcagtcgagagccagcgagcagtctctcgtgcagtgcagtgcagtgcagctccggcgtagatgagattgtattgtgaccaagccgggagggaaagcagggaggggaggacaaagatgttttgtcacgtttcaggctccggccatcgccggagtttgtccggggaatatatcgatttcctccag

SEQ ID NO: 90743 - DNA, 915 bp, Zea mays
  Clone ID: MRT4577_182760C.1
cattgggtacctcgaggccggccgggactcactgtccagtgtccttgttgtccaccactccctcgagtcggctcgagtccgtgacgcgtcagcgtcaccgtccgtcgtcgcagacgagcccagtggcgactggcgattcgctttcgaaccgcagtcgtccctgctgtgttcccggttccctcccttcctcctcctatagttggcttctcgccaccctctgccttcgaccaactttctcccttctcccctccccgttcccctctccaactccaatccatggcctccacggatcgctccgcgccggcggaggaccagcaacagccgcagcgcccgtccctcttctcgccgtaccagatgccccacttccgcctcgcgcaccgggtggtgctggcgccgatgaccaggtgccgggcgcccgatgcgctcccgggccccgcgctcgcggagtactacgcgcagcggtccacggaaggcggcttgctcatctccgagggcaccatcatctcgcccgccggccctgggttccctcgtgtccctgggatatacaatcaagagcagactgatgcatggaaaaaggtggttgatgctgttcatgccaagggagccatctttttctgccaactatggcatgtaggtcgagcttctcaccaagtatatcagccgggtggttctgctccaatatcctctactgataaaccaatatcatcaagatggaggatactgatgcccgatggatcctatggcaagtatccaactccgaggcgcctagccacatccgagataccagaaattgtcgagcaataccgacaggctgccataaacgccatcaaagcaggtttcgatggcatcgagatcacggtgcccatggctacctaatcgaccagttcctcaggacggtatcaacgacagggctga

SEQ ID NO: 90744 - DNA, 184 bp, Zea mays
  Clone ID: MRT4577_182761C.1
gtcgaattatcagtagcgcaacataaccgtttgatatgttcgtggattatccgaggtttgtgaattgtcgacttctgcgttgaagctcgagctactgtgtgtgttgcattgtcaggtcacaccaacagctatctgcagattcatggctttttatggttacacctggagatgaattcgcttgggg

SEQ ID NO: 90745 - DNA, 175 bp, Zea mays
  Clone ID: MRT4577_182763C.1
gaggagttttgcaacataatgcgcaagatctacatttaccccaagggggaggtccagaagatgaacttgaaatcattcgtgcccaggaaggaggaaccccaagcagcaggcgaaagctgagccgtcgacggcgcaaaccagtaggatgtctgcctgcactggaacaagcaatttt

SEQ ID NO: 90746 - DNA, 330 bp, Zea mays
  Clone ID: MRT4577_182764C.1
aacaggtaggagcgagctcatgtgatgacggaccatcgactcatcatgccatcaaagcaccgtcgtgtgtgcgctcggatcgataccgactgaccaaatgacctgcacatgtatgccgcaatccctgtggcgatgcttgttctcgcgtacctaaacttgagctctaccattccataacatgtcatgactgactaacacataagcactgtttctatatcgctgcagagaaggcgatagccactatgtttgatggggtgctagatagtgaccgctcattttatgctagtactgatgatgaagccagcgagacgaacatcggagacttctatg

SEQ ID NO: 90747 - DNA, 409 bp, Zea mays
  unsure (1)..(409): unsure at all n locations
  Clone ID: MRT4577_182765C.1
gctacgacggcgcgcgcactcaaccncggaanncgactcgagcactactgcttctggaccctcgacaacaccaggctgggatgcttccatctttttcagcctncatccaaagnngggtncaaaaaagcagcaagcatctccagatctcatgaaacttccaccgcgatatccttctatgaataacgacaaacaccacaaagcaccgcaccatcctctggcttccgatcaacaggatggaacgttgctacctaacaccaatggtcgtagaggtcggtgaaggggaggtagagcccacagcaggccagcgagatctcgcgctcatggaggtaggggtcccacaggggtatggcccgctaccacgactcacatcatggaccggagccccagcagcagcaggagcaccaggcgt

SEQ ID NO: 90748 - DNA, 462 bp, Zea mays
  Clone ID: MRT4577_182766C.1
ggtaccgcggccctttctcgagtttttttttttttttttttttttttttttttttttttttttttttttttttttaaaccgggaaaggggtctacacctattactttttgaccccagttccacaccccaaaccaaagacctatgaaaaaaccctaccgctgaaaatttgattacacccacagcggacaggggttactttcccaccgactggcccttgtggggcccctaaacccggtgatcccccccattctccaattgggggcttggggtacatctcgacctaacgtgggggcagcttacatagtacccgaatgagctgggggtgcacagaccaaaaagttttggtgatggcgggggggcattgccattctggttgtgggcggacgagccaaaaacccggtgcccgccctttttgtctgagaaatacctatccaaccgcgtgggggccgggccttttggttg

SEQ ID NO: 90749 - DNA, 1342 bp, Zea mays
  unsure (1)..(1342): unsure at all n locations
  Clone ID: MRT4577_182767C.1
aaaaagggcggccgcccttttcntattcttaantgagctcatgttataattttttttttatttgggggagtgttatcctatattcatcggctgccagctttacgcgattggtaattcggcacgcgtcccttttgccccaatcttcttctccaaaccacatcctctggcctctgacaggtgacgagtcccatgggtgccgcggcgaggaagcccgccgccgctctgctgccaatctggctctgtctcgtctgcgtgtcaagagcgcagccgtacatcggcgtgaactacggcgaggtagcggacaacctgccgtcgccggacaagacggcgaggctgctcaagtcgacgtccatctccaaggtgcggctgtacggcgtggacgcggggctgatccgcgcgctggcggggtccggcatctccgtggtggtgggtgtggccaacggcgagatccccacgctggccgccgacccggccgcggcgtcgcggtggctggccgccaacgtgctgcccttcgtcccggcgaccaccatctccgccgtggccgtgggcaacgaggtgctggagtccggggacgccgcgctggccgccgcgctcctcccggccatgcagaacctccgcgccgcggcggcggccgcggggacggcgccatattgatcgctaacaaaaatagaaccaccatcgccgctacggcgtacttgaaggtttgggagttgtttaagaaaaatgtgcaccacggatacttgcattggagagaggtgtccctgcatatattggtgtccttggaaagtttccttctcgtgcctttgacatggcccattgctcggatgtttgatagagtggaaatgatggtatgtacatgatggaagttgacagtattaaggcctggcggatattgggcaggcattggctggaagatttattatgaggggtggccgttctaaggaggatcttcagaatgagcaaagaaaaatagaacaattcgcacaacttctttgttggaagaagatatctgagaaggatggtattgccatatggagaaagagattaaatgacaagtcttgctccatgaaacaagataatccaaaaggtgtaaaatgtggtttgacaagtgacagtgatgtatggtacaagaagatggaagtttgtatagaccccctacccaatgttaatagtgtatctaaggttgccggtggtcaattagagccttttcccaagaggctctatgcagtacctcctcgtataacccatggctctgtgcctggtttctcagttcagtcatatgaagaacaataaactttggcagatatcctgggattcctgagcagaccggggcgcccttttg

SEQ ID NO: 90750 - DNA, 214 bp, Zea mays
  Clone ID: MRT4577_182768C.1
gtctccacagcaaccagcacacatttccctttggcggatcgaaggaaggaaggaaggaagagatggctggaggcacgtccgtacacatcggtcggtggatcaatgagtggcacgccgggagagacaccatctcattcactttcggctggacccgacacacgctgtcctccgtctggttcgtctggctctctgtatccacctacatctagacagc

SEQ ID NO: 90751 - DNA, 626 bp, Zea mays
  Clone ID: MRT4577_182769C.1
tttcttttttttttttattttttttatttttatttttttatttttatttttctttttattttctttttcttttatttttattttatttttttttttttttttttttttttttttgggcaaaaggttacattttttggccagggacagcaaaaaaaaatttttttgttgggggcagccttagcaaacgaagatcattacggggggaaaaatgaaatgaagtagggggggggcaaaaaaacccttttttttttttttttccggcttttccgggggggaggggaggggttaaaaacttaagggccgaaaccccgggtatgagccccggggaaaaacaatgggtagtccacggggctaaaacttaaagggtgaagcgcttggtacccggacccggggtggggggattttttttacccctttttaccctgaaaaaaaggggcaccttggggccttaaacctaaaaccatttttggggtaaccaaaccttttggggcccttcgaaccaaaaagggggagtacaggaatattgaccggggggccataaactacccctttgggcctgattttaggccctgactcaccctccggggacaaaccttggggaggaaaccttgggttttcggggcatt

SEQ ID NO: 90752 - DNA, 929 bp, Zea mays
  Clone ID: MRT4577_18276C.1
gggctatgattcccgccttaattatatgctcgccgcaaccactaccaccaccgatactgaaaacaaagagcagctgcaaataaatcaataagccgtctcacaccttgagcctgcaacaagctagcattgctgcatgccagcatccacgtagcatctgaggctctgagctcatggttcagattcagatagcagcggtgaagcggatgaaggggcgggccccgctgtcagtggtggtggcaatcatcggcgggctggctctcgcgggcgtcatcttcaccgacgacctccgctcacttactgagatcatggagaagaaggggaaagcgaaggagcacaagaggacgacgtctctacatgccgggacgaggacgaggaagatgccgctaacgccgccgccgccgccgcagccggcgaaggcagcgttcgacccgagccggtgcagcgtgacggagggctactgggcgtacaacaggtccaaggagctgctttacacggaccaaacatgcccgttcatcgacaggcaggtctcctgccagaggaacggcaggccggacagcgactacctgcgctgggattggcacctagacgactgcagtctcccaaggttcgacccggtggcgttgctggagacgctgcgggggaagcggatgatgttcgttggcgactcgctgcagatggggcagtggctctccatggtctgcctcgtcaactccgccgtgccctacaccgcgcggtccatggagcgcagcaccaccctgtccgtcttcaccgccacggagtacaacgcgacgatcgagttctactgggcgccgtacctggtggaggccaactccgaccgcaacatccggctggggggcccgacggccgcgtgctccacgtcgacgccgtcgagctgcacgctaagcactggaagggcgtggacatcctcg

SEQ ID NO: 90753 - DNA, 594 bp, Zea mays
  Clone ID: MRT4577_182770C.1
ggtgtcttactatggcatgtgtgggctggcgaaggagtgtctacatcagcggtacttcagcaaggaatactctgaatttctggatgagtttatggccgcagttaggcagaactatggacaaaaggtccttgtccagttcttgcagggattattgctgctctgaagtctgttggtgggactctagctgatcatacattcttgttcttcagtgcgagttatacgatcaagtgactagtgatgtgatttgccatgatgagaaaacttcttacaagatgggcgcaagagctttcctagtggccattctcgcttacacagacctgttttgataagagctgagcagcaatgcttccatttcggaccacgaccttagctaaaggctaatggttcgaaatgtctgaagtaccgaagacagggctagctcctcgttttttgtcatgtcaaataaattgtgtatgattgcaacaatattggcaaaatatcgttgtactttatattttgatatactgtgaacaaaacaagtgccctatgagaccatcgtgatttatgcattttcaaactaaattttacgacacttcttgttgtgttttatgcttc

SEQ ID NO: 90754 - DNA, 190 bp, Zea mays
  unsure (1)..(190): unsure at all n locations
  Clone ID: MRT4577_182771C.1
aatanntttaacccatgctagacccatttgaatcggaaatatgttaaaggcgacaaccgcccacaagccaacagagaagcctcaaccaccccatcctcaaaacggagccgcacggcactagaacatgggaaacggagtgcgagaagctcccagggctaatgggccttacaactcgagtctaggggccagc

SEQ ID NO: 90755 - DNA, 604 bp, Zea mays
  Clone ID: MRT4577_182772C.1
gcagatcaacggaaccgatcatagagagagagagagcgaatagtcaatcatgaaccgcagacaagaaggaagcgtgcgctgaggcggtgagcatactgctgactctgcagctcatggcagctccaccgacggatcatggtcgtccgctcgccgcacggaacgtgccggatgactcacctcgccacgacgcccaaggtgacaatgctgtcgcgcacgctgcgttacacggggcagacatgcaaatacattggatgactcactcctgcttgctcctgcaactataaagatcgtctatgctacatcatatctactcctgtagcttgaggacattccccgaagccacaactcttacatgcatgcgcctgacgacaactacgctgcctctcgcgagcttctgatctagcgtactgcatgattcacggaatccaaggatgctttatagatttaatatgcgcattattaattatgcgagtcacgaaaccagagatagggagaccgttgtttaatatactgcttctgacgatgatatatcagacattatatgcttggatgagtgcgatgcatagaaatctagtatgctctgtcagcctgggatgctgctgaa

SEQ ID NO: 90756 - DNA, 518 bp, Zea mays
  Clone ID: MRT4577_182773C.1
aaaataaaaaagcttttacatattaagacacgtatcacaactggtgcaatatcgcccaggctaactgttagcgacccaataccaatgaatgatctataaatacaaattatcatccttactggcccggggaaacaagtctgccttgagctcttgaattgtgctcccacccgccggccaaagctgctcctccgctggccttggcataactctccatccttgcttctaactcgggtctgaaatggcgaatgaggccctgtatcggccaagcaaaagcctcgccgagagcacagatggtgtgaccctcaacctgtttggtgagctcttgaagcatatcgatctctctctctcgtccctggcccttctcaaacctgctcatgatctgctcagtccacttgctaccttcacggcacggtgtgcactggccacagctctcatgtcggtagaaatggctcaagcggctaatggcgcgcacaacgtcggtgctcttatccatgacaatgactgctgccgtgcccaaa

SEQ ID NO: 90757 - DNA, 162 bp, Zea mays
  Clone ID: MRT4577_182774C.1
gcgccaacgggtccgtccactcgtcggcccacccttccgtgggtctacaacgccaccgcaatgcctgttcgggggtgggctggctggctcgcaaactgtctgagcgactacacagctgatgacatccttactcaggtgatgtacgggctggctgggtccgag

SEQ ID NO: 90758 - DNA, 397 bp, Zea mays
  Clone ID: MRT4577_182775C.1
cataacacatttggcggacaaaccggaaaaaattatgcgagggccggactaacccttattttggattgcaaccggggaaatttaatttccaaccccgagggcaaattttacccataggcaaaaaaacagggttcaatttattcgggaggaccacatacaagatttgtacgggcgctcttcgtatacagagcattcaatattgtgcccatttcaaaagaatacacgggctatatcttggcatgggagtcggagcgcccatgacacccatatttatccttgtgtcggggcctgacacgggccctatgtcctctcccgccttcagcttttcccttgctgccgtgccctccgcgcttcctgttgttctctagccttcctctttgtttcagctccttcaaag

SEQ ID NO: 90759 - DNA, 1036 bp, Zea mays
  Clone ID: MRT4577_182776C.1
ttgggtaccccctcgaggggccgccccgcgtccggaaaaaaaaggccgtgcagagtgcaggtgaagatgatgaagaactaccctggtcctgctagcagcagtagtgttgctgtagaggtgaagaaggggtcatggagccccgaggaggacgccctgctgaccaggctggtggagcagcacgggccccaccgctggagcctcatcagcgccccaatccctggccgctccggcaagtcctgccgactccgctggtgcaaccagctcagccccgacgtgcaccaccgccctttcacgccgcacgaggacgcgctcatcctcgccgctcacgcccgctacggcaacaagtgggccaccatcgcgcgcctccttcccggccgcaccgacaactccatcaagaaccactggaactccaacctccggaggtgcaggcgccgagcggcggcggcggcggtggcctcccgaccgcaggtgcaggacagcgacgacgctcctgctgctgctgctgctcatgatgatcagccggcggctgtggttgctgctggtggtttaggtggtggcaacagcagcagcggtctgccgcctgcagcagcaggggccgcaactgccgaggccgagccgtctctgtccctcagccttggcctcccgctgccagcagcagaaccagctgaagccgcggctgacgacgagagccgcaacagccagggccaggcatcgccgttactggaggaaggagaaggaaacgcgcagctgttggcagtggtgcgccggatggtcagggaggaggtgcaacgccagacgggacagctcgcctactcgctcatggccgcagcagcagccagagccaagggacaccaccgttaatctgtgtgtgatccattgtgcatgctgctgctgctgctgcttcttggatttcccctcctttctccgatatgatcctctctgccaagtgtattttgttttccttcgtttcttgtactaccttcccttgtgttcgtttatgcgattgcgattggacttaaaacaaaaaaaaaaaaaa

SEQ ID NO: 90760 - DNA, 385 bp, Zea mays
  Clone ID: MRT4577_182777C.1
ccctctcgaaagactgcgcggccgcgaagccaaaccctagcctccgccccccctcgaatccgcatcgtcttcagcggggagggatgagcaggcgctggagcaggacgatctatgttggcaacctccctggggatatccgggagagggaggtggaggacctcttctacaagtatggccgtattgttgatattgacctgaaggttcctccaaggccgcctggctatgcttttgttgagtttgaagatcctcgtgacgccgaagatgcctgtgctggaagggatgggtacaactttgatggaaatcgtctaagagtggaacctgctcatggtgggagaggtagtggtggcccctctcatgatcgttctagcagctttggtggtggtgg

SEQ ID NO: 90761 - DNA, 290 bp, Zea mays
  Clone ID: MRT4577_182778C.1
gcaccctgctgcatccgcatgttggcgtacaccccctgtgtctctcgtggtgacaacagcgaccgtaggcggacacatacacgctaggtgccattgtccgtgggggccttgcgtggggactagctcctaccaggagacccagtggggcacataggaaggtgtccaaagggcgggcgagcccccccattggcgatgattatgctactacccacaaactcggcgttaatgccgttaggggccgcaacagtggggtactacgcgttcagctgtccagagccggtattcccggc

SEQ ID NO: 90762 - DNA, 504 bp, Zea mays
  Clone ID: MRT4577_182779C.1
atctgtccatcgctaatctcggagctcgcctaagccggatatccattgatcgtctgtacccatgagacgcagcgagcctccatgtgccaagacagcatcacgaagatctttgccctagccgtcgtgttcacagatataggagtgcactgatagtgcgctacactactacggtgcctgatacaattgaccaaccaacggtcaaccgctacagagacgatgcaatgttgcccaacgtcgcgatcgtctcgactacatcgcatcgacgacgatggcgataagatccgcatcttcaatgataagcaaatgagagcaatgtctagtgagtatctaagaatgagaacttcgactagaagtccagaacttcccggcaagaagacacgaatctcagccggccaagtctttgcacgactgaatatttacccactgagcattaattcgtgtgaaccagaatattgatagattgtacaacgcagtgtatcctgcgcttgccaccaccaatctaaa

SEQ ID NO: 90763 - DNA, 110 bp, Zea mays
  Clone ID: MRT4577_18277C.1
ctgacagtaggcagacgcgttggcgcgctgccaccgaccggtcaggcgacgccgctccaagaggaggtccatcaccgcaggcgttgcgtcccaggtctcggtggaggcag

SEQ ID NO: 90764 - DNA, 691 bp, Zea mays
  Clone ID: MRT4577_182780C.1
ggatgattgtggaacctgagcagcgagtccctgattttatcaaggcaggtgctgatattgttagtgtccactgtgaacagacatcgaccatccatttgcaccgaacagtcaatcagattaaaagtctaggagcaaaggcaggagttgttttgaatccagcgactccactcactgcaattgattacgttcttgatgagctttatcgagagtcaagtaaagaaaattgcagaactgagaaggttatgtgcagagaagggagtgaacccctggattgaggttgatggtggtgttggtccgaaaaatgcctacaaggttattgaagctggcgcaaatgccattgtcgcaggttctgcagtttttggggctccagactacgctgaagctatcaaaggaataaagaccagccaaagacctctagctgtagccgcataaagagctggacgtgtaatcatttactctgtgcaagtttaccagtgatgcgatctgtatagatgtgtgtcttgtccagctatacgtataccggagatgaaaggagacggaggcagtgaagaaatatcctttttttcttctcatttttcacgaggatgccgtgcactgctcccagaatgctgtgtccaatttacaaacgcacaggtggcacatgaactagcagagtagctctctcttgaaaggaaatgtatttggggtcgat

SEQ ID NO: 90765 - DNA, 275 bp, Zea mays
  Clone ID: MRT4577_182781C.1
ccagctggtaatcttattccgtttattgacgaactaagcttatcgtccagattatcggcatatgggggacaggactaacaccgatgggcgaaacaaaatgactgtgtgctaacatccagggtatccgacccccctatgcactatatgccgaaactaactaagcctgccaacttgcttttgatacctccaacggtagcctgcgccacggaccctaaaaacaaggagactagatccctaccggtgctacttcaagtggaggggtgttacgatcttgc

SEQ ID NO: 90766 - DNA, 1310 bp, Zea mays
  Clone ID: MRT4577_182782C.1
tgggaccctcgaggccggccgggcgggaaaaggttcgcgtagcagaactgctcgtgcaacaagcaaacaacccaagagccgggagagttggtgactgcgaggccgagacagaggggatagattgagagagccagagaggtgggcagatggcgacaccgtcgtcgtcgctttgctccagcttcgcctccctgcggaccgcctccatcggccacccccgcggcatcgcgtcatctacgcccaggaaggcgttccaagtgagggcatcagctcgggttgacaagttctcaaagagtgatatcattgtgtccccttcgattctgtctgcaaacttcgccaagcttggtgatcaggtaaaagccgtggaggtggcaggatgtgactggattcatgtcgatgtcatggacgggcgctttgtgccaaatatcacaattggacctttggttgttgatgctctgcgtcctgtgactgatcttccattggatgtacatctgatgattgtggaacctgagcagcgagtccctgattttatcaaggcaggtgctgatattgttagtgtccactgtgaacaaacatcgaccatccatttgcacagaacagtcaatcagattaaaagtctaggagcaaaggcaggagttgttttgaatccagcgactccactcactgcaattgattacattcttgatgttgttgacctggtgttgattatgtctgtgaatcctgggtttggtggccagagctttatcgagagtcaagtaaggaaaattgcagaattgagaaggttatgtgcagagaagggagtgaacccctggattgaggttgatggtggtgttggtccgaaaaatgcctacaaggttattgaagctggggcgaatgccatcgttgctggctctgcagttttcggggctccagactacgctgaagctatcaaaggaatcaagaccagccaaaggcctgcagctgtacacgcataaggaactggacgtgtgatcgtgctctgttcaggtttagcagtgttgggattcgtatagatagatgtgtcttgttttcgagccatacgttatactggagatgaaaggagacggaggaaatatttctctacgtgggtgaatcaatcatgtggacggtaatcacatgacgacaaagcatatggacgagcgctggctcacgagacagagtaatcaacgggagaggcttctagacagctctgcatgtccattccctctataaacaggagagcagttcagtctccattgtaaaggcccccagatatagaagaaagaaataaagagctctctatttgtctctgtttc

SEQ ID NO: 90767 - DNA, 230 bp, Zea mays
  Clone ID: MRT4577_182783C.1
gcacgcccgccgcaagactgtcacctacatggacgttgtctacgcgctcaagcgggagggccggaccctctacgggggcggcggctaggtcaccctctctcccggtggcgaattacatggtggtgatggcggccgtgttgtgttcttggactagctgcgtctgcgttgcctatatcggtgctgttttctgtggtggcgggctgcatcgttctagtgtctagctcatgtgc

SEQ ID NO: 90768 - DNA, 1769 bp, Zea mays
  unsure (1)..(1769): unsure at all n locations
  Clone ID: MRT4577_182784C.1
cattgggaccctcgaggccggccggggaaacccctcaactccgcgcccccccccggtctgcgcaaaagcgtccggaatcgcgcagcgcggaagggggaatcgctgcgatttcttgtggcccggcggctccagccccacggctgccgagcggataacgaacgactggcggcggctcgcgtcggccttcctcctctccttctcctctctcctcgcatcgcagtcgcagcaggcaacaaaccaaatcgcttaccgcccccgaagcgtctcggttcgcatagcagagctgctcttgcaacaagccaaacaacccagtggctgctagccgagacaggggatagattgagagagaggcgcgcagatggcgacgccgtcgtcgtcgctttgctccagcttcgcctccctgcggaccgcctccatcggccacccccgtggcatcgcctcctccacgcccaggaaggcattccatgtgagggcatcagctcgggttgacaagttctcaaagagtgacatcatcgtgtccccttcgattctgtctgcaaactttgcgaagcttggtgatcaggtaaaagctgtggaggtggcaggatgcgactggattcatgtcgatgtcatggacgggcgctttgtgccaaacatcacaattggacccttggttgttgatgctctgcgtccagtgactgatcttccgttggatgtacatctgatgattgtggaacctgagcagcgagtccccgattttatcaaggcaggtgctgatattgttagtgtccactgtgaacagacatcgaccatccatttgcaccgaacagtcaatcagattaaaagtctaggagcaaaggcaggagttgttttgaatccagcgactccactcactgcaattgattatgttcttgatgttgttgacctggtgctgattatgtctgtgaatcctgggtttggtggccagagctttatcgagagtcaagtaaagaaaattgcagaactgagaaggttatgtgcagagaagggagtgaacccctggattgaggttgatggtggtgttggtccgaaaaatgcctacaaggttattgaagctggcgcaaatgccattgtcgcaggttctgcagtttttggggctccagactacgctgaagctatcaaaggaataaagaccagccaaagacctctagctgtagccgcataaggagctggacgtgtaatcatttactctgtgcaagtttaccagtgatgcaatctgtatagatgtgtgtcttgtccagccatacgtataccggagatgaaaggagacggaggcagtgaagaaatatccttttttttcttctcatttttcacgaggatgcggtgcactgctcccagaatgctgtgtccaatttacaaacgcacaggtggcacatgaactagcagagtagctttatcttgaaaggaaactgtatttggggtcgatgaaccctctggtgttattcttcagactggtaaacgatgtaacatgtttgataatcaataaagtgcgtcgtatggctttcctaaaaaaaaaaaaaaaaaactcgagctcgtgcaaaaaaaaaaaaaaaagggcgaaactgagcagaagatttacaacggtgggccttgtaaggccccggccttacccacctttgcttgctttgcagcttccttttcttttgggtggcttgcgttcttttttttgggcgcccgttcttgtccttctttctttgnnntgccttgctgtttgcgactgggtcccttctgtacatgccccttttgccggt

SEQ ID NO: 90769 - DNA, 177 bp, Zea mays
  unsure (1)..(177): unsure at all n locations
  Clone ID: MRT4577_182785C.1
ttttcaaccgngcctcgcacaaatcctcttcctcgagttctcctcatccaattgcaggtcacagcggcgtaactctcggcgatgtctggccgcggcaagggcgggaagggtctgggcaatggcgccacctatggcgaccgcaaagcgctgcgtgacaacatccaggggatcaccaag

SEQ ID NO: 90770 - DNA, 1384 bp, Zea mays
  Clone ID: MRT4577_182786C.1
gggaccctcgaccggccgggatctaccaaacacacataccgaatccagccccgcacccaccgttgcgcccgccgcccgagtcgccgtggccgccgcggcagcgccctcccggccgtgagcgcggcccagcgcgcgcgccgcggccaccgccgccctcgaggcgcccagatctgggccctagcgcccccctccctcctataggcctttccccgctgcatcgccatggcgcggctactgctgtggtggacagcgctgctcctcccatccctcctcgccggcgttggtcccgccgccgccgccgccgcgtccccgccccacgatgcgtgcctggtgcctaccatcgcgcaatccgtccttaggactcccgacacgtgctcgacgctggatcgccgccttggcgacccggtcggcgtcatcgagggagatgaggtgacgttggcaagggcagttaatcttcttcacgcaaacaaggatgactacattgccgtactattctatgcctcgtggtgcccattctcacaggaatgcaaaccgaattttgagacactggcttacttattcccagctatccggcattttgcatttgaggaatctgcaattaggccaagcataatttcgagatacggcatccatggtttcccaacactctttctcttgaactcgaccatgagagtacgatatcatggaccaaggactgttaaatcacttgcagctttctacactgatgtctcaggtatcaatgcatcggtgaagtcaactgcaggggaggccatggtacatcccttggatgatattgagcataaaaaggacgctgaacaggaaaattgcccattctggtgggctcggtcaccagagaatatacttcagcaggaaattcggcacgaggtggcgaccgtatttgtaattttgaggttgctgtatcgtatttttccaaagatagattcctttaccagatgggcatggaggaggcacaatatgtttgcaaaattgatgggagcacatgaatatttcctcacctaccttgagcaagcaagacagaagtttcataggctatacccttcaagttcaaagcgaggaaatctgcaggagggcgcaatgaacgctaccgcttgggcttccaaatcattagcatcagtttcaattggagaaccaagtgcaattggaaggacaaactctacaagtgagctaagatgaaatctgatcttttttgtccccagggattatatgtacagtacagtagagcgatcaggatatgaacacccagaaactgttgtaacggctatattactctttgtatcctccttagaataaatacatccatgatttggctccttaaaaaaaaaaaaaaaaaaaaaaaaaactcgagaaagggcgccggtacccc

SEQ ID NO: 90771 - DNA, 315 bp, Zea mays
  Clone ID: MRT4577_182787C.1
atccattcgacgggtacagcgtagacagtgacccacataggctcctgctgatcgaggtcttcatgtgcgcttcaacagcgaccattatccactagtgcgggttggattctgatgatagctaggttggggagcatcggatcatgtccagcgcggagttgaacgtgtctgccggctccggccgcagcatcatggggcagatcatcacactacttctgtgcaaaccgcgaacacgaggtagcagacggagaggtcagcgatgaacaggaaggccaggagcggctgcagcgccagctgagcctctaccatgtaccagat

SEQ ID NO: 90772 - DNA, 320 bp, Zea mays
  unsure (1)..(320): unsure at all n locations
  Clone ID: MRT4577_182788C.1
gaccacacaattncttaatcctattacacttcttacttcaacacacatataaataaacattttcatccctcccccaacggttcttttctccatacctacccaaaccaccaagaataccttaataaacttacacaacatacccaaccccccaaccattcttctgactccacttgaacaaattctcccaccatcctttcttctaacttctaaaccaaacaacactccttttttctacccaccaaatcaacaccagtccccacatttattaacttaccttccttaacccctcctttgcccacaccgccctctttttaccccac

SEQ ID NO: 90773 - DNA, 627 bp, Zea mays
  Clone ID: MRT4577_182789C.1
gtgcggccgcttcgaggccggccgggccgtttatacctgggcaaccactacacgacgagggaaatgaggcgaacggcggcgttgctatcgacccacggcggccgcagcatcccgtgggcgctcgccgacgtgctcgtctgcccactctctaagcagcctcttaggtactgcgaggtcaacgggtctttggtcagcgacgccgctggggtggcctttccggtacttgatgggattccttctcttgtaccaaaagatggaaagttactcgacgaccaagaagtgaaatcagaacaagagcccagcactagggattcttctggttgaatccttgtctatgcaacatctaattgaagcaatatgttgtagtaaatcgacggtaataaaaccaagtgcttcttgtcggaaatcgtcaccatattgccctagaggatgaggtgcaccgtttctgttgagaaggctaatatggttgtcttgaaagacaacaatgaaattggcaaacatagtttctgctttattttcttttactggaataactattctattcatatactgcatctgatagtacaaaataatagttggactcataattcaaaaaaaaaaaaaaaaaaggcctaggtcctattttag

SEQ ID NO: 90774 - DNA, 132 bp, Zea mays
  Clone ID: MRT4577_182790C.1
tctggctggtgcttgctggatgaccatgtatcccctaaggcaggggcatgaaagtgagcgaatagcacttgtttcatagaccacgcaaacggcactgtcaatcttaaaatccgagcatactcctttgtatga

SEQ ID NO: 90775 - DNA, 941 bp, Zea mays
  Clone ID: MRT4577_182791C.1
ggcaaatcgatgatccttttgaatatctgctttcacaacggaacaaacatgtcctacatatgtacatatccagccagctcgataccaaattcagaattgcgaacaaactaatctggaagaaggctaatacaatgcgctactagactatagtaacaataaaattgtatgctactaaagtccgccaggtaaggggaaaaaaagaggaaaggccaagaaagaacaagggcttccatttatctgttatatgaattattattagcagcgccactcatcaaggtcaaaatcatcatcagatccacaatcaagaaacaagccagtagacttgcgaaagacgataaatgacttgccatcctggttcacccttctgacagaatgttccgcatgtgttaccttctctgagattgtttcgtcaagttccgataatgtgttggtctcctgcttcatatgatgttcgtacttctcaagcaatttcttcttttcaacttcaacttttgacaacaggtctctgaaagtctgcatgtgagcatccttttctttacagaacgtatcatatgtttcctgaaacttgctgtactcttcgttcactgaactctcacactgctctttggaagtgttagacagtacttttagcaaattctgtctttcctcctcaaatttcagctgggtttcttctagcatagtctgaatatctgctgccacactggcaatgacctgctcacagatcttctgcccgtccttgttggccccacccttgataagccgcagcaggcacacgatctccctgaggtcactgaccaggtccccgtcagagtcagaaccagagtcgccgccggaggaggcgacgttagagtggcggggccgcttagccggactaggagtgccggacgacgctgccatccgtcctcccctgctgcgatgagtcgtcgtcgtcgccgtcgctg

SEQ ID NO: 90776 - DNA, 266 bp, Zea mays
  Clone ID: MRT4577_182792C.1
gcacttaccactgatgcaaattctgactataagcacgatcaggatctacaggaggcggtgtctgttcacaaggtagacaataacctaaacaataaacctcggaaggaacttaagaaaatttatctgtgctagaaatgcacacaccactcatccaaggaagataaagccttcaccttctactaaacaatcataaaccacactaatcaaacatgtaactgccttaactaacggatactactgtcacacctgcatacattaccttttaa

SEQ ID NO: 90777 - DNA, 349 bp, Zea mays
  Clone ID: MRT4577_182793C.1
gctcttttatttgctgggaagatccaaacatcatacgaaaaacatctttattgaagcatatctcatatgcagtgtaaaagagggcgccaccattgagggggtgttggtggaacgctgttggggttgtcaacagcaaggtggttgattggcggtaattgttgcagatgtaatagggtgccagcgttaggcgcagcgtgcgagtagaacgacgacaactgttgctgtgtcactaaggcagcagggctcacatcagctagctggctgaatggtggtagctgctgttgttgaaataagcagcagatttcaatgctgtcagttggttgaatggaagtaattgctggtggtaggc

SEQ ID NO: 90778 - DNA, 248 bp, Zea mays
  Clone ID: MRT4577_182794C.1
tcaagcggccgggggggggggtgacaagctttttttttctttttcattctttttctattaggtgtgatcagtacacggcgtccgaaccttgcttcacacagaaccgggttgccttctgatgcatatggtccgaccatacttggtttctcttttcacatctggggggtgcgggggggatcctttcctgttcactctctccacggggggcggggtggggatgtctatcgccctcacccggggttgtctct

SEQ ID NO: 90779 - DNA, 378 bp, Zea mays
  Clone ID: MRT4577_182795C.1
gcccttgtttttttttttttttttttttttttttttttgtttttttttttttttttttttttttttttttttgcaaccccggagtcccccagggtttttattcaccaaactacgggcaccaacccaatactaaaaggatgctattttatcgaggggggggggggggggtccttaccaacaaaaggcagcgtccacgggtgtttcctagtagcatcaccagactggaagctcgggtcaacagagcaaaacaccgttttcaaagtttcccctcaccaggttggcagggttccttttttttttcctttttaagggggtgaagccttcttccctgcggggccccccccgggggtttcttggtccgaccgggtgggtgttttt

SEQ ID NO: 90780 - DNA, 737 bp, Zea mays
  unsure (1)..(737): unsure at all n locations
  Clone ID: MRT4577_182796C.1
cccctcctccacttgaagcgttcgtgccggcgtgtggaaggaggacacgaaggcgactctggggacgacggcctgtgcggcccggcgtagtcttcctagccccggcaaccggctcagaggttcggttcgagcagagatcgtcgaagcggagacctagagtcgaagcgacccaaatcgccgtcgggccttcgtcttggcggacgatggactcaagattcgtcagggccagaggaggacgccagcaccagatccagcaagacctaactcagaggaaggagcgatcaagcgcagccgtcagatagacgacgacgaggacgagtctgcgtcttcgcctactcccccgccgaacgtgggtgccggcgcgctatgggtggcaacattttggcaggctgtagcatagcagtggcggaggaccacatctgggagatgcgaagtggagcacgctgcgccactcaacatcgagatccgcttcttgggtcggccattcgacagcgccgcgcctggtagacccgggcaacagcattgtgcttcgtggtgctatagtggccgctggagacccgtcgacggngagccccccatgaccctctatcggctccaccgatgccatgagagcgcaagaaggctgacccctatgactgcgaggagggccatggtggcgagctgctaggcctcctatgatagtgcgacgtgcagtccttcgtccaccccggcgagaacgccatggggcaacatggatg

SEQ ID NO: 90781 - DNA, 397 bp, Zea mays
  Clone ID: MRT4577_182797C.1
cagctctggtatgtatccatcaatggcgtagcgtgttgctcaccatcgtctccctccatggtctccatgcaggcgcgtacgacgacgaggacgcagcggcgcgcgcgtatgacttggcggcattgaagtactggggccccgacaccatcctcaacttcccggcgtctgcatatgaagcggagttgaaagaaatggaggggcagtccagggaagagtatattgggtccttaaggaggaaaagcagtgggttctcgagaggtgtttccaaatatcgaggtgtcgcgaggcatcaccacaacgggagatgggaagcgaggattggtcgcgtctttggaaacaagtatctctacctcgggacttacgggacgcaggaggaggcggcgatggcgtacgacat

SEQ ID NO: 90782 - DNA, 464 bp, Zea mays
  unsure (1)..(464): unsure at all n locations
  Clone ID: MRT4577_182798C.1
gcgacgcgagcctccttcccctttccgttccccgaagcgagacanacgcagcgcccatctkcttcttcctcctcctttttktkggatcgcagctccbtcgtcgtagcgtccgamacgccaggvttcctttcgcgagcaacaatctytggcaatggcgtccacgtcgagctcgacgccagcgccggttgaggkggacgagaggsgccggaagcsgaagckttgccgccggggcggaccccgcggcgccggcgcasttccaagttgcggacgcggcgcgagcacsarawcyactcgtccaagcycctggaggcgatccgcctcgtgcgcvcsgggcccccctccgcctccgccgccgccggggccaacggcggcggccccgccgcgcagcaggrccgtwcsccamgcggcccccccgcvcgcccgccgtcgcgcgcgcgcgggcgcacgcacttggagccgcgcca

SEQ ID NO: 90783 - DNA, 837 bp, Zea mays
  Clone ID: MRT4577_182799C.1
ggttctcctgcctctgcctggttcgccaccaccgccgccacccaccccctcatcctcttcctccgctctctgcagctgccgctcatctcggtgggaggccctcaggcgggcaggttcccctagatccccggagtcactcaatcaaatggctgacggtgaggacatccagccccttgtctgcgacaatggaactggcatggtcaaggctggttttgcaggggatgatgcacccagggccgtcttcccaagtatcgttgggcgcccccgccacactggtgtgatggtggggatggggcagaaagatgcatatgttggtgacgaggcccaatccaagaggggtatcctcaccttgaagtacccgatcgagcatggtatcgtcagcaactgggacgacatggagaagatctggcatcacactttctacaacgagctccgtgttgcacctgaggagcacccagtactgctgactgaggcgcccctgaaccccaaggctaacagggagaagatgacacaaatcatgtttgagaccttcaatgttccagccatgtatgtggccatccaggctgtgctttccctatatgctagtggacgcacaacaggtatcgtgttggattctggtgatggtgtcagccatactgtgccaatctatgaaggatatgcccttccacatgccatccttcgtcttgacctcgctgggcgcgacctaactgactgtttgatgaagattcttacggagagaggttactccttcacaccaccgccgaacgggaaattgtaagggacatcaaggagaagctcgcatatgtggctcttgactatgaacaagagctggaaatg

SEQ ID NO: 90784 - DNA, 1053 bp, Zea mays
  Clone ID: MRT4577_18279C.1
ccacgcgtccgggctgcgtctgacctccttgcttttcgagagtccactgcgttcgattcctagtttcccacggcagggcagcctcatcggatcccatgagccggcccacgggcgcgtggcgactagggatggcaacgtgtacaataccagcagcaccgcgtgcgcatgtgggccgcctccccggcattcggcaggcagctcgtcctgctctactgcttccttccttctcctcctccactctcctctgtcaccggcttccccccatcctgcccctcgtgctccagctcctccgggtccgggccaaccacgcgatggcggcgtccgccgggacggtgtacgaggcggacgcggaggccgtcgtgcgccggatcacgccggcactcgaccgcgccagacacaagggccaggcagggaagatagcagtaatcggaggatgtcgtgagtacactggagctccttattttgccgctatctctgccttgaaagttggtgcagatctttcacatgttttctgcacgaaagatgctgctacagtaattaagagctatagcccttgacctaatggacaatcaatattagaagaatcttacagtgtaaggttgatgaacgagcatctgtttcttctaagattcttacggaagttgcaaagtcatttattacattgccctttgcaacaactcccaatgcattggtccaatattcatattgaatctacaagaatagttgtgattatgatagagtttatagtaatctagctacttcaactcctccaaggactgttgcatccattagctaagagttactgggaagagcagtggagaaacctacataagggcatgtacagtggtgtttaatgtgggggctcttaaggtgttttagggggttatttgtaaaaaaatcttagagccgtctctccgtgaagagacgcctctggctcgtaaaccaagtaacaacagacgtctcacttcccactgtacgaatttgtcgtctgttctatcgatctgatgctatacaagatacatttaattctgtatttattaatagactacgttt

SEQ ID NO: 90785 - DNA, 389 bp, Zea mays
  Clone ID: MRT4577_1827C.1
gggaaataggattgcgggggatatagtatactggggagtcggcagaatcgtgacgacaacaacagagaagcctgacaataatatacatggaggcagcggggctgcctcactacacgactagacacactatgaggaacggtgcagaggagtctgaaaggcgaagcactagaacgatgagatggcatggctgaactagatgcacaaccaatcgtgggagctcttgtgaggatggattctgttgctcttctgcttgccgcccggtggtgttggttcctggcggccttcctggatcatgatgtcatcaacaagctgatgcgtgtgatgacgattgggaggttctagatgagctgatgatcacttaccgacagcagagggcagtaccggggggc

SEQ ID NO: 90786 - DNA, 658 bp, Zea mays
  Clone ID: MRT4577_182800C.1
acccaaggcattgatggtttaatgtctccatcaacaaggcgaagaactttaactaatggctcccggccgggccgggaaagagaacaccattccaaaaggttggcttcaccaatgtggctgtggctgttacacctttagcacttttcttcacatgactaattttacaccattcctcactttgggacatcatccttagctgctctttcttctcatacaagctttgtaaagtgagaaaagcggaggcaaatcttgtcacacctggcctaataatatctcttttctttgtgaacttcctcattagagacaaagtgctgtggtgtgcataaataaatatggtcaatccttttgctgaatcaattacattcttgaaccttttcatctttccaattccttcaagcattaggttaattgtatgggttgcacaggaagtccaaataggttgggtctcttgacataaagcaaatcctttgctgccatattatttgatgcattatctgtgaccacttgcacaagatggtccttaccagcatccaatttctcaataaagttatccacaaactgaaaaatcatttcccccgtgtgtgactcagctgaaacctcttttgactcaacaaaatatgtaccgatggcagaattgatacatatgttcattatgctc

SEQ ID NO: 90787 - DNA, 920 bp, Zea mays
  Clone ID: MRT4577_182801C.1
gggtcctgcggggtcctcctctttgtgctcgtggctggttctcttcctctctacgcaagagcttgattgacttgtataagaagcgtgacagtgcagatttcagactgcccgacctggttttctactcatgttcggaggcttttgctaaggattcttgatcctacctcctggtacaaggatctcaatagaaaaaatcatggagaatccctagtttaggcagggcttattagatcctgcaaacctactacttagatataatttaaagactaatgatgcccctcaagtggacatggacaagaatgaagattttgatccaccgagcaccaacataacaacagagagcaagcaagaagacgaaaagaagcctaccaacatgaatgcatttgatataatatctcatctatcaagtggtttggatctctcaggtttattccaagaatctgacaagaaaacagaatctaaattcacttctaccaacacaagctcggcaatcatatcaaagattgaggatattgccaaggatttgcgactgaagttgactaaaaaggatggtggtttgttaaagatggaagcttcaaagcctggaaggaaaggggtgatgcgtatcgatgctgagatatttgaagttagcccaaacttccatctcgtggagatcaaaaagactaatggtgacactctagagtatcaaaaggtcatgcaccaagaaatgaggcctgcacttaaggacatagtatgggcttggcaaggtgagcaattaaagcagcagcaggaacaacaacaatagtcgtgttaaaaactatgagatagtgtataacgttttttaggcagattccaatattacatgcatttgtgtagttctcacttcataaaaaaaaaaaaaaacccttgcaaaaaaaaaaaaaaaaaaggcccctagggcc

SEQ ID NO: 90788 - DNA, 774 bp, Zea mays
  Clone ID: MRT4577_182802C.1
ttgggtacctcgaggccggccgggaagcgaccttcgaaatcagccggccaccaacaccgtcgaactgacaagatgaagttgaacatctcctacccggccaacggctctcagaagctcatcgatatcgaggatgagcgcaagctccgcgtcttcatggaccgccgcatgggtcaggaagtccccggcgactccgttggcgacgagttcaagggctacgtcttcaagatcaccggcggcaacgacaagcagggcttccccatgaagcagggtgtcatgcaccctacccgtgtgcgcctgctcctcgccgacggccactcctgctaccgccctcgccgcactggtgagcgcaagcgcaagtccgtccgtggctgcatcgtcgccgccgaccttgctgtccttgccctctccatcgtcaagcagggcgacgccgagctccccggccttaccgacaccgtccaccccaagcgtcttggtcccaagcgtgccaccaagatccgcaagttcttcggtctcagcaaggaagacgatgtccgcaagttcgtcattcgccgtgaggtccagcccaaggctgagggtgccaagccctacaccaaggctcctcgcatccagcgtctcgtcactccccagcgtctccagcacaagcgccacaggatcgcactcaagcgccgccaggccgaagcctccaaggacgctgccaacgagtacgcccagctcatgcacaagcgtgtccacgaggagaaggccaagaaggagagatccgcaagcgccgcgcct

SEQ ID NO: 90789 - DNA, 583 bp, Zea mays
  unsure (1)..(583): unsure at all n locations
  Clone ID: MRT4577_182803C.1
acaccaccggccgcagagcctccgccggctcgtacagcttcctgcggcgcggcccgcacaactccattagcacgggtgagagggtgctcttggttgcgcgcaagggtccaccacgtctggtatgtggacgccgacgcagaggcgcctcatgtggcatagcaataggcctcttgaaggacaagcaagcactaggtatcctacgcatagagagaggctcatctcacacttacaggaaaagatattaccaaacaaattggtgcatgcaggctaatgacaagggtctgcttaaagacatcaaaccattgggagctagttacttatatccatagaggtgcctctgacagaagagntatctctctgcatctaatatgcgtcaccatatcacgtagaatccatgcacctctatggaccaagagtctgtgctgatacaatatatcttcatctgtgacctaaatgctctacactctaagctactgtgtcagctgttcttacgaagcaaatactactacattctcaaattgaccattcaggtcaacatgctcaacaaggcactatataactgctaacccaggtagcataaact

SEQ ID NO: 90790 - DNA, 423 bp, Zea mays
  Clone ID: MRT4577_182804C.1
tcgaagccggccgggacctctcccccctcccgtccgccccgtcccggatttccatcctctcctcagtctctgcggcggtgcttcccctgccccccgagccgctatgaatgttgaacagctctacaagatgtcacgcgctgagcgcactggggggaaggggagcatgcgcaggaagaagcaggcacaccacaccactacgaccacacatgataaaaggctacacagcaccctgaaaaccatccgactgcaccccattcctggcactgcagaggtccacatcaccaaggatgaatgctgctactcacattgcgaatcctacagcgcaagctccaatcgccgctaccacctggctggccagcggaactccacagacaaaacaacctgcaacacctgccctccgccccttatcacccacctcggccc

SEQ ID NO: 90791 - DNA, 361 bp, Zea mays
  Clone ID: MRT4577_182805C.1
tgcagagcgcacactgttggatgtttggattctgtccgtttttaaaattaagggcgcaattacaaggaactatcgtggagttgctcatagtaacatccaggactttagcagcctccacccttgaacaatttgcagctaattagtaatagtcaggactttagcagccgccctcccctcacccttatgtatcaggctatcagcttgcttgcaatacaatacgaagaggagcagagcagcaggtctctccatggatgcaagccaggatttgtgggactgggactgggaggtggtcctgccagatcacaggagcttctccctgagcaatggcgttaagaatcttgatgataaagaaacagaaact

SEQ ID NO: 90792 - DNA, 272 bp, Zea mays
  Clone ID: MRT4577_182806C.1
atatggacggagatttgaggacaaagaccaatgggcacggtattacccaggtccatatacaatactgtgtgccccatatgaaaatccaccgggcttcataccaaaaaattccctgactgggacgctaacatatccagaggacttgtaacctatctaacatcactgcttcaaaaagtctacaaaccgcatcatgtctaggcgatattccaccaaaacatagggacatccgaacgaacagaatatctggcaaggaccggtcctgcgcaagaact

SEQ ID NO: 90793 - DNA, 180 bp, Zea mays
  Clone ID: MRT4577_182807C.1
atattactatacggaaaaaaagaggagtacatgcatattatgtattttctgctgggagtaaaaggtgttgtaaaaccatggaactgaaaagtacgagcaagccagaatatggtatcgttcaatgcagattgccatgctatagctcagcacgtttctttaacttccacggtggctgggtag

SEQ ID NO: 90794 - DNA, 523 bp, Zea mays
  Clone ID: MRT4577_182808C.1
gaaaaaaacccgagctgtaggcactatcacaatccgagaggggaggcgggttctccctgtcgatggttgacacgcgtgggcagttgcacattcttcagaccctgacataccggtcgatatcccggggaaaacaatttttttttgcacaaacgcatgacttttggggggggggcggtatgttgtacgtccttacaggctaggcgtcctctgggaggagccggcgatgacggactagcaggctgatgccgaaggggtcgctgaggcgcttggacaggttcgccgcggggccttccccggtgacgtaggcctggatgaagaaggggaacatggagaacatgggcagccggccgttcttgatcggcttcaccttgaggacggcggtctggatcgggaaggtgaccaggcccaggggggcgaagggcccaccggggagcagcttgtccttgaggtccagcgcgttggtgatccggtggtgctcggcgccgccgacgaggatgacctcctcgagcacgggcaccaccag

SEQ ID NO: 90795 - DNA, 159 bp, Zea mays
  Clone ID: MRT4577_182809C.1
cccacgcgtccgcccacgcgtccgcccacgcgtgcgcggacgcgtgggcaaaaccataacgagggtgcccgtcctgctagccggtgtgcttgctgtgcgatcgtttggcatgtgcttgttgaggggttgctaggggattggagaggattgaagggatta

SEQ ID NO: 90796 - DNA, 1995 bp, Zea mays
  Clone ID: MRT4577_18280C.1
ttggacgactcggtgccggccgggtgcggacacatgagccggcccacgggcgcgtgccttcacgcgtggcgactagggatggcaacgtgtacaataccagcagcagccgcaccgcgtgcgcatgtgggccgccacctccccggaattcggcaggcagctcgtcctgctctactgcttccttccttctcctcctcctcctccaccactctcctctgtcaccggcttccccccatcctgcccctcgtgctccagctcctccgggtccgggccaaccacgcgatggcggcgtccgccgggacggtgtacgaggcggacgcggaggccgtcgtgcgccggatcacgccggcactcgaccgcgccagacacaagggccaggcagggaagatagcagtaatcggaggatgtcgtgagtacactggagctccttattttgccgctatctctgccttgaaagttggtgcagatctttcacatgttttctgcacgaaagatgctgctacagtaattaagagctatagccctgaactaattgtacatccaatattagaagaatcttacagtgtaagggttgatgaacgagcatctgtttcttctaagattcttacggaagttgcaaagtggatggagcgctttgattgcattgttgttggtcctggccttggaagggacccctttcttctggaatgtgtgagtaatatcatgaggcacgcacgacaggctaatattccaactgttgtggatggggatggcctatttcttgtaaacaataaccttaatcttgttgaaggaaaccctcttgccattttaacaccaaatgtctatgagtacaagcgtcttgttcagaaggttcttaactgtgacgtagatgaggaaagtgcttctgagcagctaatcgcactttgccaaaaaattggtgatgtaacaataatgcagaaaggaaaagctgatgtcatcagtgacggtaaaacagttacacaagtgagtacttttggttccccaagacggtgtggtggtcaaggtgacatcctttctggaagtgtggcagtatttgcatcatgggcacgacactttgtcttgacaaacgaagaacctacagagaaaagagttaatcctatgacccttgggtgcatagctgcctcccttctactccggaaagctgcgtcacatgcttttgagaagaacaagagatcgactgtcacctctgatatcattgagttcttgggcaaaagcttggaagatatctgccctgccgagcactagctcctgccagtaattgtagtcatgcacgcggaagcataataatgtttatatgtctgttgaacagggtgttaccatgcctaattctaatgttgcccagtgatgttgagaactgtgcagtagaagcgtaatgtacaatggtgtttaatgtgggggctcttaaagtgttttagggagttatttgtaaaaaaaatcttagagccgtctctccgtgaagagacgcctctggctcgtaaaccaattaacaacagacgcttcacttcccactgtaaaaataaatagtaagtaataacgaaatgatactagacaaatacatttaattctgtatttattaatagactacgtttagagacactccattgtacaatagagtctcttagttgtctcctatgcttggagaaccgttttggcgtctctccactgtacatgcccttagagttgaagtgtcgctgctggccggtagctaggtctaggacctttccttttcaaggaagctaagggagagagagaaaaaaaatcaaacacatgtacaaaatatgatctagccataaagctgctagtactattattcccatattaggccaattcaagatagacacatatattcaacagccggcctatacgggggagaaaaaaaattcgcgcatcccattaacttcactgaaatcgacgggcgacaggcggactctagctagaatccaaggaaataaagcgggcgacgacgagagctacactgac

SEQ ID NO: 90797 - DNA, 504 bp, Zea mays
  Clone ID: MRT4577_182810C.1
ggccagtgccgctacacaccagagcacgcgcgcgcccgcacgtccagcgccacgggagcacgagacacggctaaccacaccgagggcagcctcacttactgccgccgccgtcgtcgccgctcgccgcgcacgctccgacgaggcggacgagcgaatggactggtacgcgtggctctgcagggcggggctgcacccggacgtggcgttcgagtacgcgctgctcttcgcgcgcaacgagctcggcgccacagacgtgcgccacctggaccacgacttcctcctcagcatgggcgttgccgtcgccaagcaccgcctcgagatcctcaagctcgcaaggaaggagacgtcctcccacggcagggccgccgccatcaccgtcctgccgtggcgtgccaccaggctgctcgccgcggccgtgcaccggtccgcaagctcggcgctcggccgcctccgcgcctcggtgtcacgcggccaggaccgggaccgggaccgggccagggcggc

SEQ ID NO: 90798 - DNA, 773 bp, Zea mays
  Clone ID: MRT4577_182811C.1
aatctctacctgaaaccctaagcatcctctttgctcagtcatcacgatcaatttttttttttgcggggaagcaaaccagtttccgttccatgccaatagagaaacccagcagatgacaagagcatcagaacagaagcacatccgcctccgttcgacagcaaaaaagaatcatccctgcttcacgacgaatgcctaactctgcaaagactgcattgattccagggtgcctagtaactacaacaggaggagggcgctgaagagcagcgcggcggagacgatgcggacgagtgacgagacgtcgccgaacgcccggtgcgcgccggagcctccctccgtggagttcgacgacggcgccagcgaggtgccgttcatcaacgacgtcccgttcttcccaccataaacacaagatccgtggctcgggtcggtcgtcgtgacgaccgcgacgccgctgaagtagcacgtcccggagcccattcccatgccgtggtagtaggcgttgaaggcgtacgtggcgtgcgcctccacggtgtccgggtcgtagcacggctggccctgcatcagcacggagcagtccaccttcccggggccgcacgcccagtccagcgccgcctgcaacatcttggggtccgcgccctccgcgcacgcgcagtatgtctggttcgtcgtgtcgttggccagcaggacgccggagcccgtcaggtgcagggtgtaggcagggacgccgttcatgtcgaacaggccccagtacttctccgacgtggagcccggctcgt

SEQ ID NO: 90799 - DNA, 492 bp, Zea mays
  Clone ID: MRT4577_182812C.1
cgtccctcaccttcctccttctcccagctgcggcgccaccctcggcctcgggccgtccgccgtcggcggccacgaccctggtgtaatctgctccatacgtggcggcgcctgcaaaagccacgctgctgccagtgccagccatggatgcagtggcggccagcgacgccgtactcctccttgccgccgtagctatctccctgctcatcactgccactttctggagcaggcatcgtcgtcagggcgaagcgccgagcccgccgtcgctaccgctgctgggccacctccaccagctcggcaacggcaagccgctgcaccactcgctggcggcgctggccatcgcgcgcggcaccgggggcgcccccggcgccgctcctgtcgctgcgcctgggcgcgcggcgcgcgctgatggtgtcggagcacgccgcggccgaggagtgcttcacggcgcacgacgcccggcttggcgggcggccgcggttgctggtccgggac

SEQ ID NO: 90800 - DNA, 294 bp, Zea mays
  unsure (1)..(294): unsure at all n locations
  Clone ID: MRT4577_182813C.1
tcggctacgtcccacgctcaaaaagcacgaagcgctttcctagccggcgggcagcgctcctcacctctcccncctcacccatcgtccccccgttcccggctaaaccctgcttgagccctagacaccgcccgcctcctttttttttagagcatgcacgccagattcctcagctcgccgtcccctgcctccgccgccccctccccgtacgttcgcttggccttcacggtcgcccgcccgcgcctcgcgtgttgtaagcctcgaggcccctcttccgcgccggcggctggccctctc

SEQ ID NO: 90801 - DNA, 377 bp, Zea mays
  Clone ID: MRT4577_182814C.1
ggccgggccgcgagtgcaaaatgggcgactcacaacgggttccccacgaggccatacaagcgcatactacacagaaacatataccaccgagcttgcttgccgcctcacgagctacagcgagctacgccgaggagaattatccctggggccgcgcgctaactagctagctagctaactccaaggtcgcagacggccatggcgaagccgcaggaggtccgcagcgtcgactccttctcgcagctgccgttcatccggccggcgccggcgccgagggacgccaccatccgcttgcttgaccgagagatgcccagcgaccacacccaccaccagcagcagcaggattttttgtccacccccccccccgctggcaacaacgg

SEQ ID NO: 90802 - DNA, 467 bp, Zea mays
  Clone ID: MRT4577_182815C.1
gaagttttcaacagattcgtcggagaatcttcgaatcaacggcggagaaatggctcgatcgcgcctctcatcacgatccaacatcatcactcgtcccttctccgccggcttcagccgattaatctcaacggacacaactccgatcacaatcgagacttcgcttcctttcacagctcacttatgtgatccaccgtcacgctccgtcgaatcatcgagtcaagagcttctcgatttcttcagaaccatggcgttgatgcgacgtatggaaatcgcagccgattcgctttacaaagcgaagctaatccgagggttttgtcatctctacgacggccaagaagctgtagctataggcatggaagctgcgattacaaagaaagacgcgattattactgcttatcgtgatcactgtattttcttaggtcgtggtggttcgcttcatgaggttttctcagagcttatgggaagac

SEQ ID NO: 90803 - DNA, 1513 bp, Zea mays
  Clone ID: MRT4577_182816C.1
ccggccgggttcttttcccgcgagttgttaatcccttcgccgtactcagctaccgccgccgccgccgccgccgcgtgagttgagagaacgagagccaagaagccagggagggacttgagcttcacttgggaagggctagtactgctcccgcccccgccacggccgtctggctgtctgttgcgcgactgcgccagcctggcggctctgccccgggctgctggcgccgccattgctttcccttggagccgctggcagctaaactggtgccctcggccgcctttgtgcgttcctcgccactgcgcccggggtagctgaggtctgaagacggaggtgtcgcccgcctcacggctcctgcaccacggtttttctttctcgcatcgccagagcaacgactgccccccgccgttggtcagtcctgcgagctctagatagttacaaacatttgtcctgtgctcaaaatggaggctaatggagcagtggatctggaggttgacattatcggcccaggtgctgctggtagcaagttaacctcggttgacgaccctgacgccacagagtgttcaagttcttttggggacactctgtcaggttcggaggatggtgcaagaccttcagagattagcgacattgaggtggactcgccgttctgccgctacccttctaattgtgatgctgctgctctactggatgcagctgcttcagacaattcggatagactattgaagaagaaaaagtgactgatcattggagaaagtatgtaagcccactaatgtggagatgccaatggttagaactgcggatgaaggatttgcaatcgcaagtgtctaaatatgacaaggagcttgcagtactcaagcatgagaaggagctgcagacaaaaatgattgaattggattgttcctcctcacgatctgtaccattctcctctctttgctgcagaaagactatgaagcgaaggaggagaaaaagaaatgaagataaaattgacacttcatcatatatctctaatcatactgcattatcttattttgaaaaaatggaagcagatggtcattctattgaagacaatgccaacctagtcgatgacaacacaaaagcaaataatgatgctgattggctacttggtattgaaggaggtgataccactgttgagcagattcttttaagcattcaagctgctcaagacagggtattcagtctgagatcaaatctcaagcaagcaatggctaggaagaataagggaataacccttaaaattaacacatccgtcattggtacacacagctcaaattgctcaccaggaaagggcaaagttgctggactgcatgagagatctccccaggacacatcagaatgtgatatggatgattctggcatgcctgatagtgctctctcaagctatggagaagctagcaacatggatatttttgagagcaccatgagcctattgtctgaaggcccacatcagatgggagaaatccatgaaagttcttaacatgtattgattgacaac

SEQ ID NO: 90804 - DNA, 478 bp, Zea mays
  unsure (1)..(478): unsure at all n locations
  Clone ID: MRT4577_182817C.1
aatcgctgaccctgagaaacagatgaccgatgatgaaaagaagatttacggaaaggtggacatggcacgaatcaaatacatgcgtcttgttcatagattggggtatgatactaaccatcaggtaccagtacaagtgttgtttcagcttagtcttgttgaaagtttcaggtgcgtaaggatgacaaaccattcctcagagatcgagaatgcctggaagagggctttgcagcgtgaggcagagggaactgagaaccttgaattctcctgcaatgttttggtccttgggaagactggagttgggaaaagtgcaacaataaattccatcttcggggaagataaatccaaaacaaatgcttttctaccggcaacatcatctgtgaaggagatntaatggagtgntaatggggtaagtttcatgtcgtgacacccctgggcttgggacttagccgaggatgaaaaataaataggaaaatgctca

SEQ ID NO: 90805 - DNA, 217 bp, Zea mays
  unsure (1)..(217): unsure at all n locations
  Clone ID: MRT4577_182818C.1
tttgcggtnctttcngcntgctcctggtgttcttttgcttgnggttcctcccggtttttgtggggggggctttgntgnngntgtgttggctcctgntgnncgtgttggccggcgcnctcgngncgggctggttcnccgcgntgntgggtgctttgggggtgncnntggccccgnntccgncgccggggcncgcttttctgcttcttctggggccctg

SEQ ID NO: 90806 - DNA, 258 bp, Zea mays
  Clone ID: MRT4577_182819C.1
acaaaacaaaaaattgcggttctcaaacgggggggggggaaaatcggaaaaaatcaaaatgacaactttcattataaactcaaagggcgtaactaaaaacaaaagcaggaaggttggaacaacccaaacgtggtatcaagcctaactaaacctgccccagaactggaaaccccctccaaacacaagaaacaaaaaaacaacatccaattacctgcccccaacaggaccaaaaaaacacaatttcataggatccttttg

SEQ ID NO: 90807 - DNA, 1274 bp, Zea mays
  Clone ID: MRT4577_18281C.1
gggtacctcgaggccggccgggccgggggttctgccattcccaatcctgtttctaccgttcccattcccattcccggttccttctccaccccgatgcccctccccctcccccgtgtgatcccctctccagatcgatgtctgccccggccgtaacccccgcggctcaccgcacgaaaccgccgcgagatcttggagctcggcctctgacgatggctacgactacctcgccaacctccgcgagctctgtccccctccctctcctccaccggcggcgggggatcctcggccatgttcctcccgaggcgccggcccacgcgcttcggcctccgcgtggtcatcaaggtcctaccaccgcctcacctcctccttgccgccgtgcggttgagcgccgacgacgttcgggctccggcggttcctgcatggaccggaagagccatctcatactctttctctacagcctttctgatggctcggaacagaggtcagctatgcgatgtggcgtggcgaggttaccgcgggcgccgcggaggtggagggggaaggggaggacgagggcacgggcaagagagcgcatcgctgtggacggtctcgtgagtgagtgctgctgcctgcccctctctctctgcctgcgttctcctggtgctgctctccctctcctcccctgcttcgacctcccgcctttccccaccgtttcttggatttctaggatccagacaaccgcccttgtgagcctgccttcctgcctactacctgcgtacgtacaggagggaccttgggtgatccgggtgccatggttaacgtttcgggggcattcgctgctgttggattccgggccggtacaagacggcggtgaacgcggagctcatgaagatgccgcgcaaggccgggctcaaggtccaggccgtcatgtccttccaccgggtcgctggtgcacgaggccgccgtcgcgctgcgaagctgaccggccgggacgggacgggacgaaacggaaacctacgatcgactgtacatacaggggttgggacttgggagggagctcgggttcttgttgggttttcctttgggtggagagcgagggagcgcagtcgagagccagcgagcagtctctcgtgcagtgcagtgcagtgcagtgcagtgcagctccggcgtagatgagattgtattgtgaccaagccgggagggaaagcagggaggggaggacaaaaatgttttgtcacgtttcaggctccggccatcgccggagtttgtccggggaatatatcgatttcctccag

SEQ ID NO: 90808 - DNA, 775 bp, Zea mays
  unsure (1)..(775): unsure at all n locations
  Clone ID: MRT4577_182820C.1
ggacgcctgcggtttcggtccggaattcccgggtcgacccacgcgtccgccccgcgcagcctaggcttgccgtgcgagtcggacttggtccgggcccaccaccctgctctgtactactactcggctttcccgtcaagatgcctgaggaagtgcaccatggagaggaggaggtggagacctttgcctttcaggcagaaattgcccagctcatgtccctcatcatcaacactttctattcaaacaaggagattttcctccgcgagttgatctctaatgcttcagatgccctggacaagattcgatatgagagcctgacggacccttctaagttggacagtgggaaagagctgaaaattgacatcatccccaaccctcaggagcgcacgctgactttggtggacacaggcattggcatgaccaaggctgacctcattaataacctgggaaccattgctaagtctggcacgaaggcgttcatggaggctctccaggctggtgcagacatctccatgatcgggcagtttggtgtcggattctactcggcctatctagttgcagagaaagtggttgtgatcacgaagcacaatgatgatgagcagtatgcctgggagtcgtctgcgggtggctccttcaccgtccgggcagaccatggtgagcccattggccggngtaccaaagtgatccttcacctcanagaagaccagacagagtacttggaggagaagagggtcaaggaagtggtgaagaaacttcgcagttcataggctatcccatc

SEQ ID NO: 90809 - DNA, 357 bp, Zea mays
  Clone ID: MRT4577_182821C.1
acacacatgcacatacatgtcatcacatatatcgcactgattttctggattaaattaaaactaaaaatgcctaactttctaacaacaaatagccatggcgaggagccatgtgtgggagcaggtactggcgagcaaagagctggtggcggcttgcgtgctggcgagcaccaaagaaggacagcgaccagtggtgagcggtggacgcgactgcaaagaagcgtcgagtcgcggtccccggagctacagcggcggtaaggccaggttgacagctagcgagttggagaccagagagaagcgtcgatctccatggaacctgcagacggacgagcaggaaaacactagagagtagggcgagcg

SEQ ID NO: 90810 - DNA, 957 bp, Zea mays
  Clone ID: MRT4577_182822C.1
ccaattagtcctaaatcataattgtccaggttgctacaggagcaacaaacataaattacacaagaaagatgcggcgtagaccgttgacatttgacgcgacttcattcagcagtagcggaagatagagatttaaatacggtagtacgatgcgtgcatgcatatgcataggctgaaatcatgagttgcaaagacatatatagaacgtcccgccggctagcagggcagccgatcatatcgacgataacgactcaaagcaaagaactaacacactcagaggaggaagaaacagggtaatgaagcggatttattctgtttggtccaagctgcccgttcgctgtccgggtcatgcactccatgactccatctactggcacttggcgtttgggaggttgcacgcggaagggatggccttggcgcagctggcgtagggcgtgttcttgagcttgttccagtagttgctgcagaggcagccgaagtcggcgttcctcagcgcgtcgcagcacccctggctcggcgcgccgctcgagcaggacgcgcactgcctcagcaccgtgccccggtcgacgttgcacgtcccgtcggcctcgctcgccgcgaagagcagcgccagcagcgcgacgcccgccatggtcacggccacggccacggcactgttgccgcgcacccttctcccggccatctgagatcggcggatgttttggcttcgctaggctgctgacctgctgtcagttagacggctctcggtgtgtgtatgtaggctagtgtgatctgcacttccgggtttcgatttttttctttttttggcgtgacgcccaggcagacgtgccctccgccagaaggcttcgggcgcaacttgcgttcaaaaactcgatggttcgcgggattctgcaattcacaccaggtatcgcattttgctacgttcttcatcgatgcgagagccgagatatccgttgccga

SEQ ID NO: 90811 - DNA, 859 bp, Zea mays
  unsure (1)..(859): unsure at all n locations
  Clone ID: MRT4577_182823C.1
gaatttcatggtatattgggtccctggggcggccgggaagtgcagatcacactagcctacacacaccacgctccgtctaaactgacagcaggtcagcagcctagcgaagccaagacatccgccgatctcagatggccgggagaagggtgcgcggcaacagtgccgtggccgtggccgtggccatggtgggcgtcgcgctgctggcgctgctcttcgcggcgagcgaggccgacgggacgtgcaacgtcgaccggggcacggtgctgaggcagtgcgcgtcctgctcgagcggcgcgccgagccaggggtgctgcgacgcgctgaggaacgccgacttcggctgcctctgcagcaactactggaacaagctcaagaacacgccctacgccagctgcgccaaggccatcccttccgcgtgcaacctcccaaacgccaagtgccagtagatggagacatggagtgcgtgacccggacagcgaacgggcagcttggaccaaacagaataaatccgcttcagtccgtagccagccacctgattgtctttgcccgttcattaccctgtttcttcctcctctgagtgtgttagttctttgctttgagtcgttatcgtcgatatgatcgggacgctctatatatgtctttgcaactcatggtttcagacaaagcatatgcatgcacgcatcgtattatcttatttaaatctctatcttccgctacaaaaaaaaaaaaaaaaggcaactggcactggtctacgccgcatctttctgggaaaatttatggttggttgctcctgtcgcaacccggacaattatctgatttangactaagaaaaaaaaaaaaaaagcggcctcgagctcag

SEQ ID NO: 90812 - DNA, 671 bp, Zea mays
  Clone ID: MRT4577_182824C.1
ctgtgcggcgctcgaggcggccggtccgagagatatgtgttcgaccggtctacaagggcgacgggtcagccgccagccgccgcgaggttcgtgctgatccgagagctgcacccgctgggcacggagatgacacgggctctgtcgactgccaactgccatgccgccatggagatgacacacggacggacgagtggtctgtgtgccgacggatcaacgtatgctgatccatggaccaagatcaagacacacatgtttgaaaccacagcataggatggtgagcccaattgaagggctgctggataggcagaatccaagatgcaaaagcactcatggcctggtgtcccttgcacgcagcttcagcgaagctgcctatctgacatagatgaaattgttattgtctgctaaccatgttcaaagtgttattaccaattaagaatcagtggcagctagatgtcttgagacaactactttataccatacgcaacaatcaggagtccatcccaaaactgagaagatattcagtagcactggattttttttattatatgcgctcatggtagatgacacatgagaggtgtccgtctgtctgtcagttcttgattgtgataattttgaaaggcaatctcagggattttttttgttcacaaaaaaaaaaaaaaaaaaggccccta

SEQ ID NO: 90813 - DNA, 813 bp, Zea mays
  unsure (1)..(813): unsure at all n locations
  Clone ID: MRT4577_182825C.1
ccgggtgttattatgggcctatcagtgcagtgttatacttcctccgtagtcaaaaatataattcgttttatattaaacctacattcattaatcatcttataaatgtagtttatatgtatgtctatattccttatcatttattcgaatttgaacagaaaaaaaacagagctagaaagataacgaatatagacatatatataaactacatttagcaattctaaaccttaaaccctaagatgtttagcatacccggtcagcttacagtgttagcaggtacggtatccaaacatgcccttcattaagaccccgtttggtttgagggactaaagattagtacatctttattctagtctcatttagttactaaattgccaaatgacgagactaaaataagaactaaactgttttagtctctagtacatcaaggactgactaataaaagagattaaaccatattaattgcacttttgccctcctttatttcagttgaactattggcgggagaatatatgctatgggatattttggtcctcttatcttatggttcatcttaatgcgttttgaatacttatagtccataaaaccaaacatggtagagactaaactntagcctcttaagtaaacttgacaaattatatctttgggcaatgcaacccggcctagcttgctaaaggttntgctaataaggcgcgctatttaactaaccctcctacatacaaaagtgtgccaaagatatgacagcaggctaacaataatttcacaattcgaatgcacgatacgtggatataggcatacgtgtgctgttaactaacc

SEQ ID NO: 90814 - DNA, 399 bp, Zea mays
  Clone ID: MRT4577_182826C.1
ctaatgtgtagcgtgcctatttatatactaattacgtacacaaagtattttaagggcggacgagatgggggtcatgttgttgtacggtggtgattgggaatgggatgggttcctaatgcatgtgcagaagagtgttataaccgtgaatggaataattgtttctttttgatatgttgatagggtcgctggcaagtcgttcttatgtcatcatccaggtgctcacgagctaggtgtgccaagagtaccacgttgctgataagaactgctgcgtgaaaaagggagatgcatgcactggtgtaattagttctgaaaagctcgtcttccgtggcgttggctgggtaatttttggacacttgtgaaacgagagctctgctgcgagaatcaactgcgtttgctgga

SEQ ID NO: 90815 - DNA, 631 bp, Zea mays
  Clone ID: MRT4577_182827C.1
ccggccgggcataagccccggccagatagtttcctcctatccgatctttatcccatgcgcgtgcatgaatgtctgtgtcggcgatccttatatgttcacctgcgatcctcttcgtacatcatgtgcctagcaccgaacgattcgccgccgaggaccatgcgagccatgatgaagtgaggatcgccgccacgatcaaaccacctgaatgtggcggctcaaccatcatattgtggccgaaggcgctctcctagtcacgtagaacatgtacgtgatatcagccggacgtgagaagcagtggtgcagaggtaatttcctcgtcggagaggtgggcgccgacacagaccacactgctcggtgggcagtggacgtcgcggatccatcatgggtaaaaacttccctgtttgagtcaccatgctccgtgcattacttagcacctgtcatttgggagtttgagcatataacgactcgaatttgagagtttaatttttctttctccaatactcactaaattcaggtgttacctttttttttttttttttctcgctatgccttgttctttttcaaatattatagcgagatttagctcgagaccttgtgtgagaaaacctaaaatatattcctcggttgttgt

SEQ ID NO: 90816 - DNA, 238 bp, Zea mays
  Clone ID: MRT4577_182828C.1
cgggtatccgtatctattgcatttctataaaaaataatttgagagtacaaagtcgattttattggttataccaaacaaatgggtattacttttacttggaccaaaggagggttttttaaacccttttgggaaacattttaaagagagaattttttataacagcaccgccgaacattgggtttctcagttttatttttctagatcacttccaggataattgtgggtgcttccttggaag

SEQ ID NO: 90817 - DNA, 430 bp, Zea mays
  Clone ID: MRT4577_182829C.1
aggaaacaatgccgtttttgtagggctccttttttgtgttctttttatttgtttatctaaaaaaggcacctaattttttttgtttgttgccgggacacgacagggttgatcaaaaagaaccggttgtgtggcatcaattgttgctgctgtaagaaggcaccccccaatgggtgggccactggcaaaggattaagtgactgttgaaactgatgtgggtacgcagcagaattcgacatagttagttgggggaatggaagcaggtgtcgcaagtaggcaacaaggtttgccacagttagctgagttagagctggaacaatctgatgcaacaattcttgttgaaggtatgtaggtgcattggccacaaatagcgggctaaatgaaagcagttgttgctgttgaagggaagaaattgggggtgaccatggcctag

SEQ ID NO: 90818 - DNA, 375 bp, Zea mays
  unsure (1)..(375): unsure at all n locations
  Clone ID: MRT4577_18282C.1
tgcggccaccgccagnaatgctgggctcctcttttttctcgtgctcctcctggggctgtctttcctccgcgtgtccatgggtgggtcacaggtctgcgacagcaagtgcgcgctgaggggctctaaggggagacgggacgacgacagcgtcaagtactgcgggatctgctgctgccacctgcaactgcgtgccgcccgggaccaccggcaacaagaacgagtgccgatgctactgcgacatgaccaccggacaccgcaaccgcaccaggaccaacaacccctgatgataatactcccttctttcctcggaggcacctgccagctgggggctgcttgcatgcatctgtaatgaataggctgggcaatgcatgcatc

SEQ ID NO: 90819 - DNA, 355 bp, Zea mays
  Clone ID: MRT4577_182830C.1
attgaggtggccgcgatcgcaagtgaggtggaccggacgagctgggagccggagcgaggtggtcgcgcgcgatgatgaacctagaagcctgcacgaccacagatctgggggcgctggttgcctgaaacagaatcagcggcaggcagacacgagtgggttcaggggagggcaaggaccagacgatggcgagtcggcgagatggcgaatcagtcggacctggtgtggagagacgacgactcggtgagcagtcttgctgtggagggacgaggacgacgacacaatgaggtggtcttgctgtggatggacgaggatgacagtgcaacgaggaggtcctgctgtggagggacgaggatga

SEQ ID NO: 90820 - DNA, 233 bp, Zea mays
  Clone ID: MRT4577_182831C.1
acacgtacaaacctcaattagcaaaacttggttttgcaccataataaaaataacaccccagatgccatggattattatttaccacacgtgatctgggacacgcacctgcaaaagtttgagacgagccatatgcagggtactcattcattgcttaataaagaaagctacatgataattgcacacaatgctggcgcccaccaccatgcatcattaccgaatgggaggggcggatg

SEQ ID NO: 90821 - DNA, 555 bp, Zea mays
  Clone ID: MRT4577_182832C.1
tgccgtcatgtgaaggccaattctacgaggttatgccagacgatgaagctagatgctagttccgcaagctctcaccctttcgctagttaaagcaacaataagctcactagatccctttgattaataaattatctatatttcgaacaaaaaaaaaaaaaaaaaaaaaaaaaaaaaaaaaaaaaaaaaaaaaaaaaaaaaaaaaaaaaaaaaaaaaaaaaaaaaaaaaaaaaaaaaaaaaaaaaaaaaaaaaaaaaaaaaaaaaaaaaaaaaagggggggccccttttaaaggaccaaattttacgcccccgggcttgaaaagtaaaattttttttttggggcccccaaaataaaattaaggggccgggttttaaaaacgtgggaacgggaaaaacctgggggtacccaaattaaatcgcttggaaaaaaatccccttttcccaagtgggggaaaaagaaaaaaggcccgcaccgaccccctttccaaacatttgcccaccctaaatggcaaagggaaccccccctgtaccggccaattaaccgcggggggtggggg

SEQ ID NO: 90822 - DNA, 407 bp, Zea mays
  Clone ID: MRT4577_182833C.1
ttttaattcgaacaaaacaaatcctaatcataaacggggtgggtacacagatatttctccatacgttcatgctcatagaggatgacgcagctgaccacctaaagccgcatacttacttattcatactgacccagcatgaggcgacaccggaaggtcacatgccaacagacgacatatttccataacaatagcggtggctaggctgcttgacagaataaccaatccacaaccacaaaattgcgacgatttaaaataaacaactcagaagcaaattgaccccagaagcccggcttactcatgaagcactcccgtcttctcctgcatggcattcggtctcttcttgcagcatataagtacacttgggcttgaaggccttcttcataggaggaggagcactctccacgttc

SEQ ID NO: 90823 - DNA, 835 bp, Zea mays
  Clone ID: MRT4577_182834C.1
ggaccctcgaggccggccgggctgccccgacggcctccctcgctcccgcgtgcgtgtaccctaaactcttccccctcttcctcctccccctcgcctccgtccccatcccgattgcatggtccatttggttgcacggaacggcgtctcctccatcggtccgaccaccgcgcgggcggcaacaccgacttttgcatcggtttccccagatcctggatgacaagcttagccccaagtgtttggatcgcggccagaaacagtacaacaggcgctcgtatattaggcctgtgggagctgtctggccaggcaaatttgtcaggtttcggtgaagtttggtcggtcattcgacaggattccccatcctgatgcagccttggaggaatctataagtgaggtgtgggaccaaagccttcagcggaacccatatctacacagcggtacaaagtttcggtatggaggaaatgccttgcactacaaagatgactcagatcatgatcttgagtactgtgtctcacttcatttgggtctcacagactacaggacatttgtgggaacaaatctcaatccattgtgggaattttttttggttccatctgaagatgattctgtacattgccaacacttgtcagatgcactgggaaatggtgctatagttgaaacatctgacaaaaagattattgtattgcaaaggagctacaatgtggcggactatccaggatactatgtttttcctggaggacactcggagccgcaagaaattgggatcatgggtcatcaaactgatgaagaagactttgctagtctcactgaacgagtttcacaagaaatgtttgacgga

SEQ ID NO: 90824 - DNA, 2128 bp, Zea mays
  Clone ID: MRT4577_182835C.1
cgtttgcatggtccatttggttgcacgggagggggtctcctccatcggtccgaccaccgcgcgggcggcaacaccgacttttgcatcggtttccccagatcctggatgacaagcttagccccaagtgtttggatgtgctgctgctgccatcaactgccgtgatgtatttctttagctggggcgaggagtgtgtggggtgctaataactgatgttatatttctgtagcgcggccagaaacagtacaacaggcgctcgtatattaggcctgtgggagctgtctggccaggcaaatttgtcaggtcttgatctaaataggccctcaaatattatgaagtacggatcttgtcatgctaactcttgtgttaccaatccttataaaatttcctatactaaaaaaagtgaagacttaggacaaatctagatggactttttttttctttgaatggaggaagtaccaagtgtgttttacactcttgctttacaacacagcaacattctgattgagctcatgttatgaactgaccgggacccctagccgccgcccgtcgccccgtgccgccgcaccggccaaccccgcgcccctcgaccgtctccgtcgccgcgccacccgcaccgggacccagtatggccgcctccggcgcatatccgggcacggcgttcaagatactcctctcctgccccgacggcctccctcgctcccgcgtttcggtgaagtttggtcggtcattcgacaggattccccatcctgatgcagccttggaggaatctataagtgaggtgtgggaccaaagccttcagcggaacccatatctatacagcggtacaaagtttcggtatggaggaaatgccttgcactacaaagatgactcagatcatgatcttgagtactgtgtctcacttcatttgggtctcacagactacaggacatttgtgggaacaaatctcaatccattgtgggaattttttttggttccatctgaagatgattctgtacattgccaacacttgtcagatgcactgggaaatggtgctatagttgaaacatctgacaaaaagattattgtattgcaaaggagctacaatgtggcggactttccaggatactatgttttccctggaggacactcggagccgcaagaaattggaatcatgggtcatcaaactgatgaagaagactttgctagtctcaatgaacgagtttcacaagaaatgtttgaaggagtcatccgtgaagtggttgaggaaactggagttcctgctagctccctaactgatcctgtcttcattggagtttcccgccgagaagttaacgctaggccgactgcgttcttttttacaaaatgtaacattgattccagtggcgtaagcgagctttattctagagctcaagatggctatgaatctactaaactctacacagtatctgtggaagaactacaaggaatgaggcagcggatgcctggatgccacaacggtggtattgctctgtatgagttgatgaggaatgctgcaaaaaaaagtgaagatgtcattgatgaatagttctgatggtgttattacaccacaaacaagtgtggaggtattcgcatctcgtacaaacacccgtgcagaacactgcatgtgacatccatcagattgctgttctttgcagtagatatgtgccatttccatgtttgttgagcctgacataggtctccttagaccgctgcataagtgcccacaaagagcatgaagcttaaagtttcctctgaatactaccggaataaatttcatctccggatgtaccaccaaaggaggcacaccagagcggcatcatgatgctaatctacatggtgagatgacccgtggattgtaatgttctttcaggattgaatttcctgggcaagtgatgcctgaatctgtcagctgttcttctgttggtttctgctgtagcggtgtactaggagtatgtaggaaccgaaggtgaagcttacattactttgctctgagaacgtttatatacttgttacctttggtatggatatactagttcgtgctagggtatggattctacatatttcatcttgacttttatcgcttcacacaattgccatcttggtgaattcgagtatagcctgtggatgtttc

SEQ ID NO: 90825 - DNA, 757 bp, Zea mays
  Clone ID: MRT4577_182836C.1
cattgggtacctcgaggccggccgggattgatatgatttgttacaccaccacacccgcacgccatcgcaggacatgacaagcactctgcgttaccgaatatggtatcaaaacaatggacaaccctgttcctagcatataaatgatcatcgccgcacacgagtctgacataatgtcacgtagctcgcctatccggggacctagtatatgtctgcggttttcgggcctggtattaaagctacatgactagtaaccgtgacatgccagtacaatccactatgaccaacgaccagtcatacactgaacagatcccgctgtacctacgcactcgtggcagcctcactctccgaacttcctgtgctactaatacaggcatcttcgcatattgctccttaacatgagactccttgttctccatggcgatcgaaaccgacgggctatcggctaccacgctcgacatcaacataatggacaccggatgtatcgcacaaatgaacgaactaacttggaatatgccagttctgcatgatcaccgaagatccatgaagagaatatatcttgccgtggcaagcatggtggcaaactctgaccagattgacatggcatctatctgcccaatgatgtgcgcatctctgcaaccgattaagacgtctaaagtgtccgactcctccgacaccaagatctcactatggtccggactaggagggacgacatcggacttcacgaggaataagccaccacttcatctgcgcagcatct

SEQ ID NO: 90826 - DNA, 947 bp, Zea mays
  Clone ID: MRT4577_182837C.1
gccggccgggtcggctgacaagggacgccgtgcgctgcacatcacttcggcacgcggccgcctccttcactccactgtccagtgtccactcccctctctctctctctctcccccaccaaaaccaccgcgccgccaccggcacaccgccgcggctgccggccatgatccccgctcctcccgcctccagcgccggaggcagcatcaccagcgggtggcgcaacctcctcctcctcctcctcacactcacactcaccctcgcgcgccccgcagcagcgcagccgccgacgagcccggcgctgcaggcggcgtacgcggcgctgcaagcgtggaagcggacggccatcttctccgacccgtccaacttcacctccaactgggcgggccccaacgtgtgcgcgtacaacggcatctactgcgcgccgcggccctccgacggggcgctggccgtggccggcatcgacctcaaccacgccgacatcgcgggccacatccccgccgacctccccctcggcgtgcccgacctggcgctgctccacctcaactccaaccgcttctgcggggtgctgccggacacgctgctccacctgcgcctcctccacgagctcgacctcagcaacaaccgcttcgtcggcgccttccccgccgtcgtgctcgcgctcccctcgctccgctacctcgacctccgcttcaacgacttcgagggccccatcccgccgccgctcttcgaccgcccgctcgacgccatcctcctcaactccaaccgcctccgcgggcccatcccggccaacctcggcaactcgccggcctccgtgctcgtgctcgcgcacaaccgcctcggcggctgcatcccgccgtcgatagggaggatggcggtcacgctcatcgagatcgtcctcatcgacgacgacctcaccggctgcgttccgccgcacccggactgctcacga

SEQ ID NO: 90827 - DNA, 1764 bp, Zea mays
  Clone ID: MRT4577_182838C.1
cattgggtacctcgaggccggccggggccaacccccgcgcccctcaaccgtctccgtcgccgcgccacccgcactagtatggccgcctccggcgcatatccgggcacggcgttcaagatactcctctcctgccccgacggcctccctcgctcccgcgtttcggtgaagtttggtcggtcattcgacaggattccccatcctgatgcagccttggaggaatctataagtgaggtgtgggaccaaagccttcagcggaacccatgtctatacagcggtacaaagtttcggtatggaggaaatgccttgcactacaaagatgactcagatcatgatcttgagtactgtgtctcacttcatttgggtctcacagactacaggacatttgtgggaacaaatctcaatccattgtgggaattttttttggttccatctgaagatgattctgtacattgccaacacttgtcagatgcactgggaaatggtgctatagttgaaacatctgacaaaaagattattgtattgcaaaggagctacaatgtggcggactttccaggatactatgttttccctggaggacactcggagccgcaagaaattggaatcatgggtcatcaaactgatgaagaagactttgctagtctcaatgaacgagtttcacaagaaatgtttgaaggagtcatccgtgaagtggttgaggaaactggagttcctgctagctccctaactgatcctgtcttcattggagtttcccgccgagaagttaacgctaggccgactgcgttcttttttacaaaatgtaacattgattccagtggcgtaagcgagctttattctagagctcaagatggctatgaatctactaaactctacacagtatctgtggaagaactacaaggaatgaggcagcggatgcctggatgccacaacggtggtattgctctgtatgagttgatgaggaatgctgcaaaaaaaaagtgaagacgtcattgatgaatagttctgatggtgctattacaccagaaacaagtgtggagctattacaccagaaacaagtgtggaggtattcgtatctcgtacaaacacccgtgcagaacactgcatgtgacatccatcagattgctgttctttgcagtagatgagccatttcatgtttgttgagcctgacataggtctccttagaccgctgcataagttcccacaaagaaataaggtagtgtttggttgaagaaccaattagaacggagccgttctatcccagttttgttgttgtttggttacaaagtaactagaacgtaatgacttcaattagagaatattctcctcagatccggaaccaccccgctccaaaaaaatcaaccggacggaaccgcttcgttcccagcccgctcgcacagtcacgctccgttcctaaaatcagggatggaagggcttcgttcttagaatcagggatggaacggatccgttctacttggctccttaaccaaacactacctaagagcatgaagcttaaggtttcctccgaatactaccagaataaatttcatctccggatgttccaccaaaggaggcacaccagagcggcatcatgatgctaatctacatggtgagatgacccgtggattgtaatgttctttcaggattgaatttcctgggcaagtgttgcctgaatctgtcagctgttcttctgttggtttctgctgtagctgtgtactaggcgtatgtaggaaccgaactaccgaaggtgaagcttacattactttgctc

SEQ ID NO: 90828 - DNA, 358 bp, Zea mays
  Clone ID: MRT4577_182839C.1
ccggaatggaatgctcgacccaagcgacgcggttcgatgaaaacgcactacgctagaagtctacctctcaataatgagacacatttaacccagggagagataacaactgttgcgctaatttacagacattacaacttctaacatacaaggagataactggaatcagccgtgctacatttgagacacagccacagagattgacgcactacctgcacgctggatctaacgctgtctccttattacaactgtaacaatcgctgccattcaaccaaagagctgtgacaaacctgagcaggatgtaccatcagcccattcattggtagagcccatgcttaggagtctatatcagatatagctg

SEQ ID NO: 90829 - DNA, 896 bp, Zea mays
  Clone ID: MRT4577_18283C.1
ttgggtacctcgaggccggccgggaagtcctcctcgatcacactccaccacgattgccaagtgtcaatctcgacacggcagcaggagcctttgggccgtcgttacacgcacctatccatctcatctccgcggcacacgacacgatcgtggttggtgttggttacacgcgcctatatcgccgccagccatgtcgtactacggcgaccggcgcgcggagtcgtcgatcgtggaggcgttcacgctgtcgccgctgccgtacccggtgatcctggtgctgctgatggtgacgctgctgctgggcgcctcgtggttcttcacgtacgacgacttcatcgaggaggcgtcgcagcagctgagctgggcgctgctgggcgtgcccatcgcgctcgtcctcctcatccgctggatctcctccgtcgactccttcgagggctacctgggcttctacccgacggagagccgctggaagggccgctacgagcggggccccgccgagggcagctcgccctggggcgtcgccttgctcgtcctcctcctcctcgtgctcgccagcttccactccaccatccacgacatgtggggcccgtgaacggatgtagtgattgtagtcctgctcctgttcggttccacgcgcgcacgtatgcgcttgtgctactggttgctgcttgatcgatcgatggatcgatgattccatgtacatatttgttagggggatgctgcggctaggctattagctgcaggctatagagtttgagggtgatatacttatcagtttgctgcctgtaagactggttttggttttgctataatcgtgatatattccgatgtacagtatacagtaccctctttgctttggtttccctgtcttggaattgactggtggaatggaaccgtct

SEQ ID NO: 90830 - DNA, 785 bp, Zea mays
  unsure (1)..(785): unsure at all n locations
  Clone ID: MRT4577_182840C.1
aaatacaaatctgcgccccccccccccctctctcccctcggatgcatgagaggtcgccggggccatcgctagccgccacgcgcctcccctcctccgcctccctgctcctgctcctgtcgctgtccctgctcgccgggcgctcgcacggctggtggtgccgcgaggacgacgaggggtgctccctgatggggttcaggggcgacgactcgccggtcaccggaggcggtatcagtgaaaaaggcaggttcagttatgggtttgcaagctgtgctgggaaaagggcatctatggaggatttctacgagacaagagtggatgatgttgatggagagactgttgggttgtttggcgtatttgatggtcacggcggagctcgagcagctgaatatgtgaagaagcaccttttcagcaatttaatcaagcatccgaaattcatgacagatacaaaggctgctattgctgaaacattcaatcataccgattcagagtttctgaaagctgatagtagccacaccagagatgctggctcaactgcctcaacagctattcttgtcggtggtcgcttggtggttgcaaatgttggtgattctagagctgttgtttctanaggagggaaggctattgcggtttccagggatcacaaacctgaccagacagatgagagacagagaattgaggaagctggaggctttgtgatgtgggctgggacatggcgtgttggtggtggtcttgctgtttctcgcgcatttggtgataaacttcctaagcagtatgttgtcgctgat

SEQ ID NO: 90831 - DNA, 560 bp, Zea mays
  Clone ID: MRT4577_182841C.1
gccgacgaacgctagaataaatactctactaatagtctaataagtagcggaaagtctgaccccacatcagtgcccgcacctttacacaccacctgacaaacacctctggtggtggcaaccctggggaggaccctgattcagctgaacatacacgggaacttagagctgaacttgtagcacctacacgctatagatgacactgttcttgagactgaggatgtgtcataggatccatcagagccaccatcttatatgccaactgatatggctgatgatgatgatgacgatgaataagacatgcaacaagcaccattacataaccctggattaaagaccagtgaagagaccagcgctactagaaaacactactggagcaaatattgaagcagaggttaagaaaaggacctttgaacagacctgagctctctagggaggtatatgacatggtagccgagcttgattcctcacgtgagacatcatgcgagcctaagctcgaggcggatctgacagcttatgtggagaatcatgaatagaggcacgatgctggcctggacgaacat

SEQ ID NO: 90832 - DNA, 240 bp, Zea mays
  Clone ID: MRT4577_182842C.1
gttgagggggaacttctggagactgttcaattctagcggagcatccagagaaatttcaaacgtttttcatgttttctacaaaaggtgctttgagttatggcccttctggttgtgcggagactcagattgccaaaggaattgctcttgaatgccaaactacctttattagggggaagggtacttaactgtttaccatgtggcctaaggagagtgaggcctatgtcctttagaaatttgaca

SEQ ID NO: 90833 - DNA, 153 bp, Zea mays
  Clone ID: MRT4577_182843C.1
gtctttcttacgcggacgctatgatatgcaacaccggtcttattttatcgatagtggagttctacaatgctttaataatagtgccagtctaagaatatgacataatgtggacaatgaaaaaaatgtgcaaaagtgagtacatgaaagagacag

SEQ ID NO: 90834 - DNA, 364 bp, Zea mays
  Clone ID: MRT4577_182844C.1
tctcccccttctcccttcccttctcttttcccgaaaccctatctccacctatgtatctttatacacccattcgacataatacatttccttcaatacacctttcttacttcatttaacatcaacacttaatacctttctaccatcaccttttctcctaacacctcatccctcttacaactacaacaattgataacctttgtccaacttacttttacataccaaaccccctcctaccaacaacacatcactttataaaccctcttttacattccttattacttataattcaataataaagtttttctgaccatctatctcaccaaccacaaataataaattacatttccatattttaatgttaata

SEQ ID NO: 90835 - DNA, 142 bp, Zea mays
  Clone ID: MRT4577_182845C.1
taccgtttgattttttctactgagtatattgtaactttgtatctttctggagtgctttaatactgctcgtggcagaagaaggagttgtatcgttccgtggaccttaagtcgagaggacagtatgatatatggtatcgtagtc

SEQ ID NO: 90836 - DNA, 645 bp, Zea mays
  Clone ID: MRT4577_182846C.1
tttttttttttttttttgccgcataatgatataattgagttctaattctaaactatgacccttgccgatgactgaattatacctgacagctcttgcaagtctgtcgtgagatgcataccatcaacggcacgttttctcaccccccaaataatccacaaaacgatgacaaacaacacactaactcaggtgataaaaattgacggccacccgaggacacgaaggtaaagactgtggagtcgccaaattggcgtgatcgcaacccgatgtaaagtccatggtagagatgtggcgccccgcgtatttgtctgaagcacttaaagcaggctgctcagagcgatgcagggaagggcgacgttgacaagaccaccggtggcggaaccgccgctgttttgacagcaggcagcgtttgcctggcattccttgttaaggaggccattagcaatagccagaacgttaacatcaagcttggagcactgatcaaacaggctcaggttgttgaggataccagcaccattgccaacagcgttgccagcaggggtgttggtaacccttgttgcagcaggtgacctgcatgttgtttccacaagcattgttggcttgagcgaccgtgatctggtcaatggaagggtaagccctgatggttgg

SEQ ID NO: 90837 - DNA, 573 bp, Zea mays
  Clone ID: MRT4577_182847C.1
ggaagggtttatagtttggattatatgattggatgatcggatggttagtagtttggattggaagattggatcacatcgcgtagtccacctctcctctccagtttccacgagaaaaaaagtggatcctctttcccaccaagtcaaggtttgtgaattcgggagtgctagaatcttgatcttccacaagagaatgtctccagaagcaatggataggcttctagaaaaagataaagtgccaaacccatgctatagagtatagactgaggtgagaggtgtgtaaagcttgtttgcttcaaaccgatggtaacaactgagtggtgcaacaaattctgaattggttgaaggagttctctcctagcactatcctggagacggatgttggagaaatatgactgctggatctgcaataggataatgtcttttagtcgatcccttttgtgcttgtttggtgaacttgtgtccccaatctgttgaactctgtaaacatttgctttccataaaagcagagatattctccttaaaaactcagtccagaatggtgatatatgaatgatccctgagagtttataaggt

SEQ ID NO: 90838 - DNA, 488 bp, Zea mays
  Clone ID: MRT4577_182848C.1
aaggctatgaccagtatatctgtatatatctgtgcaaaatactatagaaacactgtctgtaattgtatagtgtggtttcaaatgagagatgagaaaaagtaagctgctcgagataggctaaatgtaaatttctacgtctttcacaagatcagatatcaaataggagtatcaaagtacttggaagagttgggtagttcgttgtagcatgcttgtcgaaattgagcaaaagatgtgggcactagagtttcttgagcatgagatgcgccccgtgttccggctgcagagtggacaccgggaacggcgcgtgagtgtaggactgcgagagggcgaacgagaagtgctgcaggatgctgctgagcgccatcttggcctcgaccagcgcgaagttctggccgacgcagatccgtggaccccagccgaacgggaagaacgccggcgagtccttggacgccctggagacgccgtccttgaacctctccgggctgaac

SEQ ID NO: 90839 - DNA, 424 bp, Zea mays
  Clone ID: MRT4577_182849C.1
ttttttttttttttttttttttttttttttttttttttttttttttttaagcgaacacaaaaatgacggtaaaagaggcccaaccgttcgattggactatatgagcattccatagcatgagacccatcagcagtggagtttggtaacaaggggggggaaattggggggttgcaaaccaaaaaaaaccgtgaggagaccacccaaggtgagaagcttttgcagctcagaagaggggagaaaaaacaaggtaaattctagggttggaaccaaaccccaggggccaaggggtccaccaccaacccattatttagaacgctccttagggggggaagatattgaaaaaaaaaaagggggaagacagggcttagttgaaaacaaaaaaaacagggggggggacttaaggactgaacacctaatgcggggg

SEQ ID NO: 90840 - DNA, 238 bp, Zea mays
  Clone ID: MRT4577_18284C.1
aacaatcgtccgccaactcgtaccgcaccactgacgaaaaaggaggcgacacgggtacagagtcacagcttatcgaggcgtgcttgctaactcgcaaatgctatatatatctacgtaattcaactattatttccgatcttatatatctccttcactctcaaaactctggcgatccccaactcagaagccattcaaagattcccactttatgcctgaaacgcgactgtgtgaacaaagg

SEQ ID NO: 90841 - DNA, 429 bp, Zea mays
  Clone ID: MRT4577_182850C.1
ttcttttttttttttttttaggaactatatagcggcacttatatcggattattcttacgactgtgggagtacatgcttgcatattacatgtatatcattcttttcaaacacaaataacatctttttctgaaataaatgccaaaccataacattcttgaatacacggtgcctctctaataaacaccctcaagcttttcactacgctaaagactacatcttccctggattctgttgactcgtatcattgacaaactttatctcctggactatttacaaaattttatattaataaagtttatcttttaaccaaccaagaatttcatttaccctcaatgcacatggtacaaggaacaacaacccaggttgaccatgccctctcctttattgaacagtgcaagatacgtaatgaaatggccaactgcatattcc

SEQ ID NO: 90842 - DNA, 243 bp, Zea mays
  unsure (1)..(243): unsure at all n locations
  Clone ID: MRT4577_182852C.1
tggtcctctaaacggccgccctgggggggggggggtggaagatgtggcccggggctgaacctatagcacttgcataacagctccccaaacaatttgggtgaaaccatgcatttcatgagtgggttaaggcgttcgtctattatctgactacacttccctccttgggggattgcatggggtatccaaacttccatttgagactctttccctcatgttcttctttcttacctcctcnaacttcac

SEQ ID NO: 90843 - DNA, 215 bp, Zea mays
  Clone ID: MRT4577_182853C.1
gggggccctccccccttttttttttattcaagggggcccggcccgatcgggggggggcacgggccaactgggttacaatttataacacaggacaactggattttacaacaggggtggcggggacccgggatcaggaggggcccccagctccccccaggtggtagctagctaaaaacctggctgggagcagggggcgggcccatccaccttatttt

SEQ ID NO: 90844 - DNA, 860 bp, Zea mays
  unsure (1)..(860): unsure at all n locations
  Clone ID: MRT4577_182854C.1
atctccaaattctcgatccgccgcgtgcgctgcctgcggatatctccctgtccgtgtcccgctcccgccttgcttgctgctcccccaccgcactgtaggtgctgcctgcctgcctcctcctgaattattcttattcgttcgctattaattattagccggcgctatatccttcccttcctcgtcttcctcctcggagtcggagaggtccgtccatctcgatccgcaagtctgaacggacgactccgaagcttactggccagagagccgccgtttaggtggcggcgatccttccgtggttccttctcggttctgcctgcctgctgctgcttcttcttcttctggcggggccgaatcgagagcgtgtccgccggaatctctcagtcatcaggcaggctgcagcctacggcggtcgattctactgggattctacactactcgctcaagagtcgagactgcatgcggctccaagggaaattaattaagatgaggtcttttccccacctgctgctgatcctggcgctcctcttggtcctggagaatgtccgggcgcaacccaagccacttctcatcaactgcggctcgggttcaagcgccgacgtcgacggcaggacgtgggtcggggacgcccatcccgacggcggcgccggcttcacggtcacattggcaggagccactgccacccgagctcgaaaacctgtcgacgaaggaggaggaggaggngacgccgcgtacggggagctctacaggaccgctcgcgtcttcaacgcgtcgtccgcctacaggttcagcgtcgccgccgggagctacttcctccggctcactttcgccggctcttcagcagcacctcagcggcgacgcca

SEQ ID NO: 90845 - DNA, 159 bp, Zea mays
  Clone ID: MRT4577_182855C.1
tcgctaaaaaccctactcacgttatcaaggtgagcttagacccgggattcgccggctcgttttctagagcgagagatggacggtaggatgttcggtctcgatacccccctgatggtggcgcttcatcaccttctggacgtgcccgactgctactccggc

SEQ ID NO: 90846 - DNA, 381 bp, Zea mays
  Clone ID: MRT4577_182856C.1
cttccgccacgccgcccgggggtcttcttccgttgccatggtggaacctggcccttgctgcaacgtcggggggttcccaaaaccttttcttccttgggtcttgagcttaacccttggagcttgtgccttttttgctcgccggcgacctgcgtcttttccagccaagccttagccaagctcttttccatagccgacgcctttgccttcttgttcgccatggttggccatcggatgccgaaaagcaacctcgccgtttccaagcccgaccccgccagggagctcacggggcctcctgctgctcaaccttgggcgccgtcgttgagctcgccctgctccctggggcttcctgctcgccgtttttggcaagctggctgtcctacc

SEQ ID NO: 90847 - DNA, 1451 bp, Zea mays
  Clone ID: MRT4577_182857C.1
gctcggaactatcaaccccacccatcagcgaaagcaacacaagaactgcaacgagttgtgtggccaggaaatactttgctcttcggccgaaaaaaatatacaccgccgtccgagcctttttggctccgggtgagtgcctaactcagtggactcctggctaacatcaagcgtaactcattttccagggttggaacaaattctctcaccaccccgaaccaaatcccaaggcagtttcgccccgaccaccaacatagtcttagaacctagtcaggatttactcatcatggtggatctaatcatcataatccaagccatattcgtcgtctagctcggaactatcaaccccacccatcagcgaaaggaacacaagaactgcaacgagttgtgtagccaggaaatactttgctcttcgcctggtccgtttttccttggctctgggttttggcttatctctgggttttggcttataactgtggtcagcagatggtcttctcctgggggtggatgatgacgggctaggtgatgatcctaaccctgatgatgatgatgatgaggcttccagcaactggaccttgtgatgctcagcaaagctcaccaagttgtcatgcttctgcaatgtgcccctcagcacagatgtatcaggcaacgcactgagaacaaaaagagcatgtccaaggaaaagagcatcaacatctgtagggctattatcaaatagaaagacttgatcccctaatctgaaagacaatgactcatatgcagcacttgccttctggtatatctcctcttctttttctgcagcattgagctttgttataccaagtagctgcttcacatgtctagttttattccaatggagtatctttccaatgggccaagggagatcagagaagtagatatcatttgcaatgcttccatcactaaccacccagagttcatacagcaaagcattagcaagccaggacgaaaccatggccttcgtgtctagcacagtggtggatgaaatatttgggtgatttgagttcaagtcaacaattttctcatccttgagatactcaattacgcctcctttctcgttgttgaaagccacgcaatccccaaattcaacatatggtatgtgatcggcatcggggaaggaggtgtcgacgtggatgtcgaagggaacctgcgccatgcggaggtagaggagcacggggaggcaggttgggcaggccgtaggtagcccgaagcagggcttgcgcgccaccagcaccttccgcgccgccgcctcccactccacggccgccgccgatgccatcgccgaggtgagctgggtgggggtttgccttgcgcaaaggggttcttttctattcatatcgagagcgtgaagggtttctcgtgctcactaaaagctaaggtgggctgaaaactagccccgtccgaactaacattccggccggcctcgagggtcccaa

SEQ ID NO: 90848 - DNA, 762 bp, Zea mays
  Clone ID: MRT4577_182858C.1
cctcgaggccggccgggagacccagacgcactcggttgcctgacactgtcatcatacggcgcgccgccaccgtatcctcagatcagcgacgcagcagaaaccacaccactctactgacgcccgacgagcagtgtaacattttccttcaaccatggctaaggagaagactcacatcaacattgtggacattgaccatgtcgactctgacaagtcgaccaccactggccacctgatctacaagcttgaaggcattgacaagcgagtgattgagaggatcgagaaagaggacgccgagatgaacaaacggacattcaagtatgcgagggtgcttgacaagctcaaggctgaccgtgaaagagggattacaattgatattgccctgagtaaggtctagaccaccaaatactactgcactgatattgatgccccgtgacaccgtgacttcatcaaaaatatgatcactgacacttcccaaactgactgggctgttcttatcattgactataccactggcggctttgatgctgtgatctccaaggatgtgcagacccgagagtatgctctccttgatttcacacttgtggtgaaacagatgatttgctgctgcaacaagatggatgctactacacccaagtattcgaaggtccgatatgattgaattgtgaaggaagtctcttcctacctgaagaaggatggatacatccctgataagatccacttcagttcaatatctgttgcttgaagtgacaacatgattgagag

SEQ ID NO: 90849 - DNA, 164 bp, Zea mays
  Clone ID: MRT4577_182859C.1
tataaactacaaccttatatatttcctgcttatattcatcttctacttcatccaacatatcataaatcttaactattcccacctcatatttagtttccaaattaacatcaagcacattattactctacttcatcactatcatctttcaacatattatagataat

SEQ ID NO: 90850 - DNA, 375 bp, Zea mays
  unsure (1)..(375): unsure at all n locations
  Clone ID: MRT4577_18285C.1
gtcaggccaagcttttcaattaaattgcctcccgcctaataatatactcagtagtacaaaaatcgttgatcagcggcctcatccaatagaagagacttggtcagtcctactcctaccttcttgcattgcgttgcgtcgtcttatcacagccacagcagtagcacatccccaccacgggcgaggagccggggacgtacgggtggaccgcggtccggccagttgtggctttgcgagcacagtgttaacagacagccctggtatggtaacccctgctcctccgtgaaccgggaaaacgatgattgcccttgcttgcttgcctgcgncaccgtgcacggaccaccatgccgcagcacagtggcatttgctcgcagtcgc

SEQ ID NO: 90851 - DNA, 1412 bp, Zea mays
  Clone ID: MRT4577_182860C.1
gggggccaacagatctcatcataaagaagcagcacgtctccaaaactccaaaattcgaatttgcttacaagtttggttcactgaagcccaaaaaaaaaaaaaccttcagagacaagtatgtttacagccgaagtagcttatgaaactgccgatgggtgaccaactcagtgaattcctagctaaaatcaagcgtaacacattttccagtgttggaacaaattctcacagcaccccgaaccaaccaggcagtttgtccttggaactaatcaagtgtaacagcacagggaggatctaatcatcataatccaagccatcttcgtcgtctagctcggaactatcaaccccacccatcagcgaaaggaacacaagaactgcaacgagttgtgtggccaggaaatactttgctcttcgcctgaatttcttttcctcctccgtccgttccttcttggctctgggttttggcttataactgtggtcagcagatggtcttctcctgggggtggatgatgatgggctaggtgatgatcctaaccctgatgatgatgatgatgaggcttccagcaactggaccttgtgatgctcagcaaagctcaccaagttgtcatgcttctgcaaagtgcccctcagcacagatgtatcaggcaacgcactgagaacaaaaagaacatgtccaaggaaaagagcatcaacatctgtagggctattatcaaatagaaagacttgatcccctaatctgaaagacaatgactcatatgcagcacttgccttctggtatatctgtttaaatagaaaattgcattacaagctactaatgtgtcaaccaaaaaacaaaaaaaggctaggacaataataggtagggagtagcaaacctcctcttctttttctgcagcattgagctttgttataccaagtagctgcttcacatgtctagttttattccaatggagtatctttccaatgggccaagggagatcagagaagtagatatcatttgcaatgcttccatcactaaccacccagagttcatacagcaaagcattagcaagccaggacgaaaccatggccttcgtgtctagcacagtggtggatgaaatatttgggtgatttgagttcaagtcaacaattttctcatccttgagatactcaattacgcctcctttctcgttgttgaaagccacgcaatccccaaattcaacatatggtatgtgatcggcatcggggaaggaggtgtcgacgtggatgtcgaagggaacctgcgccatgcggaggtagaggagcacggggaggcaggttgggcaggccgtaggtagcccgaagcagggcttgcgcgccaccagcaccttccgcgccgccgcctcccactccacggccgccgccgatgccatcgccgaggtgagctgggtgggggtttt

SEQ ID NO: 90852 - DNA, 534 bp, Zea mays
  Clone ID: MRT4577_182861C.1
gccagaaccttgcctagtgggcggttttatattattattaaagaaaaaactgcagagaaagcaaatgccctcgaaataatgaactgccgcccccagcaaacaaaatgccacctactgaccccaggatgatagagcccttgaaaaaagggggtcacaatcaaaaggggggcaaacttgggggaaagcggactggaacccactgtttttcgaaggtggggacagggtttcatcccatttcctaaataaacggggatttaaaaaaaaaaagcttttttttgggtccaaatttcttttgaatcaaaatatttaaaatcttaaaggggggcccaggggttccaaagggtttttcacccaaaacaggcgaagggccaatttttgaaaatttgccctcaacccttttaaaaaaatttggggaatttccctcaaaaatttttttgcagaacccctatttgcttaatagacttaggggtcaaattctgccaaggcaggaacctttgaaatggggaaaacccattgaccccgggttttttaatt

SEQ ID NO: 90853 - DNA, 240 bp, Zea mays
  Clone ID: MRT4577_182862C.1
agcatgttagcccaaataggaaaagaaaactatgttatcttataccgacttaattcagaacatgtaaaaaaagcacgacatgtgcatagagaattgctgaaccagcaaagatcattcatcaacggcatgtcactttgcattgtggccacttcaatctggttcaagtttggtcagatcttttagtgtgttaacgcttatattacttacaacaaaagataagcccacgaatcagtagatcga

SEQ ID NO: 90854 - DNA, 352 bp, Zea mays
  Clone ID: MRT4577_182863C.1
tttttctaccacaccccctattggtgatctgtgagggaaaacagggggcataagggccaagcggtaagaaccaaagggggggctaaaaaacccaaaccaaaaaggggatatgtcctttcttgcgaacagggcacaaaagaaacatgcctcccccggggggccggaccacacttgcaaggaaactactcggaggccggcccaggggaagggcatcaagaccgtctggaaacaaaacccggggggggggaatctgcaaaggttgaaccccgcccgtgggaaaaagggctgaccatttatggtttctaccaataaacccgaacctaccggtgaacccccatggcccacaaccccg

SEQ ID NO: 90855 - DNA, 434 bp, Zea mays
  unsure (1)..(434): unsure at all n locations
  Clone ID: MRT4577_182864C.1
gaaaaccccaagcacaaagcgcagaccgggaagagaagaaacaccaacgcgggggcgaggggcgaagaccagaaaaaagccgaagagggagagaaccacaagaagggcagngcacaccccaagcgacgagacagggaggccagaagcccacggaagagcccaccggccaaaacgccgccggggccggcacggcaaacccggcggagagcggcggggaggcaacgncgagaaaggcagccgcgccgaggacacacgaggcgcaaagcggagacacccaccaaggagcgcgccagcgaagcgcgcacgcacaacagacacacggcacaaggaaaaggaccgacaggccaacggcagcggccagaagagcaagacaacaacagaccgaacacggcaagaggaaagacaaggaagccaacaacacacacgggagcggc

SEQ ID NO: 90856 - DNA, 313 bp, Zea mays
  unsure (1)..(313): unsure at all n locations
  Clone ID: MRT4577_182865C.1
agtaggaaaggttcgggcgacccacacgtccggcaacatagaaagcacaattttgtttcaacaatcgcaaccaaaanaagggggtggcttatattccggggtgtctctgcaagggctgctaccacaaccattttaccacaatgctcacaagcttctatagctttctttgttttgcaatacctttgaccagcgctgtctacaatatgtgaaaacccaattcttgaaccctacaggatgcaacaggcgaacgcagcatgcatcttacctttatcagccttgttcttccaacaaccgtgggcccacatacaccatg

SEQ ID NO: 90857 - DNA, 339 bp, Zea mays
  Clone ID: MRT4577_182866C.1
gggcacaaaaccattccattttttaggaaggggctttcaacacccaatttattaccccaccatagaacgccgcactggattaaaaactgcaactgggggaccggtctacacctggcttggaatgaactccgtacccgtttcccactattcggtagggaaacaaagttggcccccaacctcccaattcctagccttacagggaacagataaacgttaaacacggcgcctgaatttcctcaaaaatgcatcccgtttaaatgcgggataccgctgggtattctggacctggctgccgggagctcggaaacaccggcctctggggttgccataaaccgggaa

SEQ ID NO: 90858 - DNA, 239 bp, Zea mays
  Clone ID: MRT4577_182867C.1
tgccagcgtaacatgctgcgtgcgactaacgctcgtgaaagtctaaggtgagcttgcctagagcgcggtgctgcagccgagactgaggacgaagcttggccatcaaatcatgctgaaggaattcatgctgtataggcctctccgtagctatgaacagcatactccaacccttgcttcgctagatccagcgggtgacattatcaggacgcttgtagtggggctctgacttatgcatatca

SEQ ID NO: 90859 - DNA, 307 bp, Zea mays
  Clone ID: MRT4577_182868C.1
aaaaaaaaaaaaaaaaataaattaaaaaatttaaaaaaaaaaaaaaaaaaatgaaaaaaaaagaaaaaaaaaaaaaaagaaaataaaaaaaggaaagcagcaagcgataaattaaaggtgctgtgcgataacatacatcgcattacgaatctctgtgatccctatgatggacttgaacggtccggtaaagcacatttttggactcatctaccaggatacccgcgtaatgctcaacatctttgtgcagaacgtaattagctactctgtaacctataacgagcaaggccgtttgaagagcgtcaccgag

SEQ ID NO: 90860 - DNA, 190 bp, Zea mays
  Clone ID: MRT4577_182869C.1
gtctaaccaactggatcaacaaatagggtggaaatatgttcatatgaattggaatttctgctagttagcagactatttgcaaccacaagaaatagaccgaacaccaggaattaacaaaaattttaagaaacgactgaaccgtcataataatataacatatgtggctagaatctatctcaaggaaaggcaa

SEQ ID NO: 90861 - DNA, 960 bp, Zea mays
  Clone ID: MRT4577_18286C.1
ccggcaaggctcctcgatcacactccaccacgattgccaagtgtcaatctcgacacggcagcaggagcctttgggccgtcgttacacgcacctatccatctcatctccgcggcacacgacacgatcgtggttggtgttggttacacgcgcctatatcgccggttcggccgcacgtccgcctcctcctctcctcctccctcttctcagctcaccagtgctcgctcacctttccccttcctttcctttcctttcctatcctcgtgccctcgaatcggaaacccagccagccatgtcgtactacggcgaccggcgcgcggagtcgtcgatcgtggaggcgttcacgctgtcgccgctgccgtacccggtgatcctggtgctgctgatggtgacgctgctgctgggcgcctcgtggttcttcacgtacgacgacttcatcgaggaggcgtcgcagcagctgagctgggcgctgctgggcgtgcccatcgcgctcgtcctcctcatccgctggatctcctccgtcgactccttcgagggctacctgggcttctacccgacggagagccgctggaagggccgctacgagcggggccccgccgagggcagctcgccctggggcgtcgccttgctcgtcctcctcctcctcgtgctcgccagcttccactccaccatccacgacatgtggggcccgtgaacggatgtagtgattgtagtcctgctcctgttcggttccacgcgcgcacgtatgcgcttgtgctactggttgctgcttgatcgatcgatggatcgatgattccatgtacatatttgttagggggatgctgcggctaggctattagctgcaggctatagagtttgagggtgatatacttatcagtttgctgcctgtaagactggttttggttttgctataatcgtgatatattccgatgtacagtatacagtaccctctttgctttccta

SEQ ID NO: 90862 - DNA, 788 bp, Zea mays
  unsure (1)..(788): unsure at all n locations
  Clone ID: MRT4577_182870C.1
gctgcgcacttgcttcccctagctcgactctccctgtccctctctctagaattttcttcatggagcttatccccttccccgcgcgctcgtgctcagcctctggtggaatctcctcatcgtctcctgctgtgctcggaccacacccctggcttccaatggcgcgcgcgccctccctgcttcctttgcccgtcttcctgcgcgcgtccgcctagctcggtcatcttcttcctggcgccccaccgagctcctgcctcccctccgtggagcactccctgcgcccagccactcccttttctcatctcccttaagctcgccatggagcttccctgtcgtgccccaactcctcttcctccagccgcgcagccgagctccctggccacctgcgcccctgcccctgcttccatggccgtgtgcctagctccatctcctagctcgcgaagctccctggctagcccgcggcttcccagcgcgccctgctcgatccctctgtgtcgcgcgcctggcttgtcctcagcccggctggagctccctccaactcgagctcccgcctcccatggttgcctgctccagctcgctttccctctacccgcgtcgctgctccagcgcatgttttccttgcgcccaggcccgcgccctgctcctgtgccgcgagctccagctcggatctcttccctaccgagctcctacgcgcgccctccgntctgttgccgcgtgcagccgtgccaactccttggccgncgtgccctgtccgctttcctctgccgcgcgctcgacgggctgtgtgtcgc

SEQ ID NO: 90863 - DNA, 258 bp, Zea mays
  Clone ID: MRT4577_182871C.1
tgcagcgtactaagctcgattccctcggcgctcgagaggataggacagggagatgttcacaagggagctgcaagtgtgtgatagcttcgcgctccattgccatgtctgtctcgagtgagatgtgccccagctgctattggcaggaagagcgagtctgcggcttgctgtgtttctgcttcttcttgctgtcctgcccgtctggatttcgtttccgtttgatcggagctggctctcagcttccgtttttcatttgtgtgg

SEQ ID NO: 90864 - DNA, 495 bp, Zea mays
  Clone ID: MRT4577_182872C.1
caattaaaaggtacaatcaaaaaagtgcacacacagacaaccaagccgaggggccacacgacggaacccaaccccgccaaaagaggaacccaaagggggagggaaaaagccaggggccccaccacaacaaaacagaaccagcccgggcgggcgcccgggggggggggccccaacacacgggcgggcgcccccaggggggcccggcccagggccaaacccggcgcaaccagggggggggcagcgggcggcgcgaaattggcccccccccacgggtccccacaacaaaccagcccgaagcgaaaaaagaaaagcccggggggccaaaagagggagccaacccccgggaactgaggggggcaaaccgggggggccccagggggggaaccaaacccgccaaccgccttaacgaaaccgcccacccccagggggaggaacccgggggaacgggcgctaataaaaagccccccccacccactcggagggcttgggcgtttg

SEQ ID NO: 90865 - DNA, 238 bp, Zea mays
  Clone ID: MRT4577_182873C.1
acctactatcaccctacgcaaccgacctagcaaagcagaccttcccgcgccgggtccaaaacccttttttctcttacaccacaaccaccctgtcactcactccacacacattctcctccaccgagtccaccctcgccctggcttctgccaccatccataccttccctccaaactttgtacaccaactcatcaccaatccactactcaactgcatcaacatctgccaccctcatatctt

SEQ ID NO: 90866 - DNA, 1298 bp, Zea mays
  Clone ID: MRT4577_182874C.1
acccaatccaaaccagacaagcaaggaatcccccgatggctcatcgcgttctcctcctcctctctctcgcgtcggccgccgcggttgccgccgccgtcgacgcggaggacccgctgatccggcaggtggttcccggtggatatgacaacgatctggagctgaacgcggagtcccacttcctgagcttcgtgcagcggttcggcaagtcctacaaggacgccgacgagcacggcgtcactaagttctccgacctcggcctccgcaagtcccggcgcgctctcctcagagaactcggggagtcggcgcacgaggcgcccgtgctccccaccgatggtctccccgacgatttcgactggagggaccacggcgccgtcggccccgtcaagaaccagggttcgtgcgggtcgtgctggtcgttcagcgcgtctggagcgctggagggtgcgcactacctcgcaactggcaagctggaggtgctttcggagcagcagttcgtcgactgtgaccacgagtgtgattcatcggagcctgattcatgtgattcgggttgcaatggtgggctaatgacgacggcattcagttatctccagaaggccggtggccttgagagtgagaaggattacccttacactgggagtgatggcaaatgcaagtttgacaagtccaagattgttgcttcagttcagaacttcagtgttgtgtctgtggacgaggctcaaatttctgctaacctcatcaaacatgggccattggcaatcggcatcaatgctgcctacatgcagacatacatcggaggcgtgtcatgcccatacatctgtggcaggcaccttgaccatggtgttctccttgttggatatggtgcttctggtttcgcccccattcgcctgaaggacaagccttactggatcatcaagaactcgtggggcgagaactggggggagaacggatactacaagatatgcaggggttccaacgttcgcaacaagtgcggcgtcgattccatggtctctaccgtgtccgcagtccacgcctcgaaggagtagactctggtcagcggtgataatcgtgattccatatattgtagaactataatccctgctagtaatccatttgtgctgtttatgtatcgaaggcagcaaagatgtgtgaagcggcaatgggatgcttgctgtaaggtaatatgtttggcttgctaggcatgctacacgctatttggatgtagcaacgttatcaccagctgtatacgctttttaatcgacaacatttgaataatatgtacataacattatgttgtgctc

SEQ ID NO: 90867 - DNA, 548 bp, Zea mays
  Clone ID: MRT4577_182875C.1
ataaacacacttacaaacactatctgaatggaagcgtacgggaacggacacgcgcgggttatgaggtcaaccagaagggggaacacgactttggggattctaacactaataaacaccttaaacagacacgtctaatattcgtcgaccttaaaaataaaccgaccgtacacatcatagcggcctacgtacaaacagaccccaaaccgagaagtacggttgcatactagtcgaggatgataacacatgtaaaccacaccggactaatatcaccggcacccacacgctcgatcacaccaacaggacatagcaggtcttcctgggcagaaactaacatctacacactgaaaaaccgaccgcgccctcatcaccaccaacccaaggatgctaacccgcaatctgcaaccggaacctatccgctgaacatttgtatatataccgaaggagcaaataactaagcggagggatgatgattgcaggtatctgcacaggatcattgtccattttatcatacacacactgcaatgtctgcacacataatgggtaaagcc

SEQ ID NO: 90868 - DNA, 4240 bp, Zea mays
  unsure (1)..(4240): unsure at all n locations
  Clone ID: MRT4577_182876C.1
cggccggggttgacaccatccagcttacaccaacaggctttacccactgcatgtgtacctcgcacctagaggaaggaaatgagcctctactgtaaacgggtttcactgtactaattttaaaaaataatttgctgttgcctgtgtatgacttttggatgatctctatgctgtgaagttgttggtctgaaattgggttaaaaaaaaaaaaaaaaagcaacccaatccaaaccagacaagcaaggaatcccccgatggctcatcgcgttctcctcctcctctctctcgcggctgccgccgcggtagccgccgccgtcgacgcggaggacccgctgatccggcaggtggttcccggtggagatgacaacgatctggagctgaacgcggagtcccacttcctgagcttcgtgcagcggttcggcaagtcctacaaggacgccgacgagcacgcgtaccggctatccgttttcaaggccaacctgcgccgcgcgcgccggcaccagctgctggacccgtcggcggagcacggcatcactaagttctccgacctcacgccggcagagttccgccggacctacctcggcctccgcaagtcccggcgcgctctcctcagagaactcggggagtcggcgcacgaggcgcccgtgctccccaccgatggtctccccgacgatttcgactggagggaccacggcgccgtcggccccgtcaagaaccagggttcgtgcgggtcgtgctggtcgttcagcgcgtctggagcgctggagggtgcgcactacctcgcaactggcaagctggaggtgctttcggagcagcagttcgtcgactgtgaccacgagtgtgattcatcggagcctgattcatgtgattcgggttgcaatggtgggctaatgacgacggcattcagttatctccagaaggccggtggccttgagagtgagaaggattacccttacactgggagtgatggcaaatgcaagtttgacaagtccaagattgttgcttcagttcagaacttcagtgttgtgtctgtggacgaggctcaaatttctgctaacctcatcaaacatgggccattggcaatcggcatcaatgctgcctacatgcagacatacatcggaggcgtgtcatgcccatacatctgtggcaggcaccttgaccatggtgttctccttgttggatatggtgcttctggtttcgcccccattcgcctgaaggacaagccttactggatcatcaagaactcgtggggcgagaactggggggagaacggatactacaagatatgcaggggttccaacgttcgcaacaagtgcggcgtcgattccatggtctctaccgtgtccgcagtccacgcctcgaaggagtagactctggtcagcggtgataatcgtgattccatatattgtagaactacaatccctgctagtaatccatttgtgctgtttatgtatcgaaggcagcaaagatgtgtgaagcggcaatgggatgcttgctgtaaggtaatatgtttggcttgctaggcatgctacacgctatttggatgtagcaacgttatcaccagctgtatacgctttttaatcgacaacatttgaataatatgtacataacattatgttgtgctctaaaaaaaaaaaaaaaaaaaaaaaaaaaaaaaaaaaaagaaaccaagcaacccaatccaaaccagacaagcaaggaatcccccgatggctcatcgcgttctcctcctcctctctctcgcgtcggccgccgcggttgccgccgccgtcgacgcggaggacccgctgatccggcaggtggttcccggtggagatgacaacgatctggagctgaacgcggagtcccacttcctgagcttcgtgcagcggttcggcaagtcctacaaggacgccgacgagcacgcgtaccggctgtccgttttcaaggccaacctgcgccgcgcgcgccggcaccagctgctggacccgtcggcggagcacggcgtcactaagttctccgacctcacgccggcagagttccgccggacctacctcgggcctccgcaagtcccggcgcgctctcctcagagaactcggggagtcggcgcacgaggcgcccgtgctccccaccgatggtctccccgacgatttcgactggagggaccacggcgccgtcggccccgtcaagaaccagggttcgtgcgggtcgtgctggtcgttcagcgcgtctggagcgctggagggtgcgcactacctcgcaactggcaagctggaggtgctttcggagcagcagttcgtcgactgtgaccacgagtgtgattcatcggagcctgattcatgtgattcgggttgcaatggtgggctaatgacgacggcattcagttatctccagaaggccggtggccttgagagtgagaaggattacccttacactgggagtgatggcaaatgcaagtttgacaagtccaagattgttgcttcagttcagaacttcagtgttgtgtctgtggacgaggctcaaatttctgctaacctcatcaaacatgggccattggcaatcggcatcaatgctgcctacatgcagacatacatcggaggcgtgtcatgcccatacatctgtggcaggcaccttgaccatggtgttctccttgattggatatggtgcttctggtttcgcccccattcgcctgaaggacaagccttactggatcatcaagaactcgtggggcgagaactggggggagaacggatactacaagatatgcaggggttccaacgttcgcaacaagtgcggcgtcgattccatggtctctaccgtgtccgcagtccacgcctcgaaggagtagactctggtcagcggtgataatcgtgattccatatattgtagaactataatccctgctagtaatccatttgtgctgtttatgtatcgaaggcagcaaagatgtgtgaagcggcaatgggatgcttgctgtaaggtaatatgtttggcttgctaggcatgctacacgctatttggatgtagcaacgttatcaccagctgtatacgctttttaatcgacaacatttgaataatatgtacataacattatgttgtgctcaaaaaagcgtatacagctggtgataacgttgcnntatccaaatagcgtgtagcatcccatatcgccaagtccccttccctcgcctcgcgttaggtagcctgcttccgacccgcacatctccctccggttctcgccatgggcgccggcgccaacaaccacgaggagtcgagccccctcatcccagctgcggttgccgcccccgcggacgagaagcccccgcaggctccggcgccggaggccgccaattactatgccgacggggtcccggtcgtgatgggcgagcccgtgtcggcccacgccttcggcggcgtcccgcgggagagctggaactccgggatcctctcctgcctcggccgcaacgacgagttctgcagcagcgacgtcgaagtgtgtcttcttggaacggtagcaccatgtgtgctctatggtagcaatgttgagaggcttgctgctggacaaggcacatttgcaaacagctgtttgccttacactgggctgtatttgcttgggaactctctctttgggtggaactgccttgccccatggttctctcatcccactcgtactgctattcgacaacgctacaatcttgagggtagctttgaggctttcaccaggcaatgtgggtgctgcggcgatctggtcgaggacgaggagaggcgtgagcacctagaggccgcctgtgaccttgcaacccactacctctgccacccctgcgccctctgccaggagggtcgcgagctgcgccgcagggttccccaccctggattcaacaatgggcactccgtctttgtcatgatgccgcccatggagcagaccatggggcgtggcatgtgagctattccaccaccttccctgccctagttttatctgtgcttcccgtggtttatcatctgctgctgttggccttgatgtgtgatgtgtcgtttgttcgtcagtaaatacgagtttgtgatatgaggtcgtgctgggaactttggattgtttgcttcttatcgactgcagtttggattctgaacagtcacttatctcctgtgttactgtgtttgtacggtggtcctcgatgggcctgtaaatgtgaaatgcatttcgtcgtaaaaaaaaaaaaaaaaaaaaaaaaaaaaaaaaaaaaaaaaacaaaaaaaaaaaaaaaaagcggcc

SEQ ID NO: 90869 - DNA, 511 bp, Zea mays
  Clone ID: MRT4577_182877C.1
ggtaccctcgttgtccggccgggtagactgagctgggctgagaacatctgaagtaagcatgaccactagttacgtgctacccagtgtgcagtgctgaataggccttagggatgaccccatgggcatgtacgaagaagactagtggggaacagcatgtcaccaaaggtgctagctgaccggcacttgtattattcatattttttattctatcaagccgatagcataatcattttctaactaatcaagttatgtgacatctaccgatcccgtgattccgaatcaagagatgatttgagcaactcgtgagtcaagtagtatagtagattagccctcgtaaggcctcccactagttaagtatccgtcctaacgtcaggaatagagtaaagggacgaccttttctcttctttccaagtgcttgctctttcgttaagcataaactcagataggcgtagaattggtgtctgtgtgtttcattggtatgggacgtagacccggccctgtattcatacag

SEQ ID NO: 90870 - DNA, 164 bp, Zea mays
  Clone ID: MRT4577_182878C.1
gggtattatgagcgggagactagcatactggttttcgattttgttgaattatagaacttacatgaataacatatgggtgcaggtggaaagcactatttgcaatctgagttgatcgctgtggtttaaaactcatggactatataattgtgttcaaaggataaaaa

SEQ ID NO: 90871 - DNA, 396 bp, Zea mays
  Clone ID: MRT4577_182879C.1
atgggcttcgctcctataccagctgtgacagaaccttccaagtcattaggcccacctacagttgtccttgtccaatggacctcagacaaccctgcaggtgcccctgatcacttgacaagttcggtatctgatttccttaccttgcccaagagtgtttcacccgtcatgcagacattacaatacatcggagatcaggttcacgccaatcgagagcacagatacatcaccgtccagcctcttgccacggagggtacacgctactctcgccatctctccactccaattgtgtgttatcttattctgagcaatgctaagcataagaaaaacctttttgtaaaacaggggattaaggagaagtactcaaatccaaggaaggaaatgcagcaactggtttag

SEQ ID NO: 90872 - DNA, 1023 bp, Zea mays
  Clone ID: MRT4577_18287C.1
ccggccgggaagtcctcctggatcacactccaccacgattgccaagtgtcaaatcagcaggcgtgggcgtacgatctggacacggcagcaggagcctttgggccgtcgttacacgcacctatccatctcatcaccgcggcacacggcacgacacgatcgtggttggtgttggttacacgcgcctatatcgccggttcggccgcacgtccgcctcctcctctcctcccctcttctcactcagctcaccagtgctcgctcacctttcccctccctttcctttcctttgctttcctatccttgtgccctcgaatcggaaacccagccagccatgtcgtactacggcgaccggcgcgcggagtcgtcgatcgtggaggcgttcacgctgtcgccgctgccgtacccggtgatcctggtgctgctgatggtgacgctgctgctgggcgcctcgtggttcttcacgtacgacgacttcatcgaggaggcgtcgcagcagctgagctgggcgctgctgggcgtgcccatcgcgctcgtcctcctcatccgctggatctcctccgtcgactccttcgagggctacctgggcttctacccgagggagagccgctggaagggccgctacgagcggggccccgccgagggcagctcgccctggggcgtcgccttgctcgtcctcctcctcctcgtgctcgccagcttccactccaccatccacgacatgtgggggccgtgaacggccggatgtgggtcctgctcctgttcgattccacgcgcgcacgtatgcgattgtactgctggttgctgcttgatcgatcgatggatcgatgattccatgtacatatttgatagggggatgctgctgctaggctattagctgcaggctatagagtttgagggtgatatacttatcagtttgctgcctgtaagactggttttggttttgctataatcgtgatgtattcagatgtacagtaccctctttgctttggtttcccctgtcttggaattgactgctggaaccgtctc

SEQ ID NO: 90873 - DNA, 541 bp, Zea mays
  Clone ID: MRT4577_182880C.1
ggtacgtgctcgatctctcgtcgatatggggagctgcgcatccaagtcctgctgcgactggtgctggaggaaggcgctgggcgcgacggcgacggcggcggcgaggcgggggcatcagggcgcggcggcggtgcacccgtggacgccgcccgaggtgccgccgggccagcgggtcaccgtgcgcatgcgcgccagcgagttccgcgcactggccgccgtccgcagcaacgacaggggcgcaggcgacggcgacgtcgcccgcctcatcctcgacgggtgcgccgccggccgctgggcgtggtcgccggcgccggagtatgtagctaggaggatcggacctacgtatagtacgagctagtattatagcctagtcgtaattcgtgaaaattaacctactatctgcagagttgctgtctctctaattcgtgaaaatcaaaggaactgtatatattacttagctagctacgtctatgtacgtacggcgcggccacgtacatcatggcatgcatatataaagcagttgagacgtcatccgtccatc

SEQ ID NO: 90874 - DNA, 366 bp, Zea mays
  Clone ID: MRT4577_182881C.1
gccgaaaagcagactctttttgaacagaggcacaaaccccaacgctaacctgaaacacactcacatgctgctacatgaaaggggccgcaagaaggcaaccaaaacagaactctttaagttacaaactgggtaagcactacagggacttacaagaaaattgagctatagccaagataaggttacagctactaatgaaaaaccaaagagaccaagcccaggcgcccttttcttctcaaaggtttccaaggatgggtatatgattggcacagcgagcaatataccagttcctggaccaaacccacccaataaaacagccaggacggtcaatgcgccaatgcatacaccaccaaatgcagcagcagtggg

SEQ ID NO: 90875 - DNA, 366 bp, Zea mays
  unsure (1)..(366): unsure at all n locations
  Clone ID: MRT4577_182882C.1
nnnnccttaatttttttttattttttttttttttttgtttaataaaggggggtaccccgcatctccaaaaagcaggtccagttcaatggcggatgacagacgacctctttacatttcgccctaccctgacttcgacgacgctaacttaagacgacgacactaacttaattattaataaccatgaccttgacgacgacgacgcgacactaacttaagacgacgacactaacttaattattaataaccatgaccttgacgaccaccgagaacgatctcctctcccccgtcttcgagagctggtgcttcagttggagctgggaggcgcgaagaagatctccgagtttagccttttggagcggaagagct

SEQ ID NO: 90876 - DNA, 494 bp, Zea mays
  unsure (1)..(494): unsure at all n locations
  Clone ID: MRT4577_182883C.1
ctgagtttctgaccaaaaccagacatttctgtaacttgatgaccaagcatacgaggaacnnnnnnngttcatctcatcagcttagatcctcgcatcacaggaaaccctaaagtagttccagannnnnnnnnnnnntccagcaagataccatttgcagcgatagagaaatatgcatggacagaggcaacttgtccagtatgcatggaattcccacacaacgctgttcttctactctgttcatcacatggcaatggctattgcccatatatttgtgcttccagctaccaacactcaaactgtcttgatcagcctgtggagtcatgcagaaaagaagcctctgaggacccagatgcaatagagcttgcgtgtcccctttgccgtggtgaggtcaagtgttataccttggttgacccagctcggaagcagctgaatcacaagaagaggagctccatggaagatggttgttnnnnnnnnnnnnnnnnnnnngagctctg

SEQ ID NO: 90877 - DNA, 149 bp, Zea mays
  unsure (1)..(149): unsure at all n locations
  Clone ID: MRT4577_182884C.1
atgtcaaagaacaaatgggccctccctttatttcaaccgatccctgccntncaaattggccatttgcaattcagtacccattaaaccgctagagagaaaagggggatttgcctcatttattccttttaacagaaaacatcacatgttta

SEQ ID NO: 90878 - DNA, 387 bp, Zea mays
  Clone ID: MRT4577_182885C.1
aaaccccaacccacatttgttaagggaaattaggggggaaattagtttaagttaccctccaatttactttaatacatttgggttaaagtcaatactagaaaatccaaactccccctaatgctttttttgcactttaaattggcaagggattttgcaatacaatttaagcattttcggggggaacaacccgttttagtttcttaaatttcacccccttgtgcttttacccgtaggcaactgcaattggttttttgaacaacaaaacattgggggtttggttactggccaaaaaataggtttgcccgaacaaaacttttggggatgggtatcttgttaaaaaagggttccctggaaattccattattttttttggacggataaactttt

SEQ ID NO: 90879 - DNA, 353 bp, Zea mays
  Clone ID: MRT4577_182886C.1
acaaggttcaccgagggctctaccccgacgccgcgccctccaccacccagacggcggcgggccccgaccccaaggctgccggcctgcgccgccgccgccgcgcgctcctccgcctccgcggcaagcgcctccgcgacctctcccgctgggaggccctcgcctccgaacttctcgcgccgcttcccgctcccccgccaccggctccgacatcccaatcccctcccgtcgctgcctcctcctcctcctcctccttggtctctgtcctcgacgagctcctcgcacaggctgacattcaagttgagctgatgaagaaagtgtgccagtggtgcgacgaggccaactctatctgcgac

SEQ ID NO: 90880 - DNA, 477 bp, Zea mays
  Clone ID: MRT4577_182887C.1
gattccaaaaaccccggcaaaaaattattttatttaccaaacctaaacccaaaggttccaaaaaaaaacccacaaaaggaccccccccaattaaacccgcgggccccccccttttaaaaaaaacaaaccttcccaaccaaaggggggggggaaaccacctctttggggggtttcaaaccagtggtagccaaaaaaggatgggccggcccccggggtgggcccagaaattaccgccgggccccccccggctacccaactttcccttaaaggggggcctaaaaaacttgcgtgaataaaggaaaaacttggttccttgcgaaaaaaatttttcctcccaaatccccaccacctaacaaaccggaaccaaaaatggtaaaaccgggggggcctaagaaaggaacaacccacccataatggggtgggttcccctgaccgatttcaaaggggaaaaaaagccgggccaccctgtaaaataaa

SEQ ID NO: 90881 - DNA, 349 bp, Zea mays
  Clone ID: MRT4577_182888C.1
gccacacctacagcgacacctagagctagagctactagagcgactgttaggaggcgttcctgcggcacgggtgccggacgccgtagggcggcgtgcagcacagctacggctacttcggctgagcgtacaagcacggggcttgcaacctcagctgcttgcgccgctaccagtcgtacaagagccgctaggatctcggcggctgacgccatgttcgagacctaccaaagcatcgtccattacaccgcctgctcgaccaataaccgtcacgtcctacgctaccgcgcgattgcatatatacgctctgatgcaagtgcattgcagaacgtgcacctacgtatataggtattcc

SEQ ID NO: 90882 - DNA, 480 bp, Zea mays
  Clone ID: MRT4577_182889C.1
ctgccgtaacacacccatatacgtgaacccgcctccgaccgagcagtaggagactcgtcaatgagagtcgcgcaggaggctactatgatggacaggtggaagagaaagcgcatgaagaagtggaagagaaatcgctcattgatgacgccaagatcctagcatgcatgatgccgattgcgaatggtggtgtcaattatagatgtgttacgattcttcaatgcatgcgtttatgaacatatgcacatcctgagctcgacttaaccctctgtcatgggaccaatggttcgactcggaccctgcgctccagtacgccctatatctagtgtactacctatattcagagaattgtgcttcaacctatatcgatacccgctatctcaacctattatgacggacctttattctgctgataatatcgacctattctgctagctcactgaacgacaatttacgaccctatgactgcgaacgctctggaac

SEQ ID NO: 90883 - DNA, 822 bp, Zea mays
  Clone ID: MRT4577_18288C.1
gttacacgcgcctatatcgccggttcggccgcacgtccgcctcctcctctcctcccctcttctcactcagctcaccagtgctcgctcacctttcccctccctttcctttcctttgctttcctatccttgtgccctcgaatcggaaacccagccagccatgtcgtactacggcgaccggcgcgcggagtcgtcgatcgtggaggcgttcacgctgtcgccgctgccgtacccggtgatcctggtgctgctgatggtgacgctgctgctgggcgcctcgtggttcttcacgtacgacgacttcatcgaggaggcgtcgcagcagctgagctgggcgctgctgggcgtgcccatcgcgctcgtcctcctcatccgctggatctcctccgtcgactccttcgagggctacctgggcttctacccgagggagagccgctggaagggccgctacgagcggggccccgccgagggcagctcgccctggggcgtcgccttgctcgtcctcctactcctcgtgctcgccagcttccactccaccatccacgacatgtgggggccgtgaacggccggatgtgggtcctgctcctgttcggttccacggatgtgcgcttgtgctactggttgctgcttgatcgatcgatgattccatgtacatatttgttagggggatgctgctgctagagtttgagggtgatatacttatcagtttgctgcctgtaagactggttttggttttgctataatcgtgatatattcagatgtacagtaccctctttgctttggttcccctgtattggaatttggaatttactggtggaaccgtcc

SEQ ID NO: 90884 - DNA, 542 bp, Zea mays
  Clone ID: MRT4577_182890C.1
tcgggaacagcttccaccatcgaccatccatcacctcacctccaagctccaaggaatctaccctcgttcttctcacaaagcgctgcagcggacagcagcgcagcacgagagagccgagcgcgaggtgcaggaccgcaaaacagaggcgaagcgaaggacctaacctacgtagcaacgctccgctccgcggcgatgggccacgaggggtcgtgccgctgcgagctctgcggcgcgcccgcggccgtgcactgcgcggcggacgaggctttcctctgcgccgcctgcgacgccaaggtgcacggcgccaacttcctcgcgtcgcggcaccgccgcacgcgcctccgcctcgcggccgccgccgacccgccgccggacgacgaggccgggtacgggtccgccgcgagctcctgcgtgtccacggccgactccgcgccgcggccgaggcgtggggcccgcgcgccggcccggagcgtgcgccccgagggcgtgctcgagggctggggccagcggatggggctcggggcgggggggcgcccgcgcgt

SEQ ID NO: 90885 - DNA, 363 bp, Zea mays
  Clone ID: MRT4577_182891C.1
ttttaatatttagaagtaggacttcacacattaagggagatttttaaagaaaccacgcctaatttcaccgcaaacagacgctgaacaagacagaacaccggacggtaaccacgtaatttacagagtatacaacaccagggattctatagcagcctgttaatcacgctgaatccttgaccctagatccaaatatcataggtgcagtgccctccaggattttttatatcgtgggccagggcaggaccattaggattggtgccaaaaccagctaataacttggggtcgacaactaagcctacttattcggagatgacaacgaccagtaacatgtgggagccgattttgacatggacattaccataa

SEQ ID NO: 90886 - DNA, 281 bp, Zea mays
  Clone ID: MRT4577_182892C.1
atcttatggtatgagtttttattattttatactgtatgttgaacatagggtatcatgctcagcatcaacgatcatgtaaaaagtgtaaaacaacctctgcagaagaaaaaagaaagatgacttcatgataaaacttgcccaagccttatgctaacaaccaatcctcgcgcccagagaaaaaaacaggaaaccttacacgtaaccaaactgggcccaacatggggtgggtgggtggtccccgataaaaagacccggcatgcagtgaaagaaaccccccaagt

SEQ ID NO: 90887 - DNA, 207 bp, Zea mays
  Clone ID: MRT4577_182893C.1
gccaccgcagacgaagctgagcagcaagcagacgcaccacggatcccgggcatcaggagatagaagcacaggccgaggaggcagagaagagcgagcctcccagagccaggcagcggcgcagacgcagaggcccagagcggccaaccacagcacggcaggcacgccgaccccagttcaggacgccgacgcgagagaggccccagggct

SEQ ID NO: 90888 - DNA, 291 bp, Zea mays
  Clone ID: MRT4577_182894C.1
gttctagatcgcgaggccgccctttttttttttttttttttttttttttttttttggttttttttttggagaacaacgaaaccaaacccatgttttatcaacaacaataataataatgctgttaaaccagcaaacactggattagaccctaacagctgtcgttgttaaaccagccttcactggagaagggtcacctagctcccggaactggcggcgccacttccacgcccggagccatgccgcccaagcttgacccgtcgcaggtgggggaggtgttcgtccgtgtgaccg

SEQ ID NO: 90889 - DNA, 2184 bp, Zea mays
  Clone ID: MRT4577_182895C.1
atgtctcaggaaaagaaagctgttaccgaaatgaaactgagccttcttgaggagaagaatctgggatttcttgaatcgatagcaaagacgaatacagagaagatcactagggaaattttagaaggtttatctgaagacactggtgaaagtgacagttatgatgtagaaagtgggggtcacacagtcttcggaaaatcgagtattaaacaaagtcatcttgataacatgagggggagatattttcgagacatgtctactgtgagggaagatgacggagagaggactgtgccaactcccgaagataatgaagtcatgatcttccgaagcttttttaaagatgggtttcggttccctttaaacagatttgtggttgaagttttgaagatatatcaggtctaccttcatcaacttactcccgaagcaatcataagaatgagaatcttcgtatgggccgtgaagagccagggtttggagccaaatgcaaaaagtttctgcaatatgcacgagctattatatgagacgaaaccctgggataaagagcaatatcataacaattttggctgttatagcttcggtgcttgctctgggtcaagctgtcccgtgccaacttttcgaaagagatggcccggagactggatgaaggaatggttctatcgcttcggtctccggaaaccaaaggtggatattgacgaagcaaccgaagaatgccagagggccttcggcgtagtttgctctttcatcgggacaagggatttagtccaggaacacatagccttcagagtatggccacttgtagaaaagtggaaaatgccaaaggagactatcaccagatctgacgaaggtgggttgattaggatgaagttcaccttcagatacgaaggccgggagaagaaaaggctcaaccgagtttttgatgctattgggtttatgtaccctgactaccgctacccgctacgggggcgaaagagaaaagatgcaacttccgggaaagatactgcttcagctgctccaagcgagcctgcgccgaagagaaaaaaggtgaaggtccttactcaccgaccacgcttcattgaaccggctatagtgcccgagtttgtcggtgagacctcttcggttgctgaagccaaaaagcttacacctgcgcagaaaattgacgagccggctgcaatgccggagatggaaaaaattgaagaaccgaaggctaaagagacaaggacatcggaagttttaagtccttcggcaagagttgaggtgtcaatgccgaaggcacaaaaggaccttaacacgactcccaaaaggaagagaatgcgtgaagctcagttctatgcgcaaaaattgaaatatccaaaaggggcactgatattcaacggtagtggagaagaagacttcttttattgtctccctgatagcaaggagatttctgtctgtcgagagatgagcaagagcttcggattcccgacattagaagacggactttcggtgctatcaaaagatgagttggccgacagcctagcatacaatagtttaaagggccttattcttagcaatgccctcagggcacaaaaagatgccgaagatgaagggtgtaccatagccttgaacaaccttcgttccgaagtaattgaactaaggaacgaagaagctaaacgagaaattagcgatcaaaggacaaaatatttagagaaaaacattgaagaacttcgtatatccaaggaaaaatgttttgagaaagctatggattgtgtgaagaggataaaaattagcttcgtcaacgttggcacatactcaagcgaggagaatttcatagggccaattccctatatgccactggaaaatatactcatttcttatacaaaagacccctcggctgaagcaagcttggttggtggaaaatttttcaccgacatctgggaaaatggcggtcgggaaatggctcaagaaattataaggaaaagtgaaaaagatacttacgatgctagagaagtagcagaggccgctaagaaaactgcggatctcgagaggcgaatagccgcactatctcctctcccagagcccgtcgagccattggtggaccccaaagcaaaggaggatgatgaaatcataaaaatggccgaagctattatggataaagttgttgatcaactattaaatgaagctgcagaagtagttttaaaagaagattag

SEQ ID NO: 90890 - DNA, 641 bp, Zea mays
  Clone ID: MRT4577_182896C.1
caggccggccgggccgggatcaaaaacagccaactgctccattgtcattccccgccaatcacttcacgtgctccgacaccgctgagtgagaacagacactggcgataagggcgatggctcggctatcggcatcgatctcggcacgacgtactcttgagtcggagtgtggcagcccgacacgccgatagatcattgtcaacgaccagggtcaattggaccaccccctcgtacgacgccttcaccgattccgaccgccacatagtagatgcggcaaacaaccagttcgccatgcaacccatcaagaccgactctgatgcaacgcgtctaatcggaaggaggctcagtgatgttattgttcagagcgccctcaagttgtggccattcgaggtaatttctgggcctggtgagaagccaatgattgatgttcaccaccagggtgaggagaagcagttcgcagctgaagagatctcctctatggatcttatccagatgaccgagattgctgaagcttaccttggcagaacgattcaaaatgctgtggtcacagtctctgcctaatacaatgactcacggaggaacgccacaaaggatgctggggtgaacgcaggccttaatgcgctgcgtatcatcaaccgagccaa

SEQ ID NO: 90891 - DNA, 346 bp, Zea mays
  Clone ID: MRT4577_182897C.1
atttattcctctgcgtgcatgaggtgtccagcgcccgatagggcgcttccttttctagtaggtttggaattttttttaggcagaggaggccctggattgtaaccaggactcgaggggccaggaacgaatcccatgcgggcgatgagaagacgtgcggcggcagcgcaagcgagaagacaaggtgtcgatgagcagggatcgtgacgacgacatccttcccgccgtcggcaacctccactacgctgtcaagcttctatccaggtggtctctctctcttttgttagctagggctcttgagttgagccatttcttggtcctagtgttcatggtagtggactaggggcgt

SEQ ID NO: 90892 - DNA, 2706 bp, Zea mays
  Clone ID: MRT4577_182898C.1
atgtctaaagataagaaagctgttgctgaaacaaagctgagccttcttgaggagaagaatcttggctttcttgaatcaatatcaaagacaaatacagaaaagattacaagggaaattttggaaggtttatctgaagatactggtgatagtgacaattatgatgccgaaagtgggggggaagactcagaagatcgaccctggcagccaagccatgcagtttttggaaaatcaaccattaaacaaagccatcttgccaatatgagaggagagaaaacttgtcctactctcgaggaaaatgaagtcgtgatcttccgaagcttcttcaaggctgggcttcggtttcctctaagcagtttcgtggttaaagttttgaagatatttgaaatctgccttcatcaaattactctcgaagcaatcataaggatgggaatctttgtatgggccgtgaagaaccaaggtttggagccaaatgcaaaaagtttctgcaatatgcatgagctattatatgagacgaaaccctggggtaaagaacaatattataacaattttggctgctatagcttcggtgctcgatctgggtcaagttgtcccgtgccaacctttcgaaagagatggcccggagactggatgaaggaatggttctatgtgaaaaacgatttgaaggtacgagaagatattaaagatatcatcatgcgccctatctggcagcgtttcggcctccggaaaccgaaggtggaaatggatgaatcagccgaagagtgccagagggccttcggcatagtctgctctttcatcgggactagggacttagttcaagagcacgtggcctacaggatatggccattggtagctaactgggaaatgccgaaggaaaccatcaacaacccacacaaaggtggcctggttcgactaaaatataccttcaggttcgtagaccaatttatcgagccagacgatgattggttgaaatgcgttgaagctacaagcgatgaactgcttgggccatactcgaaggcagaagatactgcactatctgcggccttcggaggccggaagaagaaaagactcaaccgagtttttgatgctattgggttcgtttatcctgactaccgttacccaatacgagatcaaaaaagaaaagttacggcttatgtgaaggaagttgcttcggccgctcctagtgagcaagcgccgaagagaaaaaagatgaaagttcttacgcaccggccacgctatattgagccggccacagtgcccgagtttgtcgacggaaaaatggaagaaccgagggctgaagagacaaagacatcggaagttttaagtccttcagcaagagttgaggtgccaatgccaacgccgaaggcacaaaaggaccttacaacaactcccaagagaaagagaatggttaacgtgttagatgtgttagaaacaataaaatcttcaagctctacttcgaagataattgtcgaagctccaaaaacagaaattgaggccgaagctgccaaaagccatgtggaaatcgaaactgggctttcagagcctgccaagagggaattcttggaaattggaaaagaaacagaaaacgaatctgtagaagaaattttatctgagaaaactgccatccctattcccgaagcatcttccgaagctcccaactatgtcttacaccatgcttcgggtaaaaatctgactgaaaaagaaaagcgagaagctcagttctatgcgcaaaaattgaaatatccgaaaggggcgttgatattcaatggcagtggagaagaagacttcttgtattgcctcccagacagcaaggagatctctgtctgccgggagatggcaagaaacttcggattcccaactctagaagatgggctttcagttttgtcaaaagatgaattagccgacagcttagcatataacaacttaaagggccttattctcagcaatgccctcagagcgcaaaaaagtgccgaagatgaagggtgcgccatggctttaaacaaccttcgttctgaagtaattgagctaaggaacgaagagaaaaacattgaagaacttcgtgcatccaaggaaaggtgttatgaaaagtttatagaatgtgttaagaaaataaaaactagcttcgccaacgttggcgcgtattcaagcgaggaaaactccgtaaagggcgaccccgagggcccaattgaatggaccagtcacgaagccgaagcttttgaggaagttttgaatggccgcggagacatatgtgccttctcgggtgctaggggggttgccactattttggagagtagaggttgcgatcatgtgaaatccttggcacaagccgaggccgccttatcttctgaagatataaaagacccttcggccgaagcaagcttggttggtggtaaatttttcaccgacatctgggaaaatggtggccgagagatggctcaagaaattataaggaaaagtgaaaaaggtattcacgacgctagaaatgtagcagaggccgctgagaaaagtgcggatctcgagaggcgaatagacttatttacactttgtaacacagccgcactatcttctcccccagagcccgccgagccattggcggaccccaacgcaaagggggatgatgaaattagaaaaatggccgaagctattatggataaggttgtcgatcaactactaaacgaagctgcggaagtagtcttaagagaagattag

SEQ ID NO: 90893 - DNA, 728 bp, Zea mays
  Clone ID: MRT4577_182899C.1
ccttttgccctcttctcttgcgcggccctttcgctacatggcggcggagggggaggacaagaaggatgctaattccgttggaggcggcggcggcggcgagaacaccctggaggcggcggaggaggcgattctgcaggcggtagggcaagaacccggtcaagaattggagggcgaggcggaggagagcgcagatcgagaggggaacggcgacgacactgggaaggaagatagtgggtgtaaagatctggtcctggtagaggaccctgtcctggtcgaggatccagaggaagcggcagcaactgcagcacttcaggaagagatgagagcgcttttggcgtctgtccctgaaggtgctggggcatcatttactgcgatgcagctgcaggagctagagcagcagtctcgggtataccagtatatggctgcccgtgtgcctgtgcctacccatctcgtcttccccatctggaagagtgttaccggtgcatcctctgaaggcgcgcagaattaccctacattgatgggattggcaacactctgcttggacttcgggaagagcccagaaccagaaccaggaaggtgccggcgaacagatggaaaaaagtggcgatgctggagaaaaacaatcccaaacgagaaatattgtgaacgccatatgcaccgtggtcgcaagcgtcctgtacaggttattgttgaggatgacgagcctgattccgcatcagggtcaaaat

SEQ ID NO: 90894 - DNA, 413 bp, Zea mays
  Clone ID: MRT4577_18289C.1
aagtaaagtaaaattttcttttctccaaagggcttaactaaaaactaatcccacacggggagttcaaaattaacatcttttcccgaccacgaaatggcatgaggggcccacgggccgaacaagcaaaatgacccccccggggcccccaagcccgcaggccacaccccggggacccgggggaatcccacaaaccagggcggcccgggccaataccaaccacccacgggccccggcaaacacatccccccccccggcgctctgcaccatggccaagcagccgcccctgaaccccgcacccctgaacccggcccccagggcccccggggcccccaggagcaccccgggccgcggggatcattaccttggccccacaaccccaggggcatatcgagccgccacccccacccgtggga

SEQ ID NO: 90895 - DNA, 212 bp, Zea mays
  Clone ID: MRT4577_1828C.1
agcaaacccaaatggtatttgttttcaattttatttatacctttcaagttattccttataagtatcaagttaaacacaattggttttaatgagaagctatttgacattgtttttaaattttttcttatatggtaaatgtatatccagaataatgtatcgaaatttattgcataaactataaaatcattttcaaaatctcaattccacaaata

SEQ ID NO: 90896 - DNA, 747 bp, Zea mays
  Clone ID: MRT4577_182900C.1
atgagcaagagcttcggattcccgacattagaagacggactttcgatgctgtcaaaagatgagttggccgacagcttagcatacaatagtttaaagggtcttattcttagcaatgccctcagggcacaaaaagatgctgaagatgaagggtgtaccatagccttgaacaaccttcgttccgaagtaattgaactaaggaacgaagctaaacgagaaattagcgatcaaaggacaaaatatttagagaaaaacattgaagaacttcgtatatccaaggaaaaatgttttgagaaatctatggattgtgtgaagaggataaaaattagcttcgccaacgttggcgcgtactcaagcgaggagaatttcataatgggcgatcccgagggcccaattgaatggaccagccacgaagctgaagcttttgaggaagttttgaatggtcgtggggacatatgcgccttcttgggtgctagggagattgccgctatcttggagaggataggctgcgaacatgtgaaatccttggcgcaaaccgaggctgccttatctattgaagatacaaaagacccctcggccgaagcaagcttggttggtggaaaaattttcaccgacatctgggaaaatggcggtcgggaaatggctcaagaaattataaggaaaagtgtaaaagatactcacgatgctagagaagcagcagaggccgctgagaaaactgcggatctcgagaggcgaattggtattgattaa

SEQ ID NO: 90897 - DNA, 635 bp, Zea mays
  Clone ID: MRT4577_182901C.1
gaaattgcttagaggaaaccgaagcccagccttgaagaagcttcggaagatcactacttcattttcctcgggagtaggacaagtcttctctccttcatcagccctcacaatagacaaatcccaaaaatatctacctctcatattggcaagatggctttgtttaatggttgattttccaaaaactgcatggcttggccgccagggtcgatcttccgagtcttcccccccactttcggcatcataactgtcactatcaccagtatcttcagataaaccttccaaaatttcccttgaaatcttttctgtatttgtcttcgatactgattcaagaaagccaagattcttctcctcaagaaggctcagctttgtttcagcaacaactttcttatcttcggatatcagaaaaggggaaccaacttaaaaggaaaaaggctatttagacctcgatggatcactatcgagttactagcaaatgtaaagggcatgggtgtaattttacatgagctgtgtcgcgtgcctataaatagatgagcagggcccccgtactgttcacaaggactggtcatttttgcctttgtgtcacgcttgtacttttaccttctcacaagcccaaggtacatttgtaatttgatatc

SEQ ID NO: 90898 - DNA, 406 bp, Zea mays
  Clone ID: MRT4577_182902C.1
ggggcgctttgctttaaagccccgaccggcgggatttacattattaaccttggcaagacatgggaaaaacttcacttgcagccgggggttatttgtcctctagaaaacccaggggatttattttcacaccgcccccccctatatgcagcgtgctgtgctcaaaattgctcaatacactggcgctcattccatcattgggagggacacccctggtaccttcactaattagcttcagacgtccttcaacgaggctcgactgcttattcttaccgacccaaggactgaccatcagccaattaaggagtgtgctctggggaacatacacaccattgccttctgtgatactgactctcccatgcgggatgtcgatatcggcattccagcgaacaacaaggggaggaacagc

SEQ ID NO: 90899 - DNA, 2589 bp, Zea mays
  Clone ID: MRT4577_182903C.1
atggcaaagacaaatacagagaagattaccagggagattttggaaggcttgtctgaagatactggtgatagcgacagttatgatgtagaaagtgggggtgaagactccgaagatcgaccgtggcgaccaagtcacacagtcttcgttctgaagatatatgaggagtaccttcaccaacttactcccaaagcaattataagaatgagaatctttgtatgggccgtgaagagccaaggtttggagccaaatgcaaaaagtttctgcaatatgcatgaactattatatgagacgaaaccttggggtaaagagcaatatcataacaattttggctgctatagcttcggtgctcgatctgggtcaagctgttccgtgccaacctttcgaaagagatggcccggagattggatgaaggaatggttctatgtgaaaaacgatttgaaggcacgagaagatattaaagatatcatcatgcgccctatctggcagcgattcggccttcagaaaccgaaggtggatattgacgaggcagccgaagaatgccagagggcctttggcgtagtttgttctttcatcgggacaagggatttgatccaggaacacatagccttcagagtatggccacttgtggagaagtgggaaatgccaaaggagactattatcaaatctgacgaaggtgggttggttaggatgaaatacaccttcaggtatgaaggtaagtttgttgagccagacgatgattggttgaaatgtattgaagctacaagcgatgaactgcttgggccatactcgaaggcagaagatactgcactatctgcggccttcggaggccggaagaagaaaagactcaaccgagtttttgatgctattgggttcgtctatcctgactaccgttacccaatacggggtcaaaaaagaaaaggtacggcttctgtgaaggaagttgcttcggccgctcctagtgagccagcgcagaagagaaaaaagatgaaagttcttacgcaccgaccacactatattgagccggtcacagtgcctgagtttgtcggtgaaacctcttcggccactgaagccaaagagcctactcatctgcggaatactgaagagctggctgcaatgccagagacggaaaaaatggaagaaccgagggctgaagagacaaagacatcggaagttttaagtccttcagcaagagttgaggtgccaatgccaacaccgaaggcacaaaaggaccttacaacaactcccaagagaaagagaatggttaacatgttagatgtgctagaaacaataaaatcttcaagctctacttcgaagatagctgtcgaagctccaaaaacagaaattgaggccgaagctgccaaaagccaagtggaaaccgaaactgggctttcagagcctgccaagagggaattcttggaaattggaaaagaaacagaaaaagattctgtagaagaaattttatctgagaaaaccaccatccctattcccgaagcatcttccgaagctcccaactatgtcttacgccatgcttcgggtaaaaatctgactgaaaaagaaatgcgagaagctcagttctatgcgcaaaaattgaaatatccgaaatgggcgttgatattcaatggcagtggagaagaagacttcttgtattgcctcccagacagcaaggagatctctgtctgccgggagatggcaagaaacttcggattcccaactctagaagatgggttttcagttttgtcaaaagatgaattggccgacagcttagcatataacagcttaaagggccttattctcagcaatgccctcagagcgcaaaaaagtgccgaagatgaagggtgcgccatggctttaaacaaccttcgttccgaagtaattgagctaaggaacgaaggtcttgagaaagataaaatattacattcattggtgaataaaataaaagaagacgaagctgcttccaaagctcaagctgaggtccagaagcgcgaaattgaggatcttcggaaacagctagccgaagctaaagaaaaatgcgcagttgcagaagctaaacgagaaatcggtgaacaatggacaaatcatttagagaaaaacgttgaagaacttcgtgcatccaaggaaaggtgttatgaaaagtctatagagtgtgttaagaaaataaaaactagcttcaccaacgttggcacgtattcaagcgaggaaaatttcgtaaagggcgaccccgagggcccaattgaatggaccagccacgaagccgaagcttttgaggaagttttgaatggccgcggagacatatgtgccttctcgggtgctagggggattgccactattttagagagtagaggctgcgatcatgtgaaatccttggcacaagccgaggccgccttatcttctgaagatataaaagacccctcggccgaagcaagcttggttggtggtaaatttttcaccgacatctgggaaaatggtggccgggagatggctcaagaaattataaggaaaagtgaaaaaggtattcacgacgctagaaatgtagcagaggccgctgagaaaagtgcagatctcgagaggcgaataggtattgactactaa

SEQ ID NO: 90900 - DNA, 398 bp, Zea mays
  Clone ID: MRT4577_182904C.1
gaaacttttaaacatttgcccatgtatgttttagaaagtttaatatttgcatgccttctatatgattttgtatatttttcccatattattcattttgcaaattaagtttcaaacgagtacttaggaggttaatgacacagttgtatgattgtatatcttaatggaagatctgttaatttattaatgtttgcttgcataacatgtgcatgatgtcttttgtgtacagtttatcttaaattgaactatataaagatttggtttgatacttctgtatcttttgatcataaactcctatgttggaggccatagacagaactatcaacttaccctacttctcgcatggctaacgttatagatgctagtaaggttctggtgtgcagcttggggttttaaacact

SEQ ID NO: 90901 - DNA, 359 bp, Zea mays
  unsure (1)..(359): unsure at all n locations
  Clone ID: MRT4577_182905C.1
ccttgaaagatccgccacgccatcgtcctcaatccgacggggacgagcgcacgtcccgcgggctcatcctctcgcgtgcggccgtgccatcatcgcctttctgttcgtgttcggggcttcgggccgcccgtcgctatcgcccgccgcccggaccggggaacaccacgctccacgcacacagaagccgtacaggaaaatccggatttccggcttctgcatcgcgtgtgcgccacgacggcgtgcgggtgcggcggcggtaggcaagccggccgtgggcggatcggatgcgtgctgcactggtgttgttgttgnncgcgcggcgccgccggttgtcgacgtggggggcagggggcgacttg

SEQ ID NO: 90902 - DNA, 540 bp, Zea mays
  Clone ID: MRT4577_182906C.1
ctctctttcttcaatcccccaccgaacagatctgcccgactcctctctatcccgctcaactccaattcagcacagagccaaaatctagccgccgacggccatggacgacccgtcaggagctccaacgacgaggtgacctctcaaacggtaatatccgacaactatgttctacgcactcccatggcgccggtggccatggcccgccctgcccccaccagcaactagggtcgatctccctgggccacaggcggctgacagcgccaaggtaaatggctgcaatacgcggtagtgaattaataggattataatttggccaattgaggctagctgttgtttgatagttggtgatactgcacactgacaaacaaacgaacaaaccaataagtcattgcaggtattgttataaagaaaattactggaatggtatgtctagattaatgttggcaggaagaaaaatacttggctgaattcaggatttgtttggttgctgattaattagtattgttctccaataataatgtcataatttattttttcagc

SEQ ID NO: 90903 - DNA, 237 bp, Zea mays
  unsure (1)..(237): unsure at all n locations
  Clone ID: MRT4577_182907C.1
tgaatttggttagagtattttttattttttacaaataataaatatagggggggtttcataacgacttgttggggggccaactagaaaacatttacgatcacttacactaatcgagtattaataccctaatcgagcacagagaaacgatctatctgactaatcgcgactaatcgtgattaggcggacgatcctgaaaacannnttacttcctgtgtgaaagttgctctttaatgtgat

SEQ ID NO: 90904 - DNA, 402 bp, Zea mays
  Clone ID: MRT4577_182908C.1
cctgaatcagtcccttttgagccctctactacaacgtggagaggcccatttcttctgtgtgccaatacatcatttcactgccttctctaaatcactactaaacagccgacacattaaacagacacggactcatgcatcctctaagatgccccctatgggacccgcaggaggaaacacatcaacacatctctgctacacgtatgttcgccatatacactttgtggcatactatgcacaacgtaagcctgcatcacccgactccaggaatcacagcaacggctttccaagactgattgatagaatctgatttccaaatgccaaaacatcagacaagaagattcaaatccctagtgatctcttcttgcctagctgcttttcaagcacaaacattaaatttttttt

SEQ ID NO: 90905 - DNA, 134 bp, Zea mays
  unsure (1)..(134): unsure at all n locations
  Clone ID: MRT4577_182909C.1
gccaatgttgcagacaatggcattgttcttcatcttcctcatgtggtcaaccatgatgaagatgaagaacaatgccagtgtctgcancttggcacctttgacgatgaaattgctatgctcggccttgagaccta

SEQ ID NO: 90906 - DNA, 650 bp, Zea mays
  Clone ID: MRT4577_18290C.1
acgaagctcggaattcggctcgagggacattcccccccgcttcatcccccccccagcaccgcgaaacccgggtggggcttgaaacaagcagagggcccttacatcccccccccacacaagcaacacaagcacacgacgaaaaaccagaaactcaaacaaccggggcaccacccacaacggaacacggaaacaccaaaacaaaagggccgagcagcacacccaccaacccgcaacaaacacacacgcaggaagccaaggcccgagaccgagggaccccaagcgagccgaaacaccataacacaagaccgcgacgccaccccaagacagacagcacagaaacccccaacaaaaagagacaaaccagccccaccaaccgaaaaaaaacttcccccaaaaccaaccaagccagccacaaacaagacccccaacaaaaaggcaaaaaaccccgacggcccacaagagacaaaaaaccaacacccaaggcaaggcccacccccagaagagaacctaagccaaaaaaaagcaaggcctaaaaaccccgaccgaaaaaccacggagggccaaacagaccccgagcccaaaaaaaaaaaaaacgggggggaaaaaaaccgcccaaaaaaaaaaggggcacccccccaaaaccaccagcg

SEQ ID NO: 90907 - DNA, 1277 bp, Zea mays
  Clone ID: MRT4577_182910C.1
gcagtactggaggaaacgatgagcttcggttctgtgggcatggaggaggagggcggcgccggtgcgtcggcggaggagatccggcggctgccggccgaggtgaactgggagatgctggacaagtcgcggttcttcgtcctcggcgcggcgctcttctcgggcgtgtcctcagcgctgtacccggccgtggtggtgaagacgcacctgcaggccgcggcgggcgtgtccgcggccgtcgcggcgcaggtggtgtggacccccgtagacgtcatcagccagcggctcatggtccagaccccggacgcctgccgctaccgcggcggcgcggacgccttccggaagatcctcctcgcggacggcgtccgcggcctgtaccgcgggtttggcctgtccatcctcacctacgcgccgtcgaacgcggtgtggtggtccacctacgccgtggcgcagcggtgcctgtggcgcgccgtggggaccgagcgctccgagagctgcgcctgcctgatggctgtgcagggcgcgagcgcggccctggccgggggcaccgcggcgctggtgacgatgccgctggacaccgtgaagacgcggctgcaggtgatggaggccgacgcggcggcgcggcccacgctggccagcaccgtgcgcgggctgctcaaggagggcggctgggcggcgtgctaccgtgggctggggcccaggtgggggtccatgtcgctgtccgcggccaccatggtgaccacctacgagttcctcaagcggctctccgccaaggagggctccttgggctagatccttccttggccgtcctcaagcgactctacggtatcgcccgcgcgtctccgccgtcctcgaagtcgaagatcgacgcgatcgatcgatccatggggatgaagttaatgataattaggatcctcttctctcttgtacatattgctcatcaggtttatttcccgtcgttcttgtttccttagatccggcgctatagagggtgggcaggaagaagaactagaaggggttttaggatgcagaattttgctggcctttgctgtggccctgctgccgatgccgatgatgatgatgaaaacctgcgtgaaatgcagaacttgtatccaaagcttgcgtcgatttccctgtccagtacagtactccgatgtcttgcatctgccagtggacagctctcagtggtggtagctctagccgcgtcaatgtcatggcgttgcttcatggaatggaagacccgatgcgcttctgctgtcgcgtcgcttcgtcttttcgcc

SEQ ID NO: 90908 - DNA, 354 bp, Zea mays
  Clone ID: MRT4577_182911C.1
ttcgcccgtcgacccacgcgaccgaggtcgcgtggggtcacttagtctgtagtcaacgatgatgtgctcgagagctcccttaaattcgtcatcattggtactgatggagtctgagatgttgtcactaattaggagtctgtttgcacggtcaaccctattcatgagccgcaggatgtattactgaagcttctcaaagaagcgtcaccattgggagcctctgaacagatcaccgttgtacatcgtcggcgtcctatatcgagctacgggtcagtactgaagctgaaattctgagacgaccagtgatcagtgctccaaagtagttgcagctcggattgctcatgcatctgtgttctt

SEQ ID NO: 90909 - DNA, 281 bp, Zea mays
  unsure (1)..(281): unsure at all n locations
  Clone ID: MRT4577_182912C.1
cggggaacgnnngcatcctgggcccccgccctctnncccgttcgnncaggtggcngnngcgcacggnngcgagagnngcggcggcccggtggcnnngaagaagcntnngctgcggnnagcacgnngggaagggggcggcgtnnggatcgcggggggagcggccttgnncctggtgctnnggtggtgccgnnctgatcatcgnnagatggacccggggagcannngcagctcaaccgaccctnncgagctgggcagcagcagaccgcttcgtgggggcgggg

SEQ ID NO: 90910 - DNA, 1458 bp, Zea mays
  Clone ID: MRT4577_182913C.1
gcagtactggaggaaacgatgagcttcggtactgtgggcatggaggaggagggcggcgccgcggcggcggcggaggagatccggcggctgccggccgaggtgaactgggagatgctggacaagtcgcggttcttcgtcctcggcgcggcgctcttctcgggcgtgtcggcagcgctgtacccggccgtggtggtgaagacgcacctgcaggtggcgccgccgcctcaggcggccagggcgacggccgccgccatcctacggcgggacggcctgcgggggttctaccgcgggctcggcgcgtcgctgggcggcacggtgcccgcgcgcgcgctgtacatggcgacgcttgaggccaccaagagctccgtcgggtcggccgccgtccggctgggcgtctcggagcccgcggcgtcggccgccgcgtccgccgcggcgggcgtgtccgcggccgtcgcggcgcaggtggtgtggacccccgtggacgtcatcagccagcggctcatggtccagaccccggacgcctgccgctaccgcggcggcgcggacgccttccggaagatcctcctcgcggacggcgtccgcggcctgtaccgcgggtttggcctgtccatcctcacctacgcgccgtcgaacgcggtgtggtggtccacctacgccgtggcgcagcggtgcctgtggcgcgccgtggggaccgagcgctccgagagctgcgcctgcctgatggccgtgcagggcgcgagcgcggccctggccgggggcaccgcggcgctggtgacgatgccgctggacaccgtgaagacgcggctgcaggtgatggaggccgacgcggcggcgcggcccacgctggccagcaccgtgcgcgggctgctcagggagggcggctgggcggcgtgctaccgtgggctggggcccaggtgggggtccatgtcgctgtccgcggccaccatggtgaccacctacgagttcctcaagcggctctccgccaaggacggctccttgggctagatccttcctttgccgcgctccctataaccgtaacgatcgtcaagcgactcctgccgtcctccaagtcgatggtcgatccgcggggatgggtggttaattaggaccctctctccaatcttgtacatattgctcacctgaggttatttgccttcgttcttgttttcttgatccggcgctgtagagagtgggcactgggcaggaagaagaatttggaaattttgctgtggccctgctgcttttgatgacgatgaagaaagcattgtgtgaagtgaagaacttgtatccaaaacttgcggaaaaaaccaaataaaaaaaagtactcggtgtcttgcctccgccagcctgcagctctcagtggtggtagctctagccgcgtcaatgtcatggcgttgcttcattgaatggaagacccgatgcgcttctgctgtcgcgtcgcttcgtcttttcgccaac

SEQ ID NO: 90911 - DNA, 165 bp, Zea mays
  Clone ID: MRT4577_182914C.1
gcctgacctcctcgagtcgtttccgcgggctgcttgttgccagtgtttgtttggttcacttcattcttctctcggactttgactctgtcaccagagcagagcacaacacagcactcagcacagccggacgagtcttcactgtatgggattgtaccgcaacgaatg

SEQ ID NO: 90912 - DNA, 634 bp, Zea mays
  unsure (1)..(634): unsure at all n locations
  Clone ID: MRT4577_182915C.1
ggtgaccatgccgctggnacaccgtgaaccgcggctgcaggtgatggaggcggacgcggcgcggcccacgctcgcgagcaccgtgcgcgggctgctcagggagggcggctgggcggcgtgctaccgcgggctggtgcccaggtgggggtccatgtggctgtccgcggccaccatggtgaccacctacgagttcctcaagcggctctccgccaaggacggctccttgggctaggtagatcgttcctttgccgccctcgctataaccgtaacgatcgtcaagcgactcctgccgtcctccaagtcgatggtcgatccgcggggatgggtggttaattaggaccctctctcctatcttgtacatattgctcaccaggttatttgccttcgttcttgttttcttgatccggcgctgtagagagtgggcactgggcaggaagaagaagtagagggggttttaggatgcaaaattttgctgtggccctgctgcttttgatgacgatgaaaacattgtgtgaagtgaagaacttctactgtcccaaacttgcgtcgatgtccctgttcagtactagaatgccctggatgtctgcgttgaacccaaaaaaaaaaaaaaagggcggcccctcgcgatctacga

SEQ ID NO: 90913 - DNA, 322 bp, Zea mays
  Clone ID: MRT4577_182916C.1
acgtgctgcagccgccagaaattctggtcaagtttcacatgcacaacaagaggctgctgctcccaaaaagaatgtcatgagcttaaggctcaattcttcatccccctcattttatccctcttgtgcactctatcaagatttttcagtggctactcataagccggaccttccaaccggggggtcttataagattccttcatcttccatgaaaatggatgattacctaatattaccatctgggtcaatgggtaaagggagaacaagcatggattattgtgggcatgacatggttcatgctccaggtcctgttaaggaccccctg

SEQ ID NO: 90914 - DNA, 326 bp, Zea mays
  Clone ID: MRT4577_182917C.1
gcctgctaaataaaaaaagagggttggatttagcgttctggcattgattacaaagagatagtccatttttacggactgctaagtgcggagacgggaatcgaatccgcgacatcaaggttatgagcctcgggggctacgaaactgctctactccgttctgtacggccgaaaaccggtggacgaaagcaaaaacgtgtattacaagcctgtacctcgtctagacaaacaaatggaatagcctcttcatacagaatggagcggctagcggcaatcgaacccgtatcgctagcttgaaaggctagggtttatagtcgaagtcccgttgat

SEQ ID NO: 90915 - DNA, 276 bp, Zea mays
  Clone ID: MRT4577_182918C.1
aaaaaaattctcagggaggggccccccccttttaaaaaagaaaataaactggcggccccgaaaagggggtcccacacaaaaagggctgtggggaggggaagacatatcccatcatatatcaaggttcgcgcggcccttagaaccaccgcttgcatcaggtattgactaaggggaaaatctgaggtttatgggggcatctgacgaagacgacattggctgatgtggataaaacgcgaccgccggtgttaggccccacttgtaaaacaaaacaggaac

SEQ ID NO: 90916 - DNA, 574 bp, Zea mays
  Clone ID: MRT4577_182919C.1
agtaccaccgacctcaccacaagaagcctgcatttccgcagagcatggtcggcagaactttctgcctggacctgctttcggtggtgcgggcggtatgaccggtttttggcgcgaaacgagaaacgtacattccagggctctggcttcaagggacgggcttgctcgcgggcgcctttgacgctgtgccgacaatagcctgataacaatgcgttaaatgacgagcgacaaacatagtccctgcttactggtaaacagaaacacgcaaaggacactctatatcagcccatcatggtgacttgacagatacaacgggctatatcatccatgatcacaccaacgccgacttgattaactggcaagaaggctggttaaatgggctggccactcttgtgccaatccttattgtgaagaacggcattctaatactgtcactacatccaaatttataataacagcgcttactgaagcgtcatgacatacaaggatcattggtgcaggaccctttagtaaacatatccgtcagatgcagaacacagtcaacgaaagaactgcaggtgctctgaatggtatagca

SEQ ID NO: 90917 - DNA, 316 bp, Zea mays
  Clone ID: MRT4577_18291C.1
ggttttaggatttttttttttttatttaaataaatgataagtcgagtatggggctgactaaaacatggtgttccacattgaaccatacgctggttatccaaaattaatcgcgcaaaactaaaccccatgcatggggagatacagatgattctgagcaaacgatttttacccttaaccttcccttcagactaatgtacaaaccaatcactcctcaacccttggtcccttcaaaccatgcatggattgcaacacggtccggatctggtccctccagattgattaacacacacaaattgatccacaaaggaactctaag

SEQ ID NO: 90918 - DNA, 435 bp, Zea mays
  unsure (1)..(435): unsure at all n locations
  Clone ID: MRT4577_182920C.1
gcgccagcggccagagcgggnaggcaggagggccgacgggttcggcttttttttttgttttttttttgagaacgcagacaagcangaaggcgccggcgcggcaacccagcacccgcacgcggagcccgccaaccgggagggggggacaagcccaccggggaggacgaccaaaacgccaacgggaacgggaacgagngcagcgccagcgcgaaacaccacaccaagcacgaacaaaccacggcgcaagcacgcgacgaccacgggccccaagcacccggacccgaacccccaaaacacccggggccccgaccaagcccacacgttttttttttaacttttttttttttttttttttgncaggacctcgtcctaattgtattttatgaactttttttctttacctgacctggggggccgcttttatatttttgttgc

SEQ ID NO: 90919 - DNA, 312 bp, Zea mays
  Clone ID: MRT4577_182921C.1
atttttcagaaagaagacgacgcacagatcatgccgtcttttttggtggatcaggtatgcattccgttacttattcctttcagtggttgcatggcgaggtgcatcaaaatcttgataatgttacattgttgtttcacctaaaaatcttatacataagatgaatcatcaaaagtttgcccttctgtatttcttcttggagaatgcaattttttttggataatggaataaatctacggcttccttctctaaagagaggaatcaaaccaaaactattataagttaaatcacaacaacggcagaaccaagtttgta

SEQ ID NO: 90920 - DNA, 175 bp, Zea mays
  Clone ID: MRT4577_182922C.1
tcggttctaggttgggtactatgtgagcccacaccgcacgcttctgtttgtggtccgtatccgagcaatcaatgccataccaccccaagaccgtggtatcatgcagctcctgcgtttgaggaaaatcttaaatggtgtctttctgcaggttaacagggcaactattatcatgcta

SEQ ID NO: 90921 - DNA, 300 bp, Zea mays
  unsure (1)..(300): unsure at all n locations
  Clone ID: MRT4577_182923C.1
gcggaccgcacgccgtccggctcgtgccgcctgcnngaagtgnncggaagccgctctttgttannattgcntnnctccctttccagtgcnccgcgcaggtggcgcatcatngggttttaaggaagggggggcnngacaccggtattcgcnncattcgccagccattggannatccgcaacggcggcccgtcccgcanngcgcgtcgctanngcccgggcccggccccgcgcccgcttcgtccaacgggccgcgcgccgcgggnngcgggtcgcgtcgtgggccgcttggcctcgccgcgc

SEQ ID NO: 90922 - DNA, 351 bp, Zea mays
  unsure (1)..(351): unsure at all n locations
  Clone ID: MRT4577_182924C.1
cgttgttgttgtgctcggtgcgctgagctccgcggctccgcgagccggttccgtccccttcccgccgccgccatgaagtggatgttcaaggaggaccactcgctggaacacagatgcgtggagtccgcgaagattcgagcgaaatatcccgacacggttccggtgattgtggaaaaggtctcaggctctcagattgttgacattgacaaacggaagtacttggttccatctgatatcactgtggctcagttcatgtggatcatcagganaaggatccagcttccttctgaaaaggcgatcttcctgtttgtggataagacagtcccacagtccagcctaactatgggacag

SEQ ID NO: 90923 - DNA, 385 bp, Zea mays
  Clone ID: MRT4577_182925C.1
cactttatattttttactcttcggtgcaatccggatccggacatcttgaccttttttaaagttcacagctccaatcctggtgcaagcgcacaccaacggagcaagacgcggggagaaaaaaaccaggggggaaattgcagctcctctcgctgagcctcctgcaactctactgattcaccaacgcagtacccaccggtctcgtggagaagacagaagacgtggagcattgccaaaccgacggcatcaaacgagatgctggtgcaaaaactggactacgcgagctaaaaaccaaagctgtgcctacaaacagaagggaggcccgccctactacccagacaggaccttgttccgcgccggcgttgtcatgaacctctaatacgcctac

SEQ ID NO: 90924 - DNA, 389 bp, Zea mays
  Clone ID: MRT4577_182926C.1
ggtggatagcggcgcccaggcatacgattccctgcgtcatctggctggccgacgggctgcgtgttttaacggctccactcctaacactggctgagctcagcccacacttggcctggcctcgttctgctgaagctcgacccgttccccctaatcttctccaatccctttcttctgggctctgacagggtgacgaatcccatgggcgccgcggcgaggaagcccgccgccgctggggtgttgccaatctggctctgcctcgtctgcgcgtcgagagcgcagccgtacatcggcgtcaactacggcgaggtggcggacaacctgccgtcggcggacgagacggcgaggctgctcaggtcgacgtccatctccagggtgcggctgtacggcgt

SEQ ID NO: 90925 - DNA, 249 bp, Zea mays
  Clone ID: MRT4577_182927C.1
tctcggcaccgctgtgcaccatggcccgggccctgtgccgcctcccgcggcgcggcctctggctgctcctggcccatcacctcttcatgaccactgactgccaggaggctaactacggtgccctcctccgggagctctgcctcacccagttccaggtagacatggaggccgtcggggagacgctgtagtgtgactagggcaggaccatcaggagctacaaggcactgaccgactgcacctggcccatgg

SEQ ID NO: 90926 - DNA, 1071 bp, Zea mays
  Clone ID: MRT4577_182928C.1
gcgttcgctcgccttcacccctcgtcgccgccgccgccaccgccgtcgccgtcgcaagcgacgatgctcaacatcaacttgttccgcactgacaagggcgacaacccagaccttattcgcgagtcccagcgtagtcggttcgcctccgtcgagctcgtcgacgaggtcatcgccctcgacaaggcatggcgcgaaaggcagttcgagctggataagatccggcaggagcttaacgctaccagcaagaagatcggcaagctcaaagccagcaagcaagaagaggaagcgaagaagctcatggagagcacagacgaaattaagaaaaggttgacaggcaaagaagttgaggtgtaggaggccaagagcaccctcgacgccaaggtcacgacgattggcaacatcgtgcatgagtctgtgccagtcagcaacgacgaggcaaacaataaaattgtacgggcatttggagagaagagagtagaggataatttgaagaaccacgtggacctttgcagataaaagttacatggatattgtcatcaaaggtggtgtatgggtcggtcatttactctctggttactccttgccaatggacatgccgtcgcaagtaaatgtaaagagttctgaagaggttgctggaatgtggaagcactccatcaaagtttcttatgaagcaacaaaggcagcatttcctggtggtgaagttatcgcacatcttgatcacaagatgggagagtgtcggatgcttcttcatatactatttcttggtccgtcaaatctgcttgacccaaatgcaagttttgctcaaatgtggcaaaaataattgtctcatcgattgttagcgcgcctgcttccagcaaagtttcagagaaggaaaagatggaatgtaactcaaattttggtggccgcacaagtgtggagacttgaattcatatatacttagttaggctcaatattagtgcaaacagttgataaccaagtttttcaattagtatttagttttggctttagagtacacttatgtatgagttatttgacaatatttatttatgagatattgaatggtacttatct

SEQ ID NO: 90927 - DNA, 488 bp, Zea mays
  Clone ID: MRT4577_182929C.1
catgccaactctactccatgtactgctggtgtcacaggattaatatacaatgaagatgttgattcttggagttgcacgaaataaccttgtgattgtgattagttacttcaaagcgttttttggtcttaatgcatggatgggagagtgtcggatgcttcttcatatactatttcttggtccatcaaatctgcttgactcaaatgcaagttttgctcaaatgtggcaaaaataattgtctcaccaattgtcagcgcgcctgtttccagcaaagtttcagagaaggaaaagatggaatgtaactcaaattttggtggccgcacaagtgtggagacttgaattcatatatacttagttaggctcaatattagtgcaaacagttgataaccaagtttttcaattagtatttagttttggctttagagtacacttatgtatgagttatttgacaatatttatttatgagatattgaatggtacttatctaaaaa

SEQ ID NO: 90928 - DNA, 455 bp, Zea mays
  Clone ID: MRT4577_18292C.1
attcggttagagggcgcatgattcgtttgttcaatgacgggcaacctgttacaaatagttgggacacacaggaggggaagctggaacagggccaacagatgttaacaatattcaagaaccatgaggatgatacaacgaacgtggaagaattggacttttatgtgcggtgggagaaagccttgcaggagaacatacgtctacagcagcctcctaccatctatcctaagaagctggaggataccaacgctaagggtcctgtggcctatgaatgatatgcatttgcaacggtcgactagatgatggatactgcgaacagggtaacgaccctgaaagctgaggaagcctcaattgaaaatggaatcgatgcacacagcgcaaggttgaaggcagtgcaaacctgaacatacgccttgtggagtaaagaccgattccttactttatgataatttggagca

SEQ ID NO: 90929 - DNA, 285 bp, Zea mays
  Clone ID: MRT4577_182930C.1
actactactttctctgcggacggcaacacgggcgccaggttaaatagcatcaattcttaaccttttccatctaaaaacttatatattattctactaacataacaagatctacaaataccaactatgtatactagacataatatctaccttctcaacatattctacatctaaccacttattattccaacaaggtcactcccacatactattctattataatactgcactaactcctttgccatacgaaatacagaccttttgattatttttttatcttatcctcta

SEQ ID NO: 90930 - DNA, 1424 bp, Zea mays
  Clone ID: MRT4577_182931C.1
cctcgaggcctgccgggagggccgggaaacgaaaggactgccctaacctcgtgcagtcgtgcccgcttgtttcccttgctcgccttcacccctcgccgccgccgtcgccgtcgcaagcaacgatgctcgacatcaacttgttccgcaccgacaagggcggcaacccggaccttattcgcgagtcccagcgcagtcggttcgcctccgtcgagctcgtcgacgaggtcatcgccctcgacaaggcatggcgcgaaaggcagttcgagctggacaagatccggcaggagctcaacgctaccagcaagaagatcggcaagctcaaagccagcaagcaagaagaggaagcgaagaagctcatggagagcacagacgaaattaagaaaaggttggcagccaaagaagttgaggtgcaggaggccaagagcaccctcgacgccaaggtcacgacgattggcaacatcgtgcatgagtccgtgccagtcagcgacgacgaggcaaacaataaaattatacggacatttggagagaagagagtagaggataatttgaagaaccacgtggacctttgcaggatgcttgatattgtcgcattggaaaagggtgctgatgtggctggtggtaggggtttctatttaaaggacgaaggtgtcctccttaacctggcattgataaattttgggctagcttttctgagccaaccgggatttaaaccaatgcaaactccttttttcatgagaaaggaatctaggtctaaggaaagcccacggggtagaggatgatgatgatgttggaacttggcagaggaattgtgaaaaggttctattaggtataggaggtggtcactatgttcctcgtcacatggatattgtcatcaaagatggtgtatgggtcggtcatttactctctggttactccttgccaatggacatgtcgtcgcaagtaaatgtaaagagttctgaagaggttgctggaatgtggaagcactccatcaaagtttcttatgaagcaacaaaggcagcatttcctggtggtgaagttatcgcgcatcttgatcacaagagcttcaagggctggcagaagaatgctgttacatgcttcttgcaggagcagaacatcaggataggaaagcctagcgatttcctgtgacgtgctacgacagtgctggacaggacaggtggagaggctgtgaatgcttgagctgatttccctatgcgcacgctgaataaatatgagacataggggctgtttggttcgtggctaaatgtgtcatactttgcctaaggttagtcgttcgaattgaataactaaccttagttagaaaagttagtcaaaatgtggtaaattaggctcaaaccaaacagccctatagtaagactcgatccttaatgcggttcaagagcttgaataaaaagtttttataaata

SEQ ID NO: 90931 - DNA, 1911 bp, Zea mays
  Clone ID: MRT4577_182932C.1
cttgctcgccttcacccctcgccgccgccgtcgccgccgtcgcaagcgacgatgctcgacatcaacttgttccgcactgacaagggcggcaacccggaccttattcacgagtcccagtgcagtcggttcacctccgtcgagctcgtcgacgaggtcatcgccctcgacaaggcatggcgcgaaaggcagttcgagctggataagatccggcaggagctcaacgctaccagcaagaagatcgacaagctcaaagccagcaagcaagaagaggaagcaaagaagctcatggaaatttagttggtgtttgttctggctatttgctttccactgaagtaaccgttagactgtagtgtgacatcctaaatattagctccactgtcaactccaaccctgattctcacactcacaatttgattgttggaattctaattgtgctttagggttctatgtgaagatacaaaaaaatattgcattcctattctggtcctgtattgaaattgccagtggtccctctgaattttgatccaattgttataaatttcagatgaactgaataaaactactacttgtaggcaaacaataaaattgtacgggcatttggagagaagagagtagaggataatttgaagaaccacgtggacctttgcaggatgcttgatattgtcgcattggaaaaggccattgtctcagatagataaccttctgcagacatcttatgatcaaggggacaaatgagatcatgccagctctactccatgtactgctggtgtcacaggattaatatacaatgaagatgttgattcttggagttgcacgaaataaccttgtgattgtgattagttacttcaaagcgttttttggtcttaatgcatggtaagtttattcaccttttatttcatcagacattatgacattccattttgagacaaggatctacaacaattatgtagaagcaatcctttaacaacatatgttacagttaatatattatgttttttctacatgtactcatttgaaacaagtaccagttcattcctcagctgatcttcttgaacaacttatttggttacctgtccttgctaattattattaaggggtgaaatgcagatctataccatgttatgatgtacatgttctttagcccaacaaatgatttttgtgagaactagttttttgtgagatctataccatgttagtccagaagacagtgcatgtctatattccttgttggtaagttctcttctgtgaagcagactgatctatcatgcctaaccactcgccttctctaacaccagcttattctacttctacttgctttagtgtttgtgccttggatgtagtaatactacattgttaaattatttttctttacaaacaaatatataaccttatgaatactagaaattgacgttgctaataatagagcaaagagacctacacatatctaaaacatagaaccccacagttctaaagtcgtatgacctatattctctatttcatacataattacttactaattccttggttattttcaataggatgggagagtgtcggatgcttcttcatatactatttcttggtccatcaaatctgcttgactcaaatgcaagttttgctcaaatgtggcaaaaataattgtctcaccaattgtcagcgcgcctgtttccagcaaagtttcagagaaggaaaagatggaatgtaactcaaattttggtggccgcacaagtgtggagacttgaattcatatatacttagttaggctcaatattagtgcaaacagttgataaccaagtttttcaattagtatttagttttggctttagagtacacttatgtatgagttatttgacaatatttatttatgagatattgaatggtacttatctatattatattagttacaatgttatt

SEQ ID NO: 90932 - DNA, 268 bp, Zea mays
  Clone ID: MRT4577_182933C.1
aagacggagagaaaacaacacatgggaaccagggccaaaaaaaaacaggcgctaccgggggaaacacagacacaggaccccctaactacagaaagaaacccgaacataccaggaaagcctgcaaggggaggccacccaacctaagacaaggggaacttggagacggccttggggccccaggaaacgggggccttggggagccccccggggaggacaaggcccacgggggcctggatcccacgggaggggaaggggggctttttggtgc

SEQ ID NO: 90933 - DNA, 434 bp, Zea mays
  Clone ID: MRT4577_182934C.1
gggggttgtcttttggtgtctgcgtcctcccttgctgcttcttttcccgaggcacaccaccccctccttggttcgaggccccccctcgctgtttctaacccggccccgtgagggggggggggggccccgccagggggggtagccccgcgccttggcacaggagttgagcccccaagctggcgcagccaccgacccgggggggtttcgggtttgtctgactttgggttttccggctgtgcctcatttggggctgccggggcgggcccgtttgatctggtgggctgcgcccctgtgggcttgggtgggtttcccccccgggctcttgggggcctcgggacgggggtcggggtccccccgagggttgtggtggcgctgcccgggctgcttcttggggagggggtcctggcccggctgggggggggggtccctgggcg

SEQ ID NO: 90934 - DNA, 296 bp, Zea mays
  Clone ID: MRT4577_182935C.1
caaacacttgcgccgccactgtctaacgtttcaggccgacatggtctggggttcgggcgtgtgcgcgaagcgcatcgtggtggactcgcgccaccgcatgctgggccggctatcctcgatcatagccaaggagctgctcactgggcacaaagtggtcgtcgcccgctgcgagtgagatctgcatgtcgaccggactagtccgtgacaagatgaagtgcctccgctgtcgcgaaagcggacgaacaccatgccttgccacaggcgcatccacttccgcgccactggcaagatgctgt

SEQ ID NO: 90935 - DNA, 225 bp, Zea mays
  Clone ID: MRT4577_182936C.1
taccaacatttttttttaaaaaatagaaacaaaagagaaaccagggggaacattcaaaataccaaagacaatacagaccaacaccatcgagaacccgagtgtatcttcattaccacagaaacacacgcaacacacgaacggaaagaagtacatgaaccaagaaccacaaagtacatacagacagcacaagggaagaacagacaacaagaaaacaagcacggacaa

SEQ ID NO: 90936 - DNA, 428 bp, Zea mays
  Clone ID: MRT4577_182937C.1
cgacgaagctagaatttggtcgaggcggcgcactttatcaatggggtgccggtcctgtgacagggcgaatttaactaccgtaaggcgctatggtctcctgaggaggacacagaagctcaagcactacatcctgacggatggacttggatgctgaagtgctggcccggtaaaggctgctgttcagagaaacggcaagagctgacggctgggctgaatcaactacctgcgccctggactgaatcgtggaatgatgtcccaggaggaggagagacgtcttaatctatctccaagccaagttggggaacaagtgggctcaaattgcgatacatctgccggggaggaccgacaacgaggcgaagaactactggaactcgtacctgactaagagggtgacgccagaggcccagagcgccgtcgtccaatttcag

SEQ ID NO: 90937 - DNA, 400 bp, Zea mays
  Clone ID: MRT4577_182938C.1
actgaaggaaaaacccattgactgccgcaagggggaagtgcggtcagacatatcccaaacactgggtgaaaaagctcacgacaatggggagcaaatcaccaaccggtgcagaacactagggacgatgaaaattggccttcaaggaggaaaacacagtgacataaaccctcgaactggataaaagacaccttaagggcgttataaaaaatcgacttttggacagtaaggagcacggccaggagccaaaactctaacaatactggcggaaaaaggcaggcgcagagctaaaactcagcccgatgaaccgaaccgtttagacacctctaatgcgggaacaggcacagggcaagacctataccattcgctgtttgatgggcccacagagtgccaaccttaagga

SEQ ID NO: 90938 - DNA, 284 bp, Zea mays
  Clone ID: MRT4577_182939C.1
ctttgaaattgaataaagaaagctgtttgtagttttaaaatgcctaattgataccaataagaaatttcttctattttttgatgtacttagagctttttgagtgtagaattttaaatggcaggattttacagtgtttacatgcaagtgcattttataagtgttctatatgtgtaaaatagtattttcaactggaaagtgttggctagtgcaaaaggcctggccattttctggttcccatgatgttgcctacactgctagactacagtttagtatcgctttgtatc

SEQ ID NO: 90939 - DNA, 802 bp, Zea mays
  unsure (1)..(802): unsure at all n locations
  Clone ID: MRT4577_18293C.1
ccgggaggcatggtgttattgctcagtccctctcgggtgctgttttgaatgggaagcttgctcctatctacctcttccatggtcaccatggcgtgggcaagacgtccacagctacaatgtttgcagcagcgctgaattgccgttccccaggcgggaaccagccttgtgggggcggtgacgagtgcatggccatattatcggaaagcagcaacaatatagaagagattgatgcttcgacctttctcgggaatgcatgtgaagtccctgcctcttcacacttcaaggttttgatcgttgatgattgccagcacatggataaggaaggatggtacgctatctacaatagccttgaagggattcctgagagcacaatctttgttatgatcacatctgatattgaaaagctaccaagcaattccatagagtggtactttattgtctttgttgacattggtgccattgacaaagctgttgaagaggccatgtttggggtcttcacgaatgctggtcaagtctgcagtgctacttcttgtctactgttgcatgagaaaattgcaaaacaatttttggatagattggttggatgggcaaagattataaaagtctgagatccattggaggaaggttgtcgagtggattcagttattagtgacagacagtacgagaagataaagnaagttcatctcgactacaggaaagtgaaggtgccacaaatctatatgagcgcatttcaagggctcttcactctggtattatttggataaatttcttgcacttgcaatgggaccctggtggaatcgat

SEQ ID NO: 90940 - DNA, 716 bp, Zea mays
  Clone ID: MRT4577_182940C.1
cttatgtcttcttgttatgtttcctctacatggcttacagtggttggatctggctcatgtttcctggcttcttgcttggctctactaatcttcatgctatggaacaaacactataggcatgggcgctcggtaggagcgtttgagatcataactcctcctcgaagaagaaccgtggaacagctcttagctctgcaacaggccatctcgcagctggaagcgcacgtgcaagcaggaaacatttttctcctgaagctccggtccctcatgcttgcagcgtttcctcagagcaccaacagagttgcagctgcactggttgctgtggctgcgatattcacgttcgtgcccttgaggaccatcgttctactaatccttctagaagaatacacaagacagatgccggtgaggaagaagagcagtgagaagctggtgaggagattgcgggagtggtggctccggatcccggctgcgcctgtacagcttgtaaagcctcgggagacgaggagatggagatccaggttgagatgagataagtaagccaaaaaatgttggtttgtttgcttttagttttacaccatgttccgtgcacattctttgagcggtagggatcttggtatcacgccttcaagtgaaagcaagaccttggtgtaagctgggactggttttaacaagcagaaacagatgaagaaatcgtgtcttaaaaaaaaaaaccaagcact

SEQ ID NO: 90941 - DNA, 2288 bp, Zea mays
  Clone ID: MRT4577_182941C.1
acccgccggcccggccgggatttccaagggctctacacgaagttaggcggccaagtgttcgcaaccaacccctcttcctcgcccactgaaaggttcagaggctcccgttttagcatagcgaccgagacgaaggagtgggggggcggagagctttgggccctggccaggatgaagtttatgagactcggcacccggccggacaccttcttcaccgccgccgactccgtgaggtctgtctgcacggaggtggccacggacctgcagatcctcgtggataactgcctctaccatctccacaagttccccctgctctcgaaatgcatgctcctgcaagcgctgtgcgccgacgccggcgacgtcgtcgtcgagctcccggggttcccgggcggcgccgaggcgttcgaggcctgcgccaagtactgctacggcatcaccatcacggtgagcgcgcgcaacctggtcccgctgcggtgcgcggcggcgcacctcggcatgtcggaggccgccgacaggggcaacctcgcggccaagctcgacgcgttcctcgcctcctgcctcctgcgccgctggaaggacgcgctgggcgtgctccactccacgcgccaccacgccccgctctgcgaggacctgggcctcacgtcccgctgcgtcgacgccgtggccgccctcgtcgccagcccggacaccgccccgccgccgaggtccacgtcggcgtcgccgtggtgggcgcacgacgtcgccgagctcggggtcgacctcttctggcggatcatggtcgccgtcaaggccaccggcgccgtccacgagaagaccgtcggcgacgcgctcaaggcgtacgcgcgccggtggctgcccaacgtcgccaaggaccagccgctcgaccgcgacgccgcggacgtgaagcaggtcgccacgaggcaccgcctcctgctcgagaagatcgtcagcctgctccccgcggagagggacgccgtctcctgcggcttcctgctcaagctgctcaaggccgccaacatcctgggcgcgtccaaggcgtccagggcggagctggtgaggagggtggcgtggcagctggaggaggccagcgtctccgacctgctcatcccgtcgctgtcctgcgtcagcgacacgctgtacgatgtgggcgccgtgtcggccatcctcgacgagttcgcgctgcggtgcgccgcgctcccgccggcgccggcgctggctctgtccgggagcctcgacgacagcccggcgcactcgggcggccaccggcggtcccgttcggcggagagcgtgagcttcgacggcacgcgacgctccttgtcggccgcacccgtgtcgcagggcggtctggtgcaggtgggcaagttggtggacgggttcttgattgaggtcgcaaaggaccccaacatgccgatggacaagctgctcgccattgccgaggccgtgccagacagcgcccggccggagcacgatggcatgtacaaagtcgtcgacacatacctcaaggcgcatccggagatgagcaaaagcgcgagaaagcggctgtgccgggtgctcaactgccggaagctgtcggagaaggcgtgcgcgcacgcggcgcagaacgagctcctcccgctgcgcgtggtggtgcaggtgctgttcttcgagcacgcgcgcgccgcggcgctggcgtcgggcgggcacgccgtggccgcggcggcggacctgccgagcaacatccgggcgctgctgtccaagtccgggtcgtccgaggacgacgaaggcggaccgcgtcgacgagcagcggctccgggcgctggccgccggcgcgtcccccggcgacgactggagcgtggagggcccccgtcgcgcggcgtccaagatcgccacgctgcggatgaagctggcggaggacgaggacgaggaccgtgacgccgacgagttcgcgcgcaaggccgggctaccgcgcagcgcgtcgctgcggttcagggcgttctgcgccatccccgccgggaagccgaggcggatgctcagcaagctgtggccgctgggcagaagcggcgttagccactagtagcagacagtgttagctcctgtgatctcctgtttctctctctctctcttttttccctgagggtgatttgtctgtctcttctacgagttcctcctctctctctctctctctctctctctctctctctctctctctctttgttacgctttcaaggcaaattgtaccttgcatgtagttgtaatctcaacgggcacaataaaagatagaaattgcacaggcaaaaaaaaaaaaaaaaaaa

SEQ ID NO: 90942 - DNA, 2206 bp, Zea mays
  unsure (1)..(2206): unsure at all n locations
  Clone ID: MRT4577_182942C.1
cgctcctcgccctcagcctcggtttcaccctggggccctcacgcgcttccgctcggagtcttgtgacccggcccgcgcctcgccccaggtcggagcccgtggctccttggcggccggcctgccgctgctccggcattgggtgcctcgaggccggccggggagagaaaagtagaagctaaggcgcgagtgataggagggttttggttcagagaagagcggggcaatggcaggtggacgtggctcgtcggcggcgaggctagcgctgctgctgctggtggtggtgacggcggccggcgccgtggcggggggcaaggtggtgcacgtggaggaggcgcaccggcggagcatgctggccaatggactcggctcggcccctcccatggggtggaacagctggaaccatttccagtgcgacggcaacggcgaggtggtcatcagggagaccgcggacgcgctcgtgtcgaccggactcgccgctctcggctacagatacgtcaacatcgatgattgctgggcagagccacaacgtgacgctaagggcaacctggtggccaacaccaagacgttcccgcacgggatcaaggcgctggcggactacgtccacggcaaggggctcaagctcgggatctactccgacgccggattccagacctgcgccaaggcccagcccgggtccctcgggcacgaggagctggacgccaagaccttcgcggcatggggggtggattacctcaagtacgacaactgcaacaacggcgacctgaagccgctggagaggtacccggagatgagcagagcactgatgaaggtggggcggccgatctacttctcgctctgcgaatggggcgacatgcacccggcgacgtggggcgcgacctacggcaacagctggaggaccaccaacgacatcgccgacacctgggacagcatgatcgccacggcggaccagaacgaggtgtggtcggagtacgcgcgccccggcggatggaacgatccggacatgctggaggtgggcaacgggggcatgaccaacagcgagtacgtcgtgcacttcagcctctgggcgatctccaaggcgcctctcatcatcggctgcgacgtcaggcacatgtcgcgggagacgtacgccatcctggccaacaaggaggtgatcgccgtcaaccaagatccgctcggcgtgcaggggaagaaggtgcggatggagggcagcagcgagatctgggccgcgccgctctccgagtaccggacggcggtgctgctcctgaaccggcacgccaaggacgaggccaccatcaccgcgcactgggacgacatcggcctccccgccggcacgcccgtcgaggccagggacctgtggctgcacgagacgttggacgccacgttcacggacaagatgagcttcgacgtcgcgccgcactcgtgcaggatgctcgtcctcaagcccaggatccagatccagtgaactacaccaccgctgccgcatgggcgcgcgtacgtgcggccctcacgacctccccacgcgacgtcacgcttgtaccgcgggagacgtacgccatcctggccaactaggaggtgatcgccgtcaaccaagatccgctcggcgtgcaggggaagaaggtgcggatggagggcagcagcgagatctgggccgcgccgctctccgagtaccggactgcggtgctgctcctgaaccggcacgccaaggacgaggccaccatcgccgcgcactgggacgacatcggcctccccgccggcacgcccgtcgaggccagggacctgtggctgcacgagacgttggacgccacgttcacggacaagatgagcttcgacgtcgcgccgcactcgtgcaggatgctcgtcctcaagcccaggatccagatccagtgaactacaccaccgctgccgcatgggcgcgcgtacgtgcggccctcacgacgtcaccacgcgtcgattcatttgtactgcaggctactaattgcagacacgtggaatcaaaatcaccaagaatggttcttgttccttgtatcgtatgctcataaatccaccataccccttgnaaaaaaaaaaaannnnnnnttnnnntaaaattaaaaaaaaaaagggggggcgtttttgtggatccaagttttctnccgcttncttgcggctgcatttcttttttttggtggccccttattttattccactggctcttatttttccacat

SEQ ID NO: 90943 - DNA, 315 bp, Zea mays
  Clone ID: MRT4577_182943C.1
ggaacgaaaaatatttgatggaatggcaaggttacggggggtaagcacaaacacaacattcgggaccttgtgcatacaacaatgatacggagcgttggttctgcgaaaaagtccatacagagagggcacaagtcgacggaagaacgatccgcagaataagacggcccaggacttattgaggcaaacgcaaacggagaaaaaggtggagggtgctttactttgggatgttaggaggtggaagggggtggtgatggtgaacgtgcttgccggggacaaggagaaagtactagcacgctgggacgtcctacagtgctt

SEQ ID NO: 90944 - DNA, 1881 bp, Zea mays
  unsure (1)..(1881): unsure at all n locations
  Clone ID: MRT4577_182944C.1
cggccgggaagagatagacaagtagaagctaaggcgcgagtgataggagggttttggttcagagaggagcggggcaatggcgggtggtcgtggctcgtcggcggcgaggctagcgctgctactggtggtggtggtggcggcggtggcgggcggcgccgtggcggggggcaaggtggtgcacgtggaggaggcgcaccggcggagcatgctggccaatggcctcggctcggcccctcccatggggtggaacagctggaaccatttccagtgcgacggcaacggcgaggtggtcatcagggagaccgcggacgcgctcgtgtcgaccggactcgccgctctcggctacagatacgtcaacatcggtgcgctagctagtctccggggttcttgagctgattcttgaaacccttttttttttctggcgataaaaaaaaaggatccttatgaactgaactggattaccaaacgtgttcttgtcgacccccatgtctcagatgattgctgggcagagccacaacgtgacgctaagggcaacctggtggccaacaccaagacgttcccgcacgggatcaaggcgctggcggactacgtccacggcaaggggctcaagctcgggatctactccgacgccgggttccagacctgcgccaaggcccagcccgggtccctcgggcacgaggagctggacgccaagaccttcgcggcatgcggggggtggattacctcaagtacgacaactgcaacaacggcgacctgaagccgctggagaggtacccggagatgagcagagcactgatgaaggtggggcggccgatctacttctcgctctgcgaatggtacgtactgtaacggaacaggcgtgcgtctctcgatcaccatgacctggtttcgtggcaagcgagctgacttgactcgatcaccatcaccaggggcgacatgcacccggcgacgtggggcgcggcctacggcaacagctggaggaccaccaacgacatcgccgacacctgggacagcatgatcgccacggcggaccagaacgaggtgtggtcggagtacgcgcgtcccggcggatggaacgggaacgatccgaacatgctgaagtgggcaacgggggcatgaccaacagcgagtccttcgtgcacttcagcctctgggcgatctccaaggcgcctctcatcatcggctgcgacgtcaggcacatgtcccgggagacgtacgccatcctggccaacaaggaggtgatccccgtcaaccaagatccgctcggcgtgcaggggaagaaggtgcggatggaggggagcagcgagatctgggccgcgccgctctccgagtaccggacggcggtgctgctcctgaaccggcacgccaaggacgaggccaccatcgccgcgcactgggacgacatcggtctacccgccggcacgcccgtcgaggccagggacctgtggctgcacgagacgttggacgccacgttcacggacaagatgagcttcgacgtcgcgccgcactcgtgcaggatgctcgtcctcaagcccaggatccagatccagtgaactacaccaccgctgccgcatgggcgcgcgtacgtgcggccctcacgacgtcaccacgcgtcgattcatttgtactgcaggctactaattgcagacacgtggaatcaaaatcaccaagaatggttcttgttccttgtatcgtattgtgctctcgactcaaccgagacactgggccctcgtgctggcctcacaacacggcccaccccagttgggaacataaatccaccatacccggcccaggcaggttgtccacaccacggactgcattgcgtgctggatcctcgcaaacgcttacatggtccttattttttccctaatntnccgttaa

SEQ ID NO: 90945 - DNA, 374 bp, Zea mays
  Clone ID: MRT4577_182945C.1
cctttctttcccccatctgggggggttttttttaatttttttcctcgtttttttcctaccactctcttacctttttttctttttccctaaaagggtccaaaacccctataaaccttgaaattctctccggtgcaaaaaccacacaggaagccggggcaatttccaggggcacccttattcccaaagggaaaagggtgtaaaactagtgaccccctttcaaaaaaaacccgtatttccaataaaaacaaaaaaataccctgtccgcaacaccccccagaggggttcacccgtttaagacaccaaaattccctcccccaatctttgggggggaacccttcacccaaaaactttttccttacaaaatttaacttaca

SEQ ID NO: 90946 - DNA, 315 bp, Zea mays
  Clone ID: MRT4577_182946C.1
aaaagcccggctttaaaaatgatttaattaaggagaagtttggaatcgcacccttaagcgggatttaaaaattttttgggggggaggatttattttttagcaattagcacaaaacaggggccctgaactacaattaaatcaggggggtgggcatcccccaaaaaatcccgggtctggggcttatttttaccctacaggggtaaggtttggacaaaaaaaagtcatttagcctgataggggggccaaaatgcttgataaaaaccccaaaaatgaggggtcttctatttatgttttagaacattaacaacttttatc

SEQ ID NO: 90947 - DNA, 434 bp, Zea mays
  Clone ID: MRT4577_182947C.1
gggcccacgcgtccgcccacgcgtccgtctacgtttccggctggccatgaggaggcgagagccgtgacctcgatccccttctcttgcacgcaggctccatgccttttcttcgtctctgcgggccgctgtcgcgtcgtgtctgcgaagaatggaggaggcggaggcatcaagcagtagtacgacttctggctaattgagcccatcatgtttagtggtgccggtagagacgacgccgtcgtcgtcgtcccactcaagaacatgggcaggcgagggagctttcgttgtgggaatcagatttgaagcggcgagaggtggtgggttgtgcttgatcggtggtgtgctcatgccttctgttttgtggctgtaggatatcaagaggaggaaagaggcgctgaagaatggtgcagatccacatttgtttttgcataattgct

SEQ ID NO: 90948 - DNA, 590 bp, Zea mays
  unsure (1)..(590): unsure at all n locations
  Clone ID: MRT4577_182948C.1
gtagtgttctcagtgttgcttctcgccgtcgtctccgtgctcgcggcgacggcgaccatggcggagtaccaccaccaagaccaggtggtctacaccccgggcccgctctgtcagccaggaatgggctacccgatgtacccgctcccgcgttgccgggcgttggtgaagcgccagtgcgtcggccgtggcacggccgccgccgccgagcaggtccggcgagactgctgccggcagctcgccgccgtcgacgacagctggtgcaggtgcgaggcgatcagccacatgctgggaggcatctacagggagctcggcgcccccgatgtcgggcaccccatgtccgaggtgttccgcggctgccggagaggggacttggagcgcgcggcggcgagcctcccggcgttctgcaacgtggacatccccaacggcggaggtggtgtctgctactggctggcgagatctggctactagctaggctactgtagctagctgtgcatgtatgtggtgtggttactaaaataattagtgttttccttttgtttggaagcatatgtgtggtgaataaatgatgaactccgatgttcctcttcnaa

SEQ ID NO: 90949 - DNA, 255 bp, Zea mays
  Clone ID: MRT4577_182949C.1
ctcttgctaacgtcatcaatgacaaagtcggtatccgtgaaggtctgattaccacctcccatgccatcactgctacccaaaagacctgcgatcgaccctcgtctaacgactggacgggtggaacggctgctagtttcaacatcattcccagcaccactggagctgctaaggctgttgacaaagtgcttcctgtccttaaccgaaagttgactggaatgtctttcccgctcccaacccgcgatgtttctgatgttg

SEQ ID NO: 90950 - DNA, 533 bp, Zea mays
  Clone ID: MRT4577_18294C.1
gacagacaacagggcacaccataaagagatgaacatacaaacaaactgctggatcctaacaagcggatacgcatgctgctaacgaggatacatcataagggctcgcaatcggcatctcatgacaacccatggacatatacagcgcagtcatcaccatcggctttcaacaccggcaactgactattcgatggaatgctggacgctacacctactaataggcaataaaactttacctcctgtgcaccgaccacctgcacggagggctcaacgctcaatgcatccatgcaccctgagccacgcgagaaatggcctgacagtacttcttgctctgcagcgaaccagcaaaccatacaccctttacactgatgcgagcggaacctggcttggctccacataaccatgtgaatccagttcaagctgtccttccagcgattgggggcgacgctcatgccccatggccaacaagaggaccaacacctgaagagcccatacctcaccatgtcaggacgtgattaacctttacaccatccaat

SEQ ID NO: 90951 - DNA, 603 bp, Zea mays
  Clone ID: MRT4577_182950C.1
aattcggcacgaaggcgaactcaccatctcgtccctcctctctccctctgcatcttccgcctaaagttgcttcgacttctatcgttatcgtccccgtttccgtccttacggcatcatccggtctgattgattgatgaaattcggcgctttcttcgtctagtttgctttccttccttccccagattgcgtgcttgcggcagatctgccttctgccgattcggacattgattcatggcttgaactgtcaccatccactctgttatacctcttcgagctcccatggattagccatcaacaatgcttgattctcttttttcccaatttttttacgacttcatcccctacctttcgtctaccaccgacgactaacaccttgtagtttgctgcttaggatatatacatcttataccgatcagcaacagtcttctgagtcatacccctaaaaatttcgctgatttccttattttaacttttgactggtacgctttgggattgtactgtcagctttttctgaccctgatatccatatactcccactttccgttcgatcttcattataggagcctgctatgatcctgcgtgtgctacaatgtaagatgggac

SEQ ID NO: 90952 - DNA, 408 bp, Zea mays
  Clone ID: MRT4577_182951C.1
gaagcccccaccttaattttttccttttccatggaggtgcccccatttttgttgggccccaagggcaccctttaagggtttttttaaccccccctttaaataaagggtttggaattattgcctgccaaaaaattttcggtggttagttaaaaatttaactgttccaaaagcagcttacccccttggttatttaaaaatccaaacaaatttttaccgatttttgtttgccaaaaaaaacaaaaattttttttgtccaccggcatttttagcaaaaaacaagtgtttttttttttggaaaaaaaaaaaacatgtcctttattttcaaacaaaaaacctttttggaaagtttttttttgcccttggggttttttttggcaagcaagggttgtttcccgggccaccgcccaa

SEQ ID NO: 90953 - DNA, 307 bp, Zea mays
  unsure (1)..(307): unsure at all n locations
  Clone ID: MRT4577_182952C.1
ctcgaggctgggcgggagcgcgcggttgaggctgacccgtacctccccggttcggacgagctcctcgccgtcgccgacgtcctcctcgcctcccagcgcctgctcccctccggccgccccgatccggtcggcgtgctccagctccagcccgccccgggccttgaccccgccgccgccaagcgctccttccaccgcctctcgcagctcgtgtcttccccgcgtaatccccgccccgccgcggacaccgctcttcatttcatccaagaagcctttgctgatcnntctccagcaacgnncctccgctgat

SEQ ID NO: 90954 - DNA, 1814 bp, Zea mays
  Clone ID: MRT4577_182953C.1
gcacgagatttgattgactccaaaagtaaggaaaaaacaattcacacagttttgtatccattttctatttttctcctctcgagtagcgtggcgggcgtggacgcggcggcgatgctgcggtcggcgctgcggcggggaggggcgtccgcgaggcaggtcgcgttggcgggagaagcctcgccgagagacctcctccggatgcgcgtggcggagcgggagcgcgcgaggcggcggcgtcgcgacccgggccgcgacgagttcttcgtgcccacgccagagtcgctggcgtggctcgactcggtctccctccccatggtgctcaccgccgccgccgtggccctcttcaccaagctcctcatgatggaacatgaagctacagatcaagaaaggagagagcgcaagataaagaatagccaccctgatcaaggaacagtaaggatgctatctcgtgaagaatgggaggaggtccaagaagtcaggccaaggaccccttttgaatcaaagttagctcgtccacatgcccggataagaacgggggagccagtgcgactggaggatgtcaaggattgggctactgatgtaatcgcagattcttttaccagagcagaagaagctaccaagaaaaaatgatttagaagaatctaaaacacccggtgtatctgctttatcgtttctctgaatctaaaacacccagttgtaaccgagttcttttacagatccatgaccatatgggtattacggccactatggtattctgagagtgaagccctgagtcccttggtctatgtttcggtgcaccatggtaaacaactgcttcacccgggcctcttggagaaagagcgatataataaagaatactaggtgaattgacacggtgcaatttctcttaaaattttgcgccatgtattgatataaggttaatcgtaccactactttgttcttgtttatatactccctccaatgtagtaaatgtagtcgtttaggacatgattgtgcataccaaggagtgattaattatcatagagttttccctcctccggatgcgcgtggcggagcggaagcgcgcgaggcgacgcggcaacaggaggaggaggccaaggctaaggcgaccgcggcagccgaagcggtggcggcggctcgacgcggcgtcctcttcctcctccatcaccgagccggcggtggaggagcaggccaagcagatcgaggcgctctccctcgccccgtcggtggacgacgccgcaggcgaagagggcccgcccctcctcgatgactccgacgactcgcaaatccaagccgtgatttcgggtggcacggtgtacgagtcggccaccacgttcgaggatctgaagctgtcgcccgagctgcttaaggggctgcacgacgagatggggttcagccgcccgagcaagatccaggcgatcaccctgcccatgatcctcacgccgcccttacaagacctcgtcgggcaggcgcacaacggctctggcaagaccacctgtttcgtcctcggcatgctcagccgcgtcgacccgcaacacaagataccccaggctatctgcatttgccccaccagggagcttgcgcagcagaataaggcagttctcatgaggatgggcaagtttactggcattacatgcgcctgtgcaatcccgccagctcaaaaagactacatgccgatctcaaaaatggctccgatcactgaccagatcgttatcggcacatctggtacgctcatcaaatggattacccataagaagctggccacaagggacatcaagatactttgtgtttgatgaggcagatcatatgcttgc

SEQ ID NO: 90955 - DNA, 429 bp, Zea mays
  Clone ID: MRT4577_182954C.1
tttccaccaccacacgttcactgtagcgatagcttatcgtcgtcggcggctaatatggggtcggggaaactgcagaagcggctcgcctctagcgtcctcaagtatgggaaaggctaagtctttcttgaccccaatgaagtcagctagatcttcatggctaactccctccagaacattcggaaattggttaatgatgggtttatcatcaggaagcctcagaaggttcactctacgtcccgcacaagaagggcacatgatgccaaacataagggaacgcactctctataccgtacgcgcaccggtaccagggatgctaggctccccaccaagattctttggattaagacgatgcctgttctcatgcgcctgcttcgcaagtaccgagaggccaagaacattgacacgcacatttatcatgacatgtacatg

SEQ ID NO: 90956 - DNA, 419 bp, Zea mays
  unsure (1)..(419): unsure at all n locations
  Clone ID: MRT4577_182955C.1
gacgacgagttctccacccatccctctctcttcttcctccctctcgtcgctctctccgtcggcttcgcgtcggtcgtaagccgtcccagccggtgaggcgaggagcgtggaatatcgcgatgctcgattcaagctgcaacaatggcctcacccacggtcgccttcatccccaccgccgcgcccttgccggcctccccgtcgctgcgcctcgcatcagcgtaatccatcgtcgatgcgtccgggtcctcctccccggcctncacccactccggcctccccaatccggttgagccccgtcgacatccccactgtcgcgcccttgctggtctccccgtcgtggcgtctcgcgtcggcaccttccgtcgtcaacgcgttcgggtcctcctctccgaccttncgccactccggaaccagctctt

SEQ ID NO: 90957 - DNA, 474 bp, Zea mays
  unsure (1)..(474): unsure at all n locations
  Clone ID: MRT4577_182956C.1
gcagccaacaataatgtggcggtatttacaattcggttattcagattcaggctcgatcgatcgatcgatcaaagtgctctcactactacccactcggtaacaacctctgatgaaaacgttggcgcgtggcgtggcgattgtactgtccggccggccggcctgcctgccttccgatcgtgccttgtgtcttgtcaggaagccaagaattataatttgtcctcgatcgatcgcactcgcagcgaacggccaatgatggcttgccgcccgcccgcccgccgcaactgatcagtactggtggtggagaagaaaccatatggcgcgcgcgtggtggcgtggcaatggacatgcatgcatccngcgcgtgggctagctagctgtgtctggctccgacgagccagcaggcgcccggcggcacggcacggcgcggcacggcttcagcccacaacgtgcagggcggatcttcttggcggccct

SEQ ID NO: 90958 - DNA, 2542 bp, Zea mays
  Clone ID: MRT4577_182957C.1
cgaccaatcccgcctcccccgcccacggccgcgcctggagcggcgggccgcgcgcggccaccctcgcggcctcgccgtctcgacgccaccgctgggagcgcgatgcccacccgcgcaccgtgcgcaccctcccccacgtgtcccccctgccgcccgagggccccgcctgtcacccaccgtccccggggtgggcagccgaaagcgacgcgtgaagcgctctgccctgcctgctgccctcagcgctcgcctctcgtcacgcgccccctccacaacccccgatgcgatgggtgcccctgcccctcgatagccgcgccgctctcctgcccccgttccccatttgcatcctcgtccacctccctgccctagcaccgtcctcccctattcgacccaacgccgccgccgcctccgccgccgcataggcctcgccgcggcctctgctccgccccgcggcctccggaggttctactcgcgcgcgatccgccgctgcgtccgttgctccgccatcgattcggtggcgcgtggagtatgtctctggtgcaagagtgctgaagatgaaggagaggagctctttatgcgaaagtgcagccgatggaaactggggtttgaaatataaaaggaaaagaagcaagttaacagttagcccatctaatgagaatgaggctacctcaccaacatctgactctccaatgagccatggttccaccaaaaagaagttgaagcatgacactaacatttctccatcagccaagaagataagaggacacgatgggtatttttttgagtgtgtagaatgtgatcttggtggcaatttgctatgttgtgatagctgtcctcgtgtttaccacttggaatgcctcaatcctcctcttaagcgtctaccccctgggaagtggcaatgtccaagatgccgtccgaaaaaaggtagcttgaagatgttaggtaatgcagaggttggcacttctaaacatgaaaaaagtacaaggacatatgcaggtacgacatcaggtagtccaccttcgcatacaaaagtctcctttaagaccaggaactccacacaagacaaaactggatcaaaaaaaaaaaaaaagggcggcgctcgcgatctaatgaatgggggtgaaaccaatacgaagaataatgaagttgagaaaaagaagacactgatattacatttgaagaagcgttcaaccaaggaattgtcagagaacactaaaccctcgaagtcagaatttgttgaactttcagaagagaaaattgtaaaacatggaagtgttttgaaactcaagaaacatccacatcgtatggacttgtctccaagtaaatctaaaaccaggaggcaaagtagccagagagagagtaaaagatctggcacaaaaaagattaaatattccatgtctgatgatgacagtgtttcctcatcagaaccatcgacatctcttgataacagtgaatcaccaccaaaaagaaaacactcagatggaaaagcaccttcatccagtaccaagaaagggaaaaagaaagtgaaatttgttgagaaaaagcactctgaggagcagggcgtggtaggtgacaaaatgatgactacccaggaggatcagcaggtcgatcgcatcctaggctgccggcttcagatgagccaaatcaacccgccgtcccatgcttcattggagcagtttgaatcagctaatctccaggtggatggtatggttcttccacatgcttccgctggcattcctaataggcctcatgatggaacagagtcttctagaaatggtacaattgaggatatatgtgctgatgaatcagccaatcatagtggtcacaatttagaaatgcgaaaggatacggacagtaaatcccatgaaaaggagtcacataagcgagaacaagtcaagaagatattatcagtatgttctggtgatgagaccaatataatgagagatgatcaagtagtcagagaaaatgtttcagcttccaaaaaaggtgaagatgagacatctgatttgccagcagaaaaggatgataccatacttccagtcaccagagcttgtacaatgatcaggaccaatcaagatcatacagatgaaagtaaacagcatgggaaaatagaacaaataacaaataaggactacaatgatgctggatatgagttcttgatcaaatgggttggaaaatcaaatattcacaacagttgggtttctgaatccgaggtaaaaatattagcaaaaaggaaactagaaaactacaaagcgaagtatggaatgagtttgataaacatttgcaaggaacagtggtgccagccacagcgagttattggtcttcgtgcttctgtagatgaagtggaagaggttttaatcaaatggtgtggtcttccttatgatgaatgcacttgggaaagatcagatgaacctaccctgatgaaatatagccatttggtcactcagttcaagaattttgaatgccaggctttggataaagatgtggtaaaagattatgcaaatgcaaggaaccgacatgagcttaatgtgttagttgatcagcc

SEQ ID NO: 90959 - DNA, 929 bp, Zea mays
  Clone ID: MRT4577_182958C.1
ggcgttatccactagtttcctaggaacacagctcatgtgttttcttatgccattttttctctgtttctgaagtcacggctccctgtagatgttcagctcgtctgcgcttggtctttgccggtagccgagctgctccctgtgctcgagctcccagcgccctgcatcagctcgccggtagccaagctctatggcggaaggcctctaagccctgctccttctccaaccgtgccaatgctcgccagctccgttagcccaccggccctgcccctctcagctccggtgtcgtcaactccggctgtgcgccgtcggccatgcctccccatgccgacgttgctccccatgtgctcgcccaggccacaacgtcgtccatgccattcggtgcgctctaggtgttcgacgaaatagaaccaaggaactgtcgccgttcttacatatatcgagtcgattcgattatggtacgctaatgatcgtgcgagatgaagggcatggaccgacgatatcttagtgactatgtcgacagaagatgaatgtattgaccgtaccaggattttggatgttcgccaaccagatgtctctaacaacactaacgtagtgtttatcctaggcaagcccccgtgcattcacctctttccttgatgtttacaaaaatttataaccttgaatgatgcattatgtgataggagttgtgtgatcaaacagttgatgcatttccatccttgattaaacaaccctaatacctgttttatgaaaatttagtgatgcttagccctgcttattaatttaggatggttttttaaagatgatgtgtaacacgggatatgggagtttgtgaaaataaaggacttgtgatgatgaacccattgtagccgcaatgatttcatcattcaagtagggtgtctctctcagaaaaaaaaaaaaaaaaagcggcc

SEQ ID NO: 90960 - DNA, 261 bp, Zea mays
  Clone ID: MRT4577_182959C.1
gtatcggtgcggccctttaacgaactcctcgctggtctatgcgaccgtcatacgactgcggtccatgaggtgcgattagatcgtgcgccacggccctttggctactatgcacaaactactgccgcttaagagatctttggcctcacatcgcactgaatacgtggcttgaagtctctctacatgtgcaaaggtgcccagattgcctctgacggttttgacatactgacactctgatactctgctatcgcggggcggagaaaa

SEQ ID NO: 90961 - DNA, 475 bp, Zea mays
  Clone ID: MRT4577_18295C.1
cgggctcatagagagcccgcgctgggcgcagacatctccagagccgatggcaatactgcagtagggtcgacgccactcggactacactcgatgcctagtacacgcatgcctgatatatcatcagaaccaagaagactcgagaaagaccggccaagataggtcccctatctcattattgagaatgagaaggactctactgctaaagactatgacaacatgctgactgactgctgcgccactggagcgtggaaactctgtgtgatgtacaaccatacgggatgaaccctgcggtgctgccaccacaaggactggctgggctacccgcggccgacgccctaccctacggacatcagtagcgctcagcgagcgaccttattccaggagcacaagaccggagcctcgccggggcccatggccgctgagcgataccccggcaaggaccgtaccggaagcaagcgcgacttccccttgtcct

SEQ ID NO: 90962 - DNA, 368 bp, Zea mays
  Clone ID: MRT4577_182960C.1
gcttttcttgcgcggacggtaatcagacggcgccgcagtgctcgcttgcagcgatggacggacgacaccgcgcaagggttcaaccaccacaaccactttaacacaatcgtacgcaggcttaatcactgggccgggcctatccgaacctcaacctctactgcaactggaatggcgcgtagacctttacgcctcacgagaacactgcaccctatgtcgacgaagaagctctttgcatagctcaagcgaatcatctgatgagctctgatgacaagacagtttgataaatcgaccatgcgatgcttactggtgctgctgatttgatcatctcctacaaactgttgccacacaattattttttttgaaagaaa

SEQ ID NO: 90963 - DNA, 492 bp, Zea mays
  Clone ID: MRT4577_182961C.1
acattctttttggaaggatcactagtagggaaaaaaggggcgaccaaatggcttaccgaccgcatcaaggaccacagacgtacatagcggctatcgaggcgcctgtggcgagcatgaatgacgactgactacacaacactgagggtgaaaggccagggggactacgggctacaggccatccgctacatcttagacggcggcgacgaactgccctgagcagacagtacttctccggagcctctgccgacgtcatcgtataccttcgacgcctgcatccaggaggtggtccttttagcgacccgccgcgaggacctagtcgtgcatgtgaccgacgcgagccagacggtggactccgtctggctggagaaccacggagtggcggaggagctgatgggcggaacgctccgcggagcgcgccagataaactaggaccccgtagaggcgaaccagacgctctactggatggacctcactggcaagctgcgcttagtc

SEQ ID NO: 90964 - DNA, 323 bp, Zea mays
  Clone ID: MRT4577_182962C.1
ctcattactatatggcaaacacgaccttcacttacacaacttacccggcatcggatcagtcagttgaaccatggttgactccaaggccacctcagcagtcaccctacgcaccggcaagtacatgaccaaccggctactggcccggaagcaattcttgcttgaggtgatccaccctgaccgcgccaacgtttccaacgcggagttgaaggagaggcttgcctatgcgtacgaagtgaacgacctcaacaccatcttatgttttaaggttcgcacccacttacgaggaggaaagttcaactggttacgactcatctacgacaacc

SEQ ID NO: 90965 - DNA, 252 bp, Zea mays
  Clone ID: MRT4577_182963C.1
atcagtattactggcttagacaagactgaatgggactgaggtgttacgttggacaaaaattcccggattaaatccccgagctgcggcattatgtgccaacgcacttaagggttgcccacaacttcgacgttaccatctcgggcttggtcggggacttaccgcctgcctgggacgtcgaggcgtagtcgaagatcgtcataaacacttacctactcatcgtttattacgtcgcccttgttgtacgaatatatc

SEQ ID NO: 90966 - DNA, 307 bp, Zea mays
  unsure (1)..(307): unsure at all n locations
  Clone ID: MRT4577_182964C.1
caagacnngcccatggnggaagaatagaaccatgatacatttggaaaggaatacataccgaggttcatcttgacactgacgaaagaaatactcgaaggtgaataccaacatacctatgtctaacaaggagccaaatcaggaaaactaaacatgcatatcaagtggacgccacacccaatctatcagaaaccacacacggatcaaacaaacttctaaacaaaaaaagcctaaaaacacctaaccccaacaatactaagtatattaaccccaccattatttacacaaaacccaacaaatcttttaacca

SEQ ID NO: 90967 - DNA, 2647 bp, Zea mays
  Clone ID: MRT4577_182965C.1
taggggccttttttttttttttttttgcaaacaaaacattcacatccactctagttacatttcattgagccctagttgcggttatagtggctctgcgctacaaaattcttcaacagctgttctgatgaaaccagccacaaagaagtagatgacctatctcaaaaggtacagccaaatacaaaaggaaacttctatttcctcgtattgtatacaccttctatctctttgtattgtatacaccaactctaccatagcagtttacgtctgtgcaaagggatttctcaacagagacgataggtttggcatcaaagggtacagaatgagttagccttgtgaggtgagggttgctggactggatagtctcaggaggataaacggagtgctatctcgtggagaagcaatctcttctgagaggcgtcaatcacaccattgcactctgcattcacgagcacctcactcatgattgcggcagcatgtccagtaggctcttcagatgtcctccttagcatgaacatctgtccacgatgagatatctcaaggcacccaggtggctggatccatggttcaccatcaacctgcacagggaatgaactgtggaggtgtaatcttataacttttccttgggctaaccggtgtgcccttgaaagtccgacctgcagtttgcctagatgccatgtcccggatatacaaaccacctcaagtattttgtcatggattgattgcaatctgaaatcatcattatggtcattgtcgttttgccacagatccacaccacccatgtagctagggatattcattacaatcacaccttctgcatcctccggaatttcaatgtttttcccatcaacctcaaggctaacatgccacggtaaatcagaacatgacctatccatcatatcctttgcaccctctctagcatatataagcttgttgacaaactgactgcaaaatttatctggtttttcctccctagtggtgtggaagtcataagcaacctttgcatcacatccaatacctaaataattagtcataaattttatttgcttggtgcattcaccttctgttccattcttctctttgatggttacattccagcgatcaagcactgtaacagctgcatggtcaacatcatttaaaagtgcatatatgcctccttgtcgttcaacagaagataaaccccctccccagcgcataacacgtgataggtcatttccagttccgagaggaagaatggcgacagggggaggagattcgtagttctgcttttcaatagcatcaagaacccatgctacagttccatccccaccacaaacaaggattctgaagtgtttcacattgtggaatagttgtaatccaacttcaggtgcctgagaagcacttagctcaaatatctgtattggattcaacaacatgttcagccttcttctaagagaaggtccatttcgacctccactcttgccattgatgaataccagcagtggtcttgaatcttgtggcaaatcaacaagttcatactttctgactcgtccattaggaataacagatcgatatgtttgctttacagaatgttgagataaaggctttgctagtgcatacttcccatccaggcccttcaatctagcaaatccttcaagcactgaatcaatgactgagaattttgtgggaatggaatttatcttgccaccaggatgtttttttttttttttttttttgcgtgacctcctacggttcccaactgttgaattggcaaacccgtccttgattgagttcagcattccactaattcctgaaccttgaccaatttctttcactgattggggaggaactataagcctcctgagaaggccaagatcacaagtgtttccggtttccttcaacagttttgcatggcaatcaacatggatctgccgctggcaccacaggcaacgccatataggagagactccaaggaaaggcacaccgcacggctcatcacagtagtaacaggaggaggatatctccgggttgtcatccagctccacccacctctcagaccagtgatgcagcaagggcgaagcgccagcctgtgcaacgcacttgcaatccttctctgcacggggagagcagtttgagtgtgcagccacgccgcaaacagagcagcggtgaaccatgtcgacgccctgcgtggagccaagggacgacaggcaaacgcagcatgtcgatggctggccaccgtggaagtagtcctcagaccacgagtggcaggagctagggcaccgcaatctcctccatgcggcacgcttctccctggtcgccttggtccagtacaacgccgcctcacgctgcagcctgaggagagcgtagatgagtgcggcaagaccaatggagcccgcggtgacgagccagcccacgaagtggagaccggatgggtcaagcagacgtgccatgctcaggagcaaggatcccaccaggtccatggcagttcgccaggcttgtcacgatgagaagcagagcctcggccgcgggacgggtgtggggcgagcaaacccttgctccgcttcgcttggcttgccgtgccgttggcgttgggttcggtcggcgctggcgctggcgctgcagaagaggaaggaaaagaggaggagaattcgaagatcgcgacagcacggcg

SEQ ID NO: 90968 - DNA, 301 bp, Zea mays
  Clone ID: MRT4577_182966C.1
gcggccgccctttttttttttttttttttttttttttttttcgttttttactcgccatgccagacttattaatttcgggcctttcttactcaataaatacaagcgtttttcatggatgacatatccatctttcaagtcaacatcgcaaatcgcaccaaagagggccatcgagaggctgttgacaggggaccaacttggcgtagatttataacagcagacaccgttgactgatcctcgtaaacgatagccctgctctcagagatggaggatgccatttcgatcgccgagaccaactgctagc

SEQ ID NO: 90969 - DNA, 351 bp, Zea mays
  Clone ID: MRT4577_182967C.1
cctctgccacctgtgtcgccatgccaaatgttccaaggttggaattcttccaaaaactcatcacacacattcaaatattcagatcttcaaattcttccaaaatgcccagcctttaacacacatgttccttcatttaacaccttcacacacccatatgccacaatagcgtaactgagtgggcaggagcactcaccacggctaaaagcttaagcctatgggcgagcagcaacatgtgctggagcttgagcctgatcatcatcaccacgtccaaggccgtggccatcttgtccaccagcaggcctatccttcctgcgcctataaatcttccagggacagtggctccctttgctt

SEQ ID NO: 90970 - DNA, 581 bp, Zea mays
  Clone ID: MRT4577_182968C.1
cgcgcaaaaggcaatagctctgttaacctagtctctcacgggcactgtgcgggggtatttataggtgtctgagcacccagcgtctcgtgttaaggacgcatgtgccctcagacacttaggttatccccagaatattctcataaagcagggttacagactgtaattacagggatgcctttacagattaggcccgtaatacgcagcggccacgcagagcccgttacaatgggccggatcacacgtgggcctccgagttggacaaggccgcatggtggaatgacctcgtcgcaggccttcgtctgatgtcatgtggggcgaagggtgtccctgtccgttttatctccgttggaccaacgactgcagcgaaggcctcgagcgaagggtggcgtctttgccttcgccccaacagtcgtcactattcgtttgctttgatcataaattttgtcttccatcatgcatacaggaaaggatagtcttcacacacacaaaacagcaaaggtcaacctgcttccaatcatttgacttccacgtgttcaaaacacaacctgtgcagatgtgctccgcgttcaactgctcctgcc

SEQ ID NO: 90971 - DNA, 187 bp, Zea mays
  Clone ID: MRT4577_182969C.1
ttaaaagcaagctctgggccaactttttggggaaacccccctgccctatcaaaaatttgatcaaaacccggcccgctgcaacaagccaaaacagggggtgcgacacaatggtccacagcccccctccattactgtggtgttcaggtttaccaacctagtgcacttgctctaccaacaaaatttccgg

SEQ ID NO: 90972 - DNA, 535 bp, Zea mays
  Clone ID: MRT4577_18296C.1
ttttttttttttttttttttttttttttttttttttttttttttttttttttttttttttaaaaaaaaaaaggtttatgggtcccgaccccccggccaccttttacgctaacaaaacaaggagggggcgacggggttaaacccaaaaagcggcgggggaacgttaaaccccgtttttttacaaactttggcaaaaaaaaacgaaaaaaaaccccttgggcctttattaagcccccaaattttttacagggacaagcagggggccttaaaccggggctaggaaacattttaccaccagggcaagaacaggagggaactttacaaaaaagcaaacgaaggcgggattttaggagagggggtaccggggcccaaaagcaaaatattttgggggggttccccgctaagccaaggggggtttcaaccaccccgtttatggggcaggcatgctgaaaaccatggcagcagggacatttgaagccgggaacatctgggggggaccactctggaaggaaaaaacaaaacttgggggtttttcc

SEQ ID NO: 90973 - DNA, 581 bp, Zea mays
  Clone ID: MRT4577_182970C.1
ccgaggtcggccggtattaatgccggccgtgtgccacgcgcaaggaggcagcgagcgatccacgtacgaagtataacgtgctgccgccaagctacgctgccatgtgcgaggacgagtgtcgatgctcgcgaccctgaccctgacgctgatagtggcgcaggtaagcgcgggcggtgcggcagctcagacactgcacggctgcacagctggcgcctgcgcgccccgtccatcatcagggggccatcaaccacagcgtcgggctgcattcaaactgatcgcgcattatgcaagattctgacaccaattacccaacgtggcgtacagccgcttcatgaaaaacttgactgccgcatcaatcagaattttggttcgatcgacgcacttagctagaagatgaatgcagaaggcgctgctttacaagggtatgaatgagatgcggttagctttggataaaaaggcaaaaaagctttcagttgaaacaacagctaataaggatcctctggtgactaaaggtgcaagcttggttcccctgtctggggattgatgtattggaacattcatactaccttgcagacaagaaa

SEQ ID NO: 90974 - DNA, 331 bp, Zea mays
  Clone ID: MRT4577_182971C.1
ggggcaaaaaaaaattgttttaaaagttacaaaaaagttttccaaccttttacctcccaagccattaacggtgggcacaaaaagtcgggcaggcaagcctaaaaaacaatcccgattcaaaaaagggggagcaaaggtttttcttaaaaactaaaatagcccgcttgcttgctttttttttattaaaatcatttacccgctggttcccaaattttttaattttacatcaatttccgtttttaggttgataccctttttcgggaggcgcaagagttgggcttgttaaaactttttttgaaggagtttacaacttccatgttaagttgttttt

SEQ ID NO: 90975 - DNA, 331 bp, Zea mays
  Clone ID: MRT4577_182972C.1
caccgagaaagaccatttgttggttcgcatcgcatcgggctatcgggcccaagagctgaccgcgccggtggccgtgggcgcgacaccaatgggagaaaagaatcagtttagacaacacgggcaggagcgactttgccagtccgcctaccgggaaccgggccaaaggacaaagaattccacaggttttagatgatgggctcgccctccggggcacttggccatgtcgggcgtcgcactcgcaccgccgaggacggcgggccgatttgtcctccttatttaggcaccgacttttgtccccatccgagccgaaccaaggggccatgggctcccc

SEQ ID NO: 90976 - DNA, 834 bp, Zea mays
  Clone ID: MRT4577_182973C.1
cattgggtgcctcgaggccggccggacagttacttgcagctggccatgcacatggcgctatcgtcccgcagctcattcgccgccgacgtcctcctcccagccaccatgtcgtatcgtcagccgtgcagcggtgcttccagctacttgggctctcagcccgcggcccctttcccgtcggcagcgttcggcgcggtggcgcagctggacgtcttcgactgcctgtcgtcggacgaaggcgttggcgtcccggcagctgtacctggtgcgttcgcgccgccgccgccgcttatgccggccgagcgcgtcgtcccggacgctgctgcaggctacagtagtcatactaggagtgcagcggctgtggcgggtgaggggtcgaggactacgcacagaattgcgttccgagtgaggtcggacgaggacgaggtactcgacgacggctacaaatggaggaagtacggaaagaagtccgtcaagaacagccctaatccgaggaactactaccggtgctcgacggagggctgcaacgtcaagaaaagggtggagcgagacagggacgacccgagatacgttgtgaccatgtacgagggagtgcacaaccatgtgagtcctggtaccgtctattacgccacccacgacgccgcctccggccgcttcttcgtcgccgggatgcatcagccaggccattgatcaacgagcagatcagagagcgtcttaattagtgtaagatatgtataccgactatctgttttaggccttgttcatgttttaggtcttgtccagttattccaaatcatatagattggaatgtattgaaatgaattgagatagatttag

SEQ ID NO: 90977 - DNA, 658 bp, Zea mays
  Clone ID: MRT4577_182974C.1
attcggctcgaggattgttcctgatcgaaacccgaactttttggcaaatgagtgccggtggtgcttttggcggaaataggggggtgaggcctgtacctcctgaaaaaggtgtgttcccattggatcacttacatgagtgcgacttggagaagaaagattatcttggctgcctgaaatctacaggattccagtctgaaaaatgtcggcagttctcaaagaagtatttggagtgtcggatggagagaaacttgatggccaagcaagacatgtcagagcttgggttcagaattgtggatgaagcgggtacatctcctgacaagaacagcaaaccggagagccctcctaatcagccaaaggattaaaaaaatagctgtttggctttgatgtagcttttgtatgtttcttcatcccaaagatctgtcaagatctcaaacaaataagggtataatgaaaggacgatgttagtttacatagtattaaaaaaatagttgtttggctttgatgtagcttttgtatgtttcttcatcccggagatctgtcaagatctcaaacaaataagggtataatgaaaggacgatgttagtttacatagtaaccaatttgaaacttgtatgttggctgttttgagttttgacgttcctaaggagcagttatatga

SEQ ID NO: 90978 - DNA, 553 bp, Zea mays
  Clone ID: MRT4577_182975C.1
gccggccgggccgggtccaggactctgagatgattggcagctatgctcccaacactgataagcagcccacctacgtcaagaagttccaagaggaggaggcacctagcggcatgcttgctcgtggtcactacaacgccatctctagcttcgtggacgacgataagaagaagcatctcgagtttgagtggagtttcgacatcgccaaggactggtagacagacaccaacaccttgatagcgcgacccgacgacataactcaaaaaatacatatcacacacgtcatgagataatgagatacctgaacattggagaagaattttcacacaaaaaactcacataaaagcaaaagaaacccccccaatttgggccggagaaaggtggttgctctgtttcgtatcatctactcgtcactgacgagacagtacttgagctcggtttggagcttcaatgccggaggagaataaaaatccttatatacatcaaagtctatgctatgcaatgcaggtctattgtctgttgcaatacgcaaaaaaaaaaaaaaaaaaggccccta

SEQ ID NO: 90979 - DNA, 268 bp, Zea mays
  Clone ID: MRT4577_182976C.1
cttgcattctgccgcagatggctggatcgcttgggagagagtaaatacttgatggctctgaagaatctgtgtgacttgggcattgtagatccatatccaccattatgtgacattaaaggatcatatacagcgcaatttgaacataccatcctgttgcgtccaacatgtaaagaagttgtcagcagaggagatgactattaaacttagtccagagccacctcaacacctttattttctgagctttgttggaaaacatgataccagaatt

SEQ ID NO: 90980 - DNA, 348 bp, Zea mays
  Clone ID: MRT4577_182977C.1
tttaacagcacaaatgttcatcagagtcatgttccatctcatcttcagaatcttcaaactgcgactattaggggttaaggtatttcatatcacggtcgatatcttagtgtacaaggaatagaatagccggtcaaagtccaagctcagaggctttgatagctaggatgaaggcccggtactcctctctaattttttccggatgtaaggagtggacgctactgtagttggaaatcgcttgattagcagcctcgttaccgcatagtagcacccattgatctctttggtcttgttaatagttaagtgatagtttgttttttattactgttggtgatcgacatcatctatatg

SEQ ID NO: 90981 - DNA, 199 bp, Zea mays
  Clone ID: MRT4577_182978C.1
cgcactaagcggggcttctgacctgtctcgaccagaccgtctctaccacccctggcctctatcatgacaagaaacctcctccagtaataatagatgcactgcgatcctacgagtgcccggcatgactgctgtgtctttgattgcccttattacacggataagtaggagaagatcgcctactcctacttcggcacctgct

SEQ ID NO: 90982 - DNA, 830 bp, Zea mays
  unsure (1)..(830): unsure at all n locations
  Clone ID: MRT4577_182979C.1
tgggtacctcgaggccggccgggaaagtgcagtcatccatcactaccaatcgtcaactgccatcatgaagacggctattcttctcgctgcgggcgcgctggcctcgcccgccgttgctggcgttcacaagatgaagctccagaaggtgcctctgtcagagcagctgaaacacgcaaacatccaggagcaagcaaaggctctcggtcagaagtacatgggcattaggcctgagacccatgccgaccaggtcttcaaggcgccatatgtcgccgacggcacgcacccagtgcctgtcaccaacttcttgaatgctcaatacttctccgagatctccctcggcacccctccccagagcttcaaggtcatcctggacactggaagctccaacctttgggttccctcgtccgagtgcaactccattgcttgctacctgcataccaagtacgactcgtctgcgtcctcgacctacaaaaagaacggcacctcgttcgagatccgctacggatctggtgagctcagcggcttcgtctccaacgatgtcttccagatcggtgacctcaaggtcaagcaccaggacttcgctgaggctacctctgagcccggccttgcctttgcctttggccgtttcgacggtatcatgggtcttggctacgacacaatctcggtgaacaagatcgtgccccccttctacaacatgatcgaccagggtctgttggacgagcctgtatttgccttctacctgngtgacaccaacgagggccaggagtctgtcgctacctttggcggcattgacgagagccactacaccggcaaactgatcaagcttcctt

SEQ ID NO: 90983 - DNA, 670 bp, Zea mays
  Clone ID: MRT4577_18297C.1
gtaccggcgccccctctcgagttttttttttttttttttttttttttttttttttttttttttttataaagttattttgattcacatatatcaatatttgggattgaattgacatattaagcccttgtaggttgcctgtatagcattctgattgttgccttgatccttctgttcttggaggaaggaggggtatttctatctctaaactgatgacacatctcttttcagggtatgattggtggacatgtgtactactttctggaagatgtatacccacggatgactggccgccgtccggtgaaaacaccgtccttcatcaaggcgctatttgctgatgacaatgttgggggggcacaaccacccaatgctgggattggtgctggtgcaaggtttggggctatgggtctagatccccaggctcaatgatatgaattactttcagcgacctgaggctgggactgatctgacatgccgcagtctgttcctctgttagcagggcccgaaggaaatggtttctgatgtgccaacaggccaaaacccctgtcgccgaaacttgttcttgcaacggtttaacatctgacctactactctttcatgcatcagggagtttagtctaggaaactgttccaaacgaagttgaaatttgttgctttggcagcgagaattcctc

SEQ ID NO: 90984 - DNA, 299 bp, Zea mays
  unsure (1)..(299): unsure at all n locations
  Clone ID: MRT4577_182980C.1
gacacatggtggagggactcctatccctaaaccatttttattccgacagacgcagcccacaacggggaggagcaacaacaaanggaaacacggcgcccccccccccgccgcagaacaaccagacggagcacccaccgacgccgaccacggacgacaaccaagcggaccacacgccaaccgccaggcggggacaaccgccaccgaacgcagcaagcggcgccggcgccaaccgccgacggagcgggggaccaggcgaggacccaccgcaccggggaccagaaaaacgggacggaagagaa

SEQ ID NO: 90985 - DNA, 351 bp, Zea mays
  Clone ID: MRT4577_182981C.1
aatcccggggcggcccacgggcgtccggaatagaattttttttggccggccataaaaccccttatacttgccgcccgggaacccctccggggcgaacaaggtcaaccaggccctgggggagaaactccggccctcttacggggccgcttccgcaaaaccgggggccggtgaaccaacccttggccccacctgccggggttcggccgccggggcccccttagggggggtcatgtcctgggctccctgggcccccacataaaccacaaacccaaatctggctttgcaggaccatggccggatctgcaaagaacttttaaaccttcctaaaagggaacgggggctggcttttaa

SEQ ID NO: 90986 - DNA, 459 bp, Zea mays
  unsure (1)..(459): unsure at all n locations
  Clone ID: MRT4577_182982C.1
gatcctctagagcggccgccccgtttgctgtggagacactctgttctttcgcaccagcggccgaacgaggggcgcgtttgatttggagccgccgccgcccaaccacgacanggacgagccgcgggcgctggccggcaccttctagaggccagtacctgacgataatgcacaggagagtacttaccggaatgcacggagcttaagtcatcgtctgtgtcgcttaaaagtgtaccagtcatgatctacaccaacaaagttttttttttttgcacaagaatgcacataagatactgggtgattttcacaggactattcgcttagtacctttttcacacttaatttgagcactttgtgtaaaaaaaaaacttgactattattaccttcgaatttttttcccaaaaataattgcataggacgtttcttttaaactccgcaaagatagttaatataaatataaaa

SEQ ID NO: 90987 - DNA, 151 bp, Zea mays
  Clone ID: MRT4577_182983C.1
gtgcccccataaggaggaaagcgaagctggagcaggacccttggttgagcggcggagcccaacgtgccggcgcattcgcgcccgcaagtgcggcaacgagaacggaaggtgcccgcctcacccggatgaaagcgaagctggagcatgaccc

SEQ ID NO: 90988 - DNA, 383 bp, Zea mays
  unsure (1)..(383): unsure at all n locations
  Clone ID: MRT4577_182984C.1
nnnttnnnnnnnnntttttggttttttttttttgtgttttttttttttttttttttttttttttttttatataaaaaaaaaaaatttttcccggttttacaggttacaagcaacaaagtttgtttagcccgatgatttggcccgggacatgtacaaattctggccgcccgacagaaagggaaaacaaaagggggggggggatcttgcccatggggataggatcttggtctttttatgcatccatcccgcagggtttttgcaggcattttgtttgctaatttggttgcaggccacacgagagagaaccggtgtttgtttcccatcccattccattcctgaacccatgggcacctggtttttggtggctccggcctgaatttttt

SEQ ID NO: 90989 - DNA, 695 bp, Zea mays
  Clone ID: MRT4577_182985C.1
atgaaaaaatgtattgctatcatctgatggaaagagaattaagatcttccttttcaccacaaaagtaacaaagagtggttggccatttttttatgtacactgacttctacaatctttgttgcattgtttattcaagaaccctaacttctacacaggtaaactgtaaggagagatgagcttatcggttttggtgtgagcagaggcagtctactcggcgaaagagtgttcattcaattgctcggttggaagcggctcaaccttctcggccttcccgtctttctttgggattatcagaccgtaacctccttcttttctcttgtacactatgtttatctcaccagtttcttcattttggaagccatagaagtcgtgactgactagttccagctgctcgactgcctcagcgacagtcaatggtggcatctcgaaagtcttggtacggacaatctccttgatcaaatcatcctcttcttcttcttctcctacgctcgagtcagtactgtcctcaacatcctccacaaccggctcaatcactggttcccttaccttcaatctgttgaaacctttcatgtgccttccatggtctgagtccttctccttgatcttcctcagcttcctctgtattatcgttgataccaagtcgatacaagcgtatactgtctcagcatcttcctcagcacgcacaacaccatgct

SEQ ID NO: 90990 - DNA, 416 bp, Zea mays
  unsure (1)..(416): unsure at all n locations
  Clone ID: MRT4577_182986C.1
tatacgacgaccgccgcggncgaacccaacagcttcctcctcccggcgncgcctccgcgacgatccttctccgccgccccatagggnnctggtgctcccgatccgnncgccagatctcgcgtggcgacgcgcgganctcgnanttctctagagggggcgncggcggcggccggagcaggaggagatggcgctctcggggatgggggggatctcgtncttcatcaccgacgaacgcaactgccccaacaaggagcaggagcgcctccgccacaacgaggagctcggcaacctccggacgcggaatcaacgcgagaagggcttgaccccatacgagaggaagaaatatggatggaaaatgttttacatttagaaggtgggatatgatgatgattacgggcatatggaaactgtctcgt

SEQ ID NO: 90991 - DNA, 239 bp, Zea mays
  Clone ID: MRT4577_182987C.1
ccgataaactatgtgtttttttgttgcttggtgttttacttgattgaacatatgccccctctcaaggatgcctttattggacgaacacttttgtaacttattatcccagatggtcagaagccagcccacgatgctgttgatacactaagccaacctgcccggcagggcgctcaaagaacaattccagctgacggggggcccggactgtaggaatcctaacacgagaccaatgtcggcaa

SEQ ID NO: 90992 - DNA, 405 bp, Zea mays
  Clone ID: MRT4577_182988C.1
agagcggccgcccattaccaattcttttttttttttacccctcaataataacaaaacaccagggaagggttttaatttagaaatttccgtggggtttccccaccggccgggaggggccacaaaggcccacgggcaaaacaaggtaccgaaacgctgacagaaagggccgaaccaacaaagggggcgcgccccccttcgaaaaaaaaaaaggggaccgcaaaaaaaagcccgccattgggacggggcgccccacccaaccgtggaaacccggggggcccgaacccacaaccagagttttcaaattcggggggccaaaaaccccgcgggaaaaaaaggggatatggaccagggacccctaacaatcacaaggggggaggggaaaacccccccccccccgaccccggg

SEQ ID NO: 90993 - DNA, 373 bp, Zea mays
  Clone ID: MRT4577_182989C.1
gcctctgtcacgcaaaattctgatctctaggagcgccagcagcttcaatatcaaatgcgaaaggctgatctccggcgagcgaccttggttcataacaaagggactggaacatatgaccctgaggacatcaaattcatattcatggaacgataatatccacctcatgtgactatgccagcgtcagtcgacatacaagaggtcaggctatcataatgcggtacaacatctgatcccgaagtgatcgtattatacatttgtacagctaggagatgagcaaaaaatggatcaaaatcctcttagtcattgccaactaccttagacatatccttggttagagtttactattctgactctggactattcttagccgagc

SEQ ID NO: 90994 - DNA, 348 bp, Zea mays
  unsure (1)..(348): unsure at all n locations
  Clone ID: MRT4577_18298C.1
ccccgcgtccgccccccccccttttttttttttttttttttttttttttttttttaggcatcatcggggggatatatatatagggatctccaagaaccattgagcacaaactctatataacaaattttgcgcgttaaaaactgcaccctggcctcgcaattagccaccggaagggtgggggggagaggtatcgataccaactaaaaaagaatggtagcaaagggggttatctttatacatacactttttaggagatggaatcatggggtaaagcattttgtattgcagctactgctgacaaggaaaaaaataagccggcatgctaagctgagcgataagttcctccna

SEQ ID NO: 90995 - DNA, 327 bp, Zea mays
  Clone ID: MRT4577_182990C.1
ccgacgcctgcctggacgcgcagctacacgcttttgtacccgaccaagtggacggtgagcatctgttatgtcttgctccgcgctatagagcgcaggcatagcagccgtctgctttctagcttgagaacggctgctcgagcaatgtacagcatcatcaccatcccgctgagcatggagaaggacatgaccgcataggcgtgtggcgtgatgaacgcgatggtctttgagcatctgctatcagcggagctagactacacaggcgggcccgtctacacgaactgcaatgacatacacccaggcgcggcgtgcttggtgcccaatagcatg

SEQ ID NO: 90996 - DNA, 315 bp, Zea mays
  Clone ID: MRT4577_182991C.1
acggaagatccttccatttagtagcacttctaaatggcatactcttaacaacaaggggcgagggttcagaaccaagaaaaagcttgccaactgataccatagatcgcccacagaacgaggtagcttgcgtctccatgctagcaaaatgcttctgccgagccctaaaataactcataaatcgccgatatacacaatcacataaccttcataactgccgacataattcatacacacaacaaacacaacctggctaactgaacacatcttacgtaccagttaaaatgaaaactataccattgcccagtgtaaccacat

SEQ ID NO: 90997 - DNA, 331 bp, Zea mays
  Clone ID: MRT4577_182992C.1
tttttttttttttttttagaaaataaattttatgcccataaattcaggtgactctttgccggtcacaagtcacagacagtacaactcaaccgactcagcccatgccttgcgcctgatgatggcgcttgcagccagcgcatcactgcttgacgtctcctcccaacgatgactctcatggagatcactcatcatctccgtgatgtcatcgaagctgcttcgaggaacccgttcatctggtggccacacaaacgttggcttctcaggtggcacgtcgggcgccggcaccgacttggagacgacctgcaccacctcggccatgctaggacgatcc

SEQ ID NO: 90998 - DNA, 484 bp, Zea mays
  Clone ID: MRT4577_182993C.1
agcaagtcgatgaacttagagggcttccgctctggattttctttgaaataagttagagtcctgtcaaacacctcttttctctgccaaacgatctacaaaatggctttagcttagaaaactgtttagttagaaaactgtttagcttagaaaactgtttactcggccaggggacagagagacgcattaccttgccttcttgctcttttcgcctctagcggtgctgtgtattcagttacttcgtctcaaagaaattcagttggtttcatcctatacacctatatgtagccggccctgtgactcgcagggcagcgtatgatctttgatcctcggcttatgtattcacctcatcggccgcttaaccttgtgtaggaggagatggcgctcacaagaatcggtcttgctggccttgcggtcatggggcagaaccttgccctcaacattgcagagaaagggttccccatctctgtgtacaacaggacaacct

SEQ ID NO: 90999 - DNA, 404 bp, Zea mays
  Clone ID: MRT4577_182994C.1
ggggccaagataccataattggcgacttttttgttagacaaccaaaccgttttaaaacccaactgcaaaacggaactgggggcgggcattaacatccaaaggcatgggaacaaatttttgaaccaataaaaacattataaaatggggtcagcaactaccgacaatttgcctggggtttagggaacgggaaggggcgatagcctttgaaacaagctccaaaattataaatgtggtccgcaaaataaaaaaaaaagggtcagttttttgcccccccccaggttgaccaaaagggtgaggaatattttgatggaccccagcggtcaataaacggaggagggccatcttgggggggggggggggcattctgtggtgcaggaaaaccattttgccttttaaatttggga

SEQ ID NO: 91000 - DNA, 3520 bp, Zea mays
  Clone ID: MRT4577_182995C.1
aagagagtaggtggacggacggtgctggcatcgccaattcaactccgcatctgcatcggcagcgcgccagctccataggaggagatggcgctcacaagaatcggtcttgctggccttgcggtcatggggcagaaccttgccctcaacattgcagagaaagggttccccatctctgtgtacaacaggacaacctccagggtggacgagaccgtgcagcgtgccaaggcagaaggaaaccttcccgtctacggcttccatgaccccgcgtcctttgtgaagtccattcagaagccacgggtggtgatcatgctcgtcgaaggccgaggcgcgtggccggacggtggtggcatcgccaattcaactccgcatctgaatcggcactcggcagcgcgcgagctccatagcatggggactgggggttgaattcgtgtagagatccagatgattgcgctgctagctccgatcgccgattttactctgctgcctgccggtccagatccatggaagcaagtcgatgaacttagagggcttccgctctggattttctttgaaaataagttagagtcctgtcaaacacctcttttctctgccaaacgatctacaaaatggctttagcttagaaaactgtttagttagaaaactgtttagcttagaaaactgtttactcggccaggggacagagagacgcattaccttgccttcttgctcttttcgcctctagcggtgctgtgtattcagttacttcgtctcaaagaaattcagttggtttcatcctatacacctatatgtagccggccctgtgactcgcagggcagcgtatgatctttgatcctcggcttatgtattcacctcatcggccgcttaaccttggtacatgaaaatagattttgtttccagggtcctgctcggcttatgtatgaaatagatttttttttctcagggtttcttctgcttttatgtcacgccgcctgtctcttctatgtgtcaaaaaaaaaaaaaaaaaaaaaaaaaaaaaaaaaaaaaaaaaaaaaaaaaaaaaaaaaaaaaaaaaaaaaaaaaaaaaaaaaaaaaaaaaaaaaaaaaaagccgattcaatgcgtgcccgggccgaccgcacggtgcgaaaggcaccttccctgcccgattggcgatttaagtggtgggggagggaaggccgatggtcagtgaaagagaggtaggtggccggacggtggtggcatcgccaattcaactccgcatctgaatcggcactcggcagcgcgccagctccatagtgtaggaggagatggcgctcacaagaatcggtcttgctggccttgcggtcatggggcagaaccttgccctcaacattgcagagaaagggttccccatctctgtgtacaacaggacaacctccaaggtggacgagaccgtgcagcgtgccaaggcagaaggaaaccttcccgtctacggcttccatgaccccgcgtcctttgtgaagtccattcagaagccacgggtggtgatcatgctcgtcaaggccggcgcgccagttgaccagaccatcgcgacgctcgcagctcacttggagcagggcgactgcatcatcgatggggggaacgagtggtacgagaacacggagaggagggagaaggccatggaggagcgcggcctcctgtatcttggcatgggtgtctctggaggagaggagggtgcccgcaacggcccgtccttgatgcccggaggctcgttcgaggcttacaagtacgtcgaagacattgtcctcaaggtggctgctcaggtccctgacagtggcccgtgtgtcacgtacattggcaaaggtggatcgggcaactttgtcaagatggttcacaacggaatcgagtatggcgatatgcagctgatttccgaggcatacgacgttctcaagtcggtcggtaagctcaccaacagtgagctgcaccaggtgttctccgagtggaacaagggcgagctcctgagcttcttgatcgagatcacggccgacatctttggcatcaaggacgagcatggcgatggctacctggtggacaaggtccttgacaagaccgggatgaaagggacagggaagtggacggtgcagcaggccgccgagctgtcggtggccgctcctacgatcgaggcgtccttggactcgaggttcctgagcgggctgaaggacgagcgggtggaggcctccaagatcttccagggtgactactactccaccggctcgccggtggacaaggcgcagctggtggaggacgtgaggcaggccctgtacgcgtccaagatctgcagctacgcgcagggcatgaacatcatcaaggccaagagcgcggagaaaggctgggggctcaacctcggcgagctggccaggatctggaagggcgggtgcatcatccgcgccatcttcctggaccgcatcaagaaggcctacgacaggaacccgggcctcgccagcctgctcgtagaccccgagttcgcgcaggagatcatggacaggcaggcggcgtggcgcagggtggtgtgcctcgccatcaacaacggcgtcagcaccccgggaatgtccgctagcctggcctacttcgactcctaccgcagggacaggctgcctgccaacctggtgcaggcccagagggactacttcggggctcacacctacgagagggtcgacatgcctggctctttccacaccgagtggttcaagattgcgcgcaacatctccaacaactgatgagctgctcaacggatggcatgcccggtgttgactactccagtcggtaatgagatttcctgcaggaacttgtctattgatctttgtaagttaattatttatatgaataaaataagagcagacatgcttgtgtttgggcaccctctgttttctcctccctgttaatcaatgcaccatgctccaaaggtgatgtacataattcagacaagtctcgatgatgtacatgttacagaactagcgaaagagatcaacttggtcgccgcccagcctgctcgtagaccccgagttcgcgcaggagatcatggacaggcaggcggcgtggcgcagggtggtgtgcctcgccatcaacaacggcgtcagcaccccgggaatgtccgctagcctggcctacttcgactcctaccgcagggacaggctgcctgccaacctggtgcaggcccagagggactacttcggggctcacacctacgagagggtcgacatgcctggctctttccacaccgagtggttcaagattgcgcgcaacatctccaacaactgatgagctgctcaacggatggcatgcccggtgttgactactccagtcggtaatgagatttcctgcaggaacttgtctattgatctttgtaagttaattatttatatgaataaaataagagcagacatgcttgtgtttgggcacaaaaaaaaaaaaaaaaacagccaatcaatgcaccatgctccaaaggtgatgtacagaattcagacaagtctcgatgatgtacatgttacagaactaaaaaaaaa

SEQ ID NO: 91001 - DNA, 481 bp, Zea mays
  Clone ID: MRT4577_182996C.1
tcggttagcggattacaatctgaacaacagaccaacaatggcgaggcaggactcatacactattcagcaacttgctctttgtgtatgagctgataacgcgacaataagagtcaccgctaacaagctgctataggtaggatgccgctcggtacgctaaatcagtggtggatagggcatcagaaaacgcagctgtaaaagggtatagggttcaacacgcaactgctggaagaaagataccttcagcagccttgttgataaaaaaatacggcagccctatatctaggtgcactaaatgggtacaaaccatgatggcacagaaaatgaaggaacttcagctacctcaaatcaaccaatgaaataaggcaaacctgtctacatactctaagcaacaacaatttgtatcattaaaccaactgtctacaatgaaccctggtgcttatttgcaacaacaactattaccaaaaaaaacagctagctactg

SEQ ID NO: 91002 - DNA, 2469 bp, Zea mays
  unsure (1)..(2469): unsure at all n locations
  Clone ID: MRT4577_182997C.1
cgggnaaaaaaaaaaaaaaaaaaaaaaaaaaccctggtccgattccagcttccgtctctgccggccggtgaagagaggtggccggacggtggtggcatcgccaattcaactccgcatctgcatcggcactcggcagcgcgccagctccataggtgaggcttcggatcccgatctccgcaccctgtccgattccagctccgtcctccccggatttcagttccaccgcgttgaggttttctttttttgtctcctttgggtcctcttgttcccgaagcatggggactgggggttgaattcgtgtagagatccagatgattgcgctgctagctccgatcgccgattttactctgctgcctgccggtccagatccatggaagcaagtcgatgaacttagagggcttccgctctggattttctttgaaaataagttagagtcctgtcaaacacctcttttctctgccaaacgatctacaaaatggctttagcttagaaaactgtttagttagaaaactgtttagcttagaaaactgtttactcggccaggggacagagagacgcattaccttgccttcttgctcttttcgcctctagcggtgctgtgtattcagttacttcgtctcaaagaaattcagttggtttcatcctatacacctatatgtagccggccctgtgactcgcagggcagcgtatgatctttgatcctcggcttatgtattcacctcatcggccgcttaaccttggtacatgaaaatagattttgtttccagggtcctgctcggcttatgtatgaaatagatttttttttctcagtgtaggaggagatggcgctcacaagaatcggtcttgctggccttgcggtcatggggcagaaccttgccctcaacattgcagagaaagggttccccatctctgtgtacaacaggacaacctccaaggtggacgagaccgtgcagcgtgccaaggcagaaggaaaccttcccgtctacggcttccatgaccccgcgtcctttgtgaagtccattcagaagccacgggtggtgatcatgctcgttaaggccggcgcgccagttgaccagaccatcgcgacgctcgcagctcacttggagcagggcgactgcatcatcgatggggggaacgagtggtacgagaacacggagaggagggagaaggccatggaggagcgcggcctcctgtatcttggcatgggtgtctctggaggagaggagggtgcccgcaacggcccgtccttgatgcccggaggctcgttcgaggcttacaagtacgtcgaagacattgtcctcaaggtggctgctcaggtccctgacagtggcccgtgtgtcacgtacattggcaaaggtggatcgggcaactttgtcaagatggttcacaacggaatcgagtatggcgatatgcagctgatttccgaggcatacgacgttctcaagtcggtcggtaagctcaccaacagtgagctgcaccaggtgttctccgagtggaacaagggcgagctcctgagcttcttgatcgagatcacggccgacatctttggcatcaaggacgagcatggcgatggctacctggtggacaaggtccttgacaagaccgggatgaaagggacagggaagtggacggtgcagcaggccgccgagctgtcggtggccgctcctacgatcgaggcgtccttggactcgaggttcctgagcgggctgaaggacgagcgggtggaggcctccaagatcttccagggtgactactactccaccggctcgccggtggacaaggcgcagctggtggaggacgtgaggcaggccctgtacgcgtccaagatctgcagctacgcgcagggcatgaacatcatcaaggccaagagcgcggagaaaggctgggggctcaacctcggcgagctggccaggatctggaagggcgggtgcatcatccgcgccatcttcctggaccgcatcaagaaggcctacgacaggaacccgggcctcgccagcctgctcgtagaccccgagttcgcgcaggagatcatggacaggcaggcggcgtggcgcagggtggtgtgcctcgccatcaacaacggcgtcagcaccccgggaatgtccgctagcctggcctacttcgactcctaccgcagggacaggctgcctgccaacctggtgcaggcccagagggactacttcggggctcacacctacgagagggtcgacatgcctggctctttccacaccgagtggttcaagattgcgcgcaacatctccaacaactgatgagctgctcaacggatggcatgcccggtgttgactactccagtcggtaatgagatttcctgcaggaacttgtctattgatctttgtaagttaattttatatgaataaaataagagcagacatgcttgtgtttgggcaaaaaaaaaaaaaaaaaaagcccaaaaaaaaaaaaaaaaaaaaaagcggccaagagaggggg

SEQ ID NO: 91003 - DNA, 748 bp, Zea mays
  Clone ID: MRT4577_182998C.1
gcaaggttgcgaaaggcgaggcactttccctgcctgattggcgatttaagcggtgggggagggaaggccggtcgggagtggaaagagagtaggtggacggacggtgctggcatcgccaattcaactccgcatctgcatcggcagcgcgccagctccatagtgtaggaggagatggcgctcacaagaatcggtcttgctggccttgcggtcatggggcagaaccttgccctcaacattgcagagaaagggttccccatctctgtgtacaacaggacaacctccaaggtggacgagaccgtgcagcgtgccaaggcagaaggaaaccttcccgtctacggcttccatgaccccgcgtcctttgtgaagtccattcagaagccacgggtggtgatcatgctcgtcaaggccggcgcgccagttgaccagaccatcgcgacgctcgcagctcacttggagcagggcgactgcatcatcgatggggggaacgagtggtacgagaacacggagaggagggagaaggccatggaggagcgcggcctcctgtatcttggcatgggtgtctctggaggagaggagggtgcccgcaacggcccgtccttgatgcccggaggctcgttcgacgcttacaagtacgtcgaagacattgtcctcaaggtggctgctcaggtccctgacagtggcccgtgtgtcacgtacattggcaaaggtggatcgggcaactttttccagatgggtcacaacggaatcg

SEQ ID NO: 91004 - DNA, 708 bp, Zea mays
  Clone ID: MRT4577_182999C.1
tgggaccctccaggcggccgcgatgcttaatcttcgggtaacggtttcgatggaaacccagtgagacactgcggccttcgcccttccatcttcatccagctggggaagataaccctccgatccggcgcaggcatgcttaatctgtccaggtataaagcacaaaaaagtgatcctctcatctaattgagactgttgagtatctcacatattcttgtgcttgcttgctgggatcggctttggctcaggagcatgagcgaaaagatatgattcttcatttctccttctggctataagttttagtttctttatgatgggaaataaaactggtaagcctgtcttcagtgagctcaaatccacagagtttagtttattggagagcactctagtacaggatcattgtgcaatcccgacttgtgtaccattggattttctgaaggccatcacgagtgatttctctaaggagcaagagctaggaagaggtgggtttggagttgtttataagcgccttcttaaaaatgggaaggcgatagctgtgaagaagctttctgaaatgaacctagatgacgatcagttccataatgaagttacttatcttttcgggttgaagcacaaaaatattgtccagctaaaagcttattgtgctgaatcacggtgggaagcaatcgaattgcgcagaaaatatgtcatggctgaatctcggaaaaggct

SEQ ID NO: 91005 - DNA, 658 bp, Zea mays
  Clone ID: MRT4577_18299C.1
attggtacctcgagccggccggggcttatcttgctttctttcatcctctgtcactcccctacgactactatgccttgtcaggtaagctcttcacaggctgagccgcgtccacgtctacggcatccagcgctgcgatgggcagcttagggagggagcgccgccgatggggacggagttaatgacaagctgcctgaccttgacatgacgctcatcattaccctgaagactcctccgcttcatatctatccctggcatgcgattcggactactacctgttacaggattagatgactgatgaagacatcgatctctatgagaatgaccgagcaatcatgatacaggaaattgcacaccattatgactcgtagtactgggataacgctgaatctcccattctcatgccattcaccagccttgaccagtcaccgtctgatctggagtcactgataaaagcttatgattgcacctggactctggcttacatctagtgctagttcgataccagagcttgctccagtcgatgcgaactgctccacatttacttcgagggctactcctcgtgtgcctatgtcctccattgccctttgtgacatctgatgctcgagaacagaaatacttaccatctcttacccaatgcaaaactattgactgctggaca

SEQ ID NO: 91006 - DNA, 4265 bp, Zea mays
  Clone ID: MRT4577_1829C.1
tattttattattttcttaatatgttcgggcatgttttgggtgacctggaggcctgggcctagttagcgaagggcttggacctaacattacagtggaattttgggccctttaagggctgggcaatttctttttcttctaccagacatctagcactggacctaaactagacgagcactttgtcgtgaggaacaaccacgccgggcgcgcacaatatttttttcagcaaatggaagaaaaatttttgtggtggatctaagccccatttgatgtgttttctcccaatactctaagatggactgattgatttcacatctgtgttgttaaaggtcatctattccagctttataacctaggttgtataaactcatttggtgaacaaaaagacccagttattgtccaatcgcaagaaactacgccagcccatgagtccgtctcgacagtgaccggacctcttcgttagggtttcgcgcctcttctcaccgtctgcctactactagggatagacctccggcaaggcctccctcgcgccggcggcgtcagcagcggatatgggtgttccggcgttctaccgatggctggcggagaagtacccgatggtggtggtggacgtggtggaggaggagcccgtagagatcgagggcgtcaaggtgcccgtcgacacctccaagcccaaccccaacagcctcgagttcgacaacctctacctcgatatgaacggaatcatacacccctgcttccacccggaggacaggccctccccaacaacatttggtgaggttttccagtgcatgtttgattatatcgacagactattcgtcatggttcgcccccggaggcttttgtacatggccattgatggtgttgctcctcgtgctaagatgaaccagcagcgctcaagacgattcagggctgcaaaagatgcagctgatgcggctgcagaagaagaacggttacgtgaagagtttgagagggaaggcagaaagcttcctccaaagcagcaatcacaaacatgtgattcaaatgttattactccagggactgaatttatggctgttttatcagttgctttgcagtattacatccatcgtagattgaattatgatcctggatggaaacaaattaaagggaacataaaatcatatatgtcctacctggccaacggaatctgtctggttttaacccaaatacgcgccattgcctgtatggcctggacgcagatctgatcatgctagctttggcgacacatgaagtacacttctcaatactgagagaggtagtttatacacctggacagcaggataaatgcttcttgtgtggtcaggtgggacatctagcagcaaactgtgaaggaaaggtgaaaagaaaagctggggagtttgatgagaagggtggtgctattgttcccaagaagccctatcagttcttgaatatatggaccctgcgggaatatttagaatacgagttcagaatgccaaacccacctttcaagattgattttgaacgcattgttgatgatttcatcttcatgtgcttctttgttggcaacgattttcttccacatatgccgacgctagagatccgtgagggagctattaatttgctaatggcagtgtacaagaaggaatttccctcaatgggtggatatttaactgattcttgcacgcctgatctgagcagagttgagcacttcattcaagcagttggttcatatgaggacaaaatatttcagaaaagagcacgtttgcatcagcgtcaagcggaaaggataaaacgggaaaaagctcaagcaaagcggggtgatgatctggatccccatgttagggatgaccttattgtacctattcaacgttttcaagggtctcgcctagcctctggggctgtacctgtgccatatgagcagaatggatcccataaagacaataaagaaaggaatagtcgagcccggaaagctgcacgagtatcaacgtcaggttccagcattgcctcagccttagttgaagctgaaaatgacctcgaagcccaagaatgtgaaaacaaagaagaactgaagtcaatgcttaaagatgcacttcgcgagaaatctgatatttttaattctgacaatccagaggaggataaggtgaaacttggagaaccaggatggagggaaaggtactatgaagagaaatttggggcaagaacacccgagcagattgaagaaatacgcagagatgttgttctcaaatacacagaaggattgtgttgggtaatgcactactattatgaaggggtatgctcatggcaatggttctacccttatcattatgctccgtttgcttcggatctaagtggattgggccaacttaatattaaatttgaacttgggacaccattcaaaccttttgatcaacttatgggtgttttcccagctgcaagtgcccatgcgctaccgctacagtatcgacgattgatgaccgatccaaattcaccaataattgatttttatcctacagattttgaagtagatatgaatgggaagagatattcttggcaagggattgcaaaactaccgtttattgatgaagatcgtttgttggctgagataaaaaaagttgagcatactttgacgcctgaagaagcaaggagaaacagtatcatgtgtgatatgctttttgtgaatgggtcacatccactttcgccttatatctactctctcaacagcaaatttgggcatctgcctgacaaaaggagaaatgaaattaaagaaaaacttgatccttctgctagtggaggaatgaatggatacataacactttgcagtggggatccatgccctcctatctttaggtctcctgtggacgggctggaggatattatggacaatcaagtgatatgttcaatctacaatcttccagaccatcataagcacatagcccagccgccagttggtgttatcatgcccaagaagattgttgaagccggtgatctgaaaccacctccagtgctgtggcatgaagatagtggcaggcggcctcatgataatagcaacaggcaaaacccatctggtgccatatcaggccgtcaacttggagaggcagctcaccgacttgtcataaacagcttaaatgctcagggtagggggcaacatagtggcacatcaatgccatatcgaactataatgaatggcttgcatcatctggatgtagcgtcccctgtcagcgatcaaggcatgcgtccacaagtggggcagtctgccggacctcctggttggtatgttcctaggggtagtgtatcaaatggtcaaccaccagcttatgcatcatcaggatcaggtcattatcagtatgaaagttcggggcattcacaatatgaacaaggtaaccatggaaggcaacaatctcacccatatgcaagagatggcttccatgatacacgaggaagggttccacctgcatatgggtaccagcagagcaacatgtatccatcgggtcctggattgtatgggcaacctccatcagcatatcctggggttcatggtggaggctaccaaccccctccatatggcggaggccagcagtggcagcaacaatcatatagttcgtatgccgtgcgaggcccctacggaggcaggccaccacccacaagggctgattcagggtcacagcaaccacagaaccgttatggtgctttagacagaagtaacaaccggaggccttcatctggatacagaagataatagtttgtgacccagtttatgttatagctcaaagtttgttatcagtagagcttcgagtaactcagctaaagcataggcggaatagtctgctaagtcttgtgaccttcaagcagttagggggtggccatcaaagatattgggaggcaaaatttgtatgctagtgcagactttcaggtactagcggttttgatcgccattgaagcagctaggtttgcggcatcagaggttttgcgaagcaagatttgtatactactgttatcaacgggccatcaggtactggtggctggtcgccattctttatctgtagttaccatttgtttagaagatgtcataaacggccctggggcttaaataggtcccattgagaatatttttgaaggacgtttactctgagacttgacaagttttgggggcattttgatatcagataaatgtatgcaggagtgcagttttgatgatgtgtgtattccaagtcattaatttaaaaaaaaaaaaaaaaaaaaaaaaaaaaaaaaaaaagatcccttcaaagagcggcatattgcccgca

SEQ ID NO: 91007 - DNA, 134 bp, Zea mays
  Clone ID: MRT4577_182C.1
tatccttccgcattttcaagaaatacggctgcaagcttgctcatataagaattgttatcattagaccaactattaggcctatcctgatgccggaggatacgagatcggcatctcttagcgaataccaatttcac

SEQ ID NO: 91008 - DNA, 506 bp, Zea mays
  Clone ID: MRT4577_183000C.1
attcggctcgaggatcccgatctccgttccctgtccgattccagctccgtcctccccggatttcagttccaccgcgttgaggttttctttttttgtctcctttgggtcctcttgttcccgaagcatggggactgggggttgaattcgtgtagagatccagatgattgcgctgctagctccgatcgccgattttactctgctgcctgccggtccagatccatggaagcgagtcgatgaactaagagggcttccgctctgggttttctttgaaaataagttagagtcctgtcaaacacctcttttctctgccaaacgatctacaaactggctttagcttagaaaactgtttactcggccaggggacagagagacgcattaccttgccttcttgctcttttcgcctctagcggtgctgtgtattcagttacttcgtctcagcgaaattcagttggtttcgcagggcagctgcaggaggagatggcgctcacaagaatcggtcttgctgg

SEQ ID NO: 91009 - DNA, 213 bp, Zea mays
  Clone ID: MRT4577_183001C.1
tctattgcaggccaggtactcattctgtacatatgagtaggaaacaaccaggccaagcatgctagccttatctcattcagtattaggatggacctagggcgctcaccttggagagaaactaccccaagatgctaccgaaagatggttgccgccaacatgggagaatctaccccagatgattcataatgcatcacaatagtgtgtacaaatcca

SEQ ID NO: 91010 - DNA, 334 bp, Zea mays
  Clone ID: MRT4577_183002C.1
tttagataatatatatctatcatcggggaaaacacgcccaccgaccgaccaataaatataggccaaggggaggggaagcttatagctgtatatacaccgtacgtggtcgccgccgttccggatcgacctgggccggttagctagcaaaccgggacacgagtatgtaatgcacggaggggggagctactagctagctggccgttaattcgataataattcttcgctctgttggggaagaagatgtacctagtcgatcttggacgacgaaaaagctggctagctagccggctcggatcgaatatgtactgaataatctgcagaatggaataaaaac

SEQ ID NO: 91011 - DNA, 637 bp, Zea mays
  Clone ID: MRT4577_183003C.1
cttccctgcccgattggcgatttaagtggtgggggagggaaggccgatggtcagtgaaagagaggtaggtggccggacggtggtggcatcgccaattcaactccgcatctgaatcggcactcggcagcgcgccagctccatagtgtaggaggagatggcgctcacaagaatcggtcttgctggccttgcggtcatggggcagaaccttgccctcaacattgcagagaaagggttccccatctctgtgtacaacaggacaacctccaaggtggacgagaccgtgcagcgtgccaaggcagaaggaaaccttcccgtctacggcttccatgaccccgcgtcctttgtgaagtccattcagaagccacgggtggtgatcatgctcgtcaaggccggcgcgccagttgaccagaccatcgcgacgctcgcagctcacttggagcagggcgactgcatcatcgatggggggaacgagtggtacgagaacacggagaggagggagaaggccatggaggagcgcggcctcctgtatcttggcatgggtgtctctgttttctcctccctgttaatcaatgcaccatgctccaaaggtgatgtacataattcagacaagtctcgatgatgtacatgttacagaact

SEQ ID NO: 91012 - DNA, 673 bp, Zea mays
  Clone ID: MRT4577_183004C.1
acaaggcgtagctggtggaggacgtgaggcaggccctgtacgcgtccaagatctgcagctacgcgcagggcatgaacatcatcaaggccaagagcgcggagaaaggctgggggctcaacctcggcgagctggccaggatctggaagggcgggtgcatcatccgcgccatcttcctggaccgcatcaagaaggcctacgacaggaacccgggcctcgccagcctgctcgtggaccccgagttcgcgcaggagatcatggacaggcaggcggcgtggcgcagggtggtgtgcctcgccatcaacaacggcgtcagcaccccgggaatgtccgctagcctggcctactttgactcctaccgcagggacaggctgcctgccaacctagtgcaggcccagagggactacttcggggctcacacctacgagagggtcgacatgcctggctctttccacaccgagtggttcaagattgcgcgcaacatctccaacaactgatgagctgctcaacggatggcatgccatgccacgtacgcattgttgttgactactccagtcggtaatgagatttcctgcaggaacttgtctattgatctttgtaagttaattatttatatgaataaaataagagcagacatgcttgtgtttggcaaaaaaaaaaaaaaaaaaggccccta

SEQ ID NO: 91013 - DNA, 414 bp, Zea mays
  Clone ID: MRT4577_183005C.1
caaaatggtacatggcgacatgggaaatgttcatctactttatatagaacgagcatgctttgccctgctatctcactcttgaactcgcatataagcccattgttgttaggagagtgcatcttatcatatcaactatctgatgaggttctggatcatgttcaaaagcacaaaatgtgtttgaacgacgcccgaatcctgtgtgactggcatgattcaccatttaaaaactatgcccccggacaatgaggaaaaattatatccgacttattacactttctgattgccacatttgtgaagagccagaactgctcacgaacaaaccgtttatgataattttcacacgtcgaattcatgctcccatgtggtttgttaccaagatctggcgatttacatatgaacttatcacgatttcat

SEQ ID NO: 91014 - DNA, 483 bp, Zea mays
  Clone ID: MRT4577_183006C.1
gtttcctcacgtcgcctctctgccagccctctacatggcgcgttccactcgtctcgtcgcttccaccgccacggctctcctcctcctcctcctgtcggcgtgctcgtgccgcgcggccggcgacagcccgagcgccgtggtgctggcggtgaggaaggacggcgcgacggggcagtacctgacgggcttccggcagcgcacgccccaggtgccggtgacggccgtgctcgacctcggcggcggcacgctctgggtggactgcgacgccgggtacgtgtcctcgtcctacgcgcgcgtgccgtgcgcgtccaagctgtgccgcctcgccaagaccggcgcctgcgccaccagctgcgtcggcaagccatccccggggtgcctcaacgatacctgcggcgggttcccggagaacaccgtcacgcgcgtcagcaccggcgggaacctcatcacggacgtgctgtcggtgtccaccaccttccgccc

SEQ ID NO: 91015 - DNA, 460 bp, Zea mays
  Clone ID: MRT4577_183007C.1
aaccaaggcaactgaacatgagccttggcataccatgggcataaaaatgaaacaatccagagacaattttcagggccagggaattccaggctgggatccatgggaaaaagcacttgcaaacaatactcagggaaacaatttgggaccacaaataatcagccaaaattttcactcagccaatcataaaagggttgttcccattctttaagcattcctgggtgcgaactgaaactcaaccttttttttaacgggcttttccttttttgacaaaatgagttccatggggcacggggaggacatgtaagggttgatgcccccataaacccggtttgtcctgcccccttgtttttgagcctggttcacttgaatgggggacacaaaaagggtatcgacataaaaaccttttacctcaacattgctttcaacatttttgaaaagggctaaaatgaatctagcaaat

SEQ ID NO: 91016 - DNA, 224 bp, Zea mays
  Clone ID: MRT4577_183008C.1
atcaaaagagcggccatgtcttgggtgatggagtgagtagaggtgctactacgccacaagcgcaaccctacaagagcacaaacaaagtagagttttacgggccgctagggctaggcaagcccatggaggagatgctcatggctggaaacgcgaatccaaacccaccgccagctgctgcgccctcggcacccggggcccagacccagagccagaggggtggtggc

SEQ ID NO: 91017 - DNA, 454 bp, Zea mays
  Clone ID: MRT4577_183009C.1
aggtcgacggtatcgataagctttgtatatatagtatataacatgaataggctagtgtcattttggtatgttttgaaccttgaatttagccatgtgagttggcttgtaaatggtattgttgatgatgttgaattttattaatgttatgagttaatttgtgatatgtgatgtatttatgacgctttatgctttggtagacataatgtggttattttgatgagttgatgaataagtatttagaaaattgttaatgatatgttatggtttgagaaatggtaaattttggtataatttaatatgatacttggatgccattttggtttagttaatgcttgatgatttgggttatgtctaaatatggatattagttaaagtatcaatttgatttggcatgtttttggttgtggaattgagtagtgaaaaggatgatgtataaatggcatgaaatgcgtat

SEQ ID NO: 91018 - DNA, 301 bp, Zea mays
  unsure (1)..(301): unsure at all n locations
  Clone ID: MRT4577_18300C.1
gtctatccgtccatgactgcctcatcctcctcctctcgccgcattccttctcctcgagtccgtgtagagtgagcgaagacgacaaagagagaaacgagagggttgtgacttgtgagatctttttgagctagtagctaggactagcaaggggtggacaggcctttctggatggcggatatggagaggagngaggagaaggagaagaagccggtggttgggcgtcacaagcaaggagacacgtgatagggagtggctccaccccctcctcgcctcctcctccaacggctgccgcttgatatag

SEQ ID NO: 91019 - DNA, 337 bp, Zea mays
  unsure (1)..(337): unsure at all n locations
  Clone ID: MRT4577_183010C.1
ctaccaataattcccaggggcaacgccacgtcgctgcagcaacataacaacataataaagtggcgatccacctatcaacaatagaagcaacaatggagaccaagatattttccctccttatgctccttgctctttctacatgtgtggctaacgcgacaattttccctcaatgcgcacaagctactcttatnagcgactcctttttcccccataccttccatcaattatagctccactatgtgaaaacccatctcttcaaccatataggcttcaacaagcaatcggaacacgcaacatacctttatcgcccttggtgtgacaacaatcgccaccccta

SEQ ID NO: 91020 - DNA, 504 bp, Zea mays
  Clone ID: MRT4577_183011C.1
aataacagagtgtatagagataaatgtcacaatataatcagagtacttattacatagcggaagtcttacaaaacaaattataaatataaaatcgaactaaagtccatccttggcgccataaagtcaactgggagacgccacctagatcgaatcgaactcctcgatgtgtggctccacttgaaccacctgttcttctcctgagtgaacctggcagtggacatatcccctcacgcgacctgagacgtggtctcccattccggttatggtgggtacaagtgcggtcacttgcaaggatgaaaactcgattcgaatcgtctgcttctcgtagctaatgagactgcttgatccattgtacttccaactattgttcatcttcttcatcccttctcctctcatgtacccagattctcttccttctagaacaatataggggttgtgcttctccattctattcccttgttgctgctggtttgagttagtgagattagagtagctaacactcat

SEQ ID NO: 91021 - DNA, 574 bp, Zea mays
  Clone ID: MRT4577_183012C.1
cctgtgcggcgctcgaggcggccgcggcggacatcgacacaaccaagccccacacccaacaccccgccctctacctacatatcagtcaaaatggagaacgaacgcggcgagctcgttgacctctacgtcccccgcaaatgctcggctaccggacgcatcatcagggccaaggaccacgcctctgtccaactgagcatcggcaaggttgacgagaacggccgctacaccggtgacaaccaggtctacgccatctccggcttcgttcgcgccatgggcgagtccgacgacagccttaacaggctcacacaaaaggatggattcctcaagtccgtctggagcgcgtcccgttaagtggttggggattacgggtggaggaattcggcatgttagatctctttcgaagacggaggtgtgcaatctacggccaaggcttcatttcctttttccgacggaccaacgatggcacgaggaacgggaaccggttgagatatgaggtccatcgaattcataaaactctgtttacgatcaaaaaaaaaaaaaaaaaaaagaaaaaaaaaaaaaaaaaaggccccta

SEQ ID NO: 91022 - DNA, 207 bp, Zea mays
  Clone ID: MRT4577_183013C.1
gtggaatgtccatgcccttccacctgctctggtcgatcatgttcgacactccacctccttggaagacatcgcctagaacctgctgttgctgctggagctctcgccatggtaggtcacgttcgcggacaccagcagctcttatagctgcgagccgaggaaactgctactggacggaggggacgccagagccccgacggtggaggagaa

SEQ ID NO: 91023 - DNA, 393 bp, Zea mays
  Clone ID: MRT4577_183014C.1
caagaaatgatttttttttttaaaaacaaaaggggcaaaacctttacttattaataaaggaggaattttgtaacaaaaattttttacattgaaaaaaccccgtttttggccaaatttcctgggaaaaggattaatttttaggggttttccttcaaaaaaaccccattgtttgggccccccccctggcaaataagtgggtttttggtttttaaaaaaagagggaccggtttcaaaatatgcctgaaaaaaaatggggagaaaatttattcctttttgccctcccccccaaaaaaaaaaaagaattttttcccaaaaaaaaacggggggggaaaaaaataggggccaaaaaaacgctttttaaaaaaacgggccccaataaatttgggggggggg

SEQ ID NO: 91024 - DNA, 276 bp, Zea mays
  Clone ID: MRT4577_183015C.1
tatcggagggtggtaagtccgcatcggcgttagggttccttagggttttgtgggcgggcgacatcctgcggttgcttatgctgatgttgcgtggtgtgcgggcttcggcattgcctcaggggggcggtggtctgcggatgccgcggcctcatggtggtacatcacgtcatcctcgatgtcgacggggaattgttctcggacgtggtcggcttcggctgcgtgcccttggcgtccaaggacgccatggccgcacttaatgaggtgatcgccggggag

SEQ ID NO: 91025 - DNA, 299 bp, Zea mays
  Clone ID: MRT4577_183016C.1
cgaccgactcgaccgaaacagcctggatgcccgagctcggcttcgccttccaggtatatgtacctctgtgcaccagctaggtcatgggggtcctgctctaccatggacaggcccaactccgcgcgctcgccggatcccctgctaggcaccgactgccggacctcgtgctctcgtgatctcactactatgtgccgcatcgtcgtcagtgcctctggtgccttgcatggcgcgctgctcccttcaggctactcgcggtagccatctgctctgctcgaccactagactcttacatggtcatg

SEQ ID NO: 91026 - DNA, 133 bp, Zea mays
  unsure (1)..(133): unsure at all n locations
  Clone ID: MRT4577_183017C.1
gccacatggctctgcacgtacttgntggtggntgtgcttttgaacagctgtaatggagagagggcgnaggaatcctttatttgatttcttgttcaatctnntaaatctaagnagcacacccatattatgtttg

SEQ ID NO: 91027 - DNA, 1576 bp, Zea mays
  unsure (1)..(1576): unsure at all n locations
  Clone ID: MRT4577_183018C.1
acgcctatagggacattctttcgtgcgaattcggcagcgggcggctcagagccgccacagcctcgccgtcgattctctcccctccccttcgtcctcacgagcgacgaacgtcacgaacccctcctccacctcctgctactatcggcgccggagccctcctctggtctcaccgtgcaaatccccaaccccgaggcagacgcaggccagcccctgtgatggcacagaccaacggcaacgaccccttcagtccccctgtttcccaagaaagggttgtgataacaaacaagcatggtgagaggcttgtggggctgctgcatcacaccgcttcaaacaagattgtggtcttgtgccatggttttatagctaccaagaatgacagcctcattcttgacctggcggaagcgttgacaaaggaagggatcagtgtcttccgcttcgatttcagtggaaatggagaaagtgaaggccagtttgagtatggcaactacaggaaggaggctgacgatttgcattctgttgtattgtatctgtgtcaaaaaagttatgatatagcagctgttgttggtcatagcaaaggaggagatgtggtgattctatatgcttctgtccatgatgatgtgggcacaattgttaatttatcgggccggtttgatttaagaaaaggcattgaagaacggataggggaagggtctatcgataaaataaacaaagaaggctaccttgatgtcaaggataaatctgaaaatgccagctacagggtaaccaaagaaagtttgatggaacggcttaatactgatatgcgcgctgcaagtgtttccataagcaagggatgcaggttcttaacagtccatggctcagctgataagaccatacccgtagaagatgcccatgagtttgcgaagcatatacccaaccatgaactgcgtgtcatagaaggagcaaatcataactacacctcacatcgcaaagaagttgctgatgcagtagtagatttcatcacgtccaatgtaaccgtataataaggctgggggatgaatgtcattccagaccacttggtcatgcacctatcgatcccctccatcatggggcaatactggtactaggtgtctattatcttctgaaccgaaaaccccatgtcatgcaggtttgatatgatgatgttgctcgtatgtgctcttaagaattactgtaaaaaaaaaaaaaaaaaaaaaaaaaaaaaaaaaaaatcgcagtttatataggctcatatctctatagtttttttttctttcttctttgttcgagggctctanncnctannncntnnnnanntngntnatgtaagnnttcttcgttgnngnnnatagtnatttaatttatttaaattactatagggtanaaggaagaaaacttanatnaacnaggnaaaaaagagcaaggnaatagagcnctcgaacaaagaagaaagaaaaanaaacnaagnggccntttgntaaaaaaaaaganagcngcggcatacaagtgtaccaggagtncaatatttanagtaattcttaagancacatacgagcaacacgatcatatcaaacctgcatgg

SEQ ID NO: 91028 - DNA, 390 bp, Zea mays
  Clone ID: MRT4577_183019C.1
cttaacctttgtttccccaacggcatcattcacggggccggtatactttacaacattctccgcgactcgaccttcgcgcacactatccggatcttccatacgaagttggtagtcgtgccgagacttcatccagctactgaccacgtttctagagacatcaagctacctcactcccgtatggctgacttgacaccccatcactcactaggcactcgtatacagcttaggaatacaggcccttgagatcgtatcccaactgaggaacacaccctcactaactataacaacgagctttttctaccacgccgctgcgtatttaccggtgcacgccatcacgaatcttgacagggagacctgcaagtattggcggacccgcacctacaggcagac

SEQ ID NO: 91029 - DNA, 864 bp, Zea mays
  unsure (1)..(864): unsure at all n locations
  Clone ID: MRT4577_18301C.1
ccctcgaggccggccgggatcccttcacgagcatccctcgctcgtctcgccacacaaatcaaatcaccacctcctcctctgcctcgccctaatctccgaggaaggacgagagctccctgacgcaggaccagccccatgctcatccacggcagcctgcgggcgccacctccgccgctgccgggaaggagaacaccgcgcccaagccgcaccatctccaccgtcgctgggaaggagaacactgcgtccaagccgtccaagcccacctccgccgtgcggtggtccacgccgtcgctcccgcaggccagcaagatccaaagctcggtggactcctccaaggtcgtctccaccttcagggctcccgtgctgctagggagtcgcgccagcagaggacggcgacaacagagacgggtgggcctccagctctgccagaaccgcagactccttggttgccttatttgctgctgacgacccctccgcgccagtgaaggatggcgacgacaaagacgacgaggtcgtgcggtgcctacccaaggaagcgaatgtagacgccttactgagtggggacatgacatgcttgaaggggctggaatcagcgctcctcctgaggctgcagcacgacctcgctaacagggccagggacgatgacctgaccaccgcaatcgacatctggctggcgattgcatttgatttgcaaagaaagcgtgagttctgtggactgcggtgngggcaagcagggtgatttacgctaaaataagaggtgctttgagatcacaatagtttatattccattttgcatcttataggtatatacatgtgtggtcctacgaagttttacacttatcaggggagattgattaaacgatg

SEQ ID NO: 91030 - DNA, 1089 bp, Zea mays
  Clone ID: MRT4577_183020C.1
cccacgcgtccggtcttccgcttcgatttcagtggaaatggagaaagtgaaggccagtttgagtatggcaactacaggaaggaggctgacgatttgcattctgttgtattgtatctgtgtcaaaaaagttatgatataacagctgctgttggtcatagcaaaggaggagatgtggtgattctatatgcttctgttcatgatgatgtgggcacaattgttaatttatcgggccggtttgatttaagaaaaggcattgaagaacggataggggaagggtctatcgataaaataaacaaagaaggctaccttgatgtcaaggacaaatctggtatgaatggggcttaggtagctattgctgtgcaataacttattcactttcatttgtgtttttttttaccgtgttgccggccgggctgaaaatgccagctacagggtaaccaaagaaagtttgatggaacggcttaatactgatatgcgcgctgcaagtgtttccataagcaagggatgcaggttcttaacagtccatggctcagctgataagaccatacccgtagaagatgcccatgagtttgcgaagcatatacccaaccatgaactgcgtgtcatagaaggagcaaatcataactacacctcacatcgcaaagaagttgctgatgcagtagtagatttcatcacgtccaatgtaaccgtataataaggctgggggatgaatgtcattccagaccacttggtcatgcacctatcgatcccctccatcatggggcaatactggtactaggtgtctattatcttctgaaccgaaaaccccatgtcatgcaggtttgatatgatgatgttgctcgtatgtgctcttaagaattactgtaaatattgaactcctggtagacttgtatgccgcagctcgcagtttatataggctcatatctctatagttttttttctttcttctttgttcgagggctctattcccttgctcttttttgcctggttcatgtaagttttcttcccttgtaccctatagttatttaatttatttaaatttggcactgtggactattttgtacaaaaaaaaaaaaaaaatttgcggcc

SEQ ID NO: 91031 - DNA, 186 bp, Zea mays
  Clone ID: MRT4577_183021C.1
acacagtcccaggtccttcttaacaagggcgcacatgtgactcgggccctcttgtagacattttcaggacaaatcaaacgttctgtggaaccacttggaaaaggggattgccctgcaacccgaaggtgaaagacacattcaccaataaactaccccgcggaagtgtccatatctgaaaccctcgac

SEQ ID NO: 91032 - DNA, 202 bp, Zea mays
  Clone ID: MRT4577_183022C.1
tctttccaataccaccttaacaaaatacggggagggctattaaaaaaaaggcgtcccccaaacatctaacatccacccttactattaacacgctcctatccaagagatcgcagtgcctcttcttacaaagaaaatcgtctataaactgtttcagcatttcaaaaagccccatctctaccgctttatattccttaaactaatc

SEQ ID NO: 91033 - DNA, 227 bp, Zea mays
  Clone ID: MRT4577_183023C.1
ctttttctttttgatgcctactttctgtgagataaaactatatatatgaggggcagtttcaattatttttttgaaaacccccccccactgactttagagggcatgcatctcaatattacatatattcattcattctttcccctttactacacttctttcgtatttgttcttttgagcttgaattggatggtcataccactagaagaaaactaggccttctccctctt

SEQ ID NO: 91034 - DNA, 205 bp, Zea mays
  Clone ID: MRT4577_183024C.1
gccgggccgggccaaatccccagactctcgcttcctcccgttccgtcgccgccgcgcgcctcggagaagagatagaggcggccgctgcatcgaccccgcgccacccccgcctgcctcccccggcaccgatcgggtttgatcgatggcggcaaagaggatcctgaaggagttaaagaacctggagaaagacactaccacctcctgc

SEQ ID NO: 91035 - DNA, 200 bp, Zea mays
  Clone ID: MRT4577_183025C.1
aacaccaaactcccccccttgaaatccttaacaaaaaccaattcacaccatcaccaacaaaacatggggggaaaacaaaacaatccatgaacaatctgccaactagctatttacacttgccaatttccaatgtcactcatgccctcctcattacctaatcactcttttatctttttacgactctggcaaaccacctcccc

SEQ ID NO: 91036 - DNA, 285 bp, Zea mays
  unsure (1)..(285): unsure at all n locations
  Clone ID: MRT4577_183026C.1
gcagcagctatgtaccatggacccagatttagctggngagctgcgcgtgatgaaccatgagctgcagcatcaaacgattgattggagcagcaactgttctgcaacatggaccttgacttatcaagtgaagcctttgtgatgaaccatgaacttttgagaaaactatgtatggagcatcagcatatgtatacttgtgtgcctccaaaggtagaaccctacggcagaagaatgtcgtgtttgttactgagataaagcttcattaaccgtagattcgacagaatagct

SEQ ID NO: 91037 - DNA, 1354 bp, Zea mays
  Clone ID: MRT4577_183027C.1
ctcagctactccgccgccgcctcggctcgaggtaccggcagcggacgtcggcgccggaagccgaacgacccgggtcccgctggcggggccagggtgaagcccgacggcgacaaagaagacagcagaaccgagtgcgtggtggccgtggaatcaattagtgattatgaaactgaacctaagaaagagaaacactccgaagctggcaaaattgagtcaatggagataggatgcaaggaagaaatatacacttgcaagcatgacaagcttttgggtacatgcgacacgccttggacactctttggacattgataagcatcatgtggctagctttactatgtgcaagtgaggggccaaacctgtcatcagtgccggcagaaaactcttggtcatcatacaagctgctgtaaatgccagattgttcaagggcagttctgtggagattgtttgtatatgaggtatggtgagaatgtgttagaagttaagaagaatcctaactggatatgtccagtttgccgtggcatctgtaattgcagcatatgcagaaccaagaaaggatggttccctactggttctgcctataggaaggtggttggacttgggtacaaatctgtggcacactttttaattgcgacacatcgagcatcatcagataactcagaggattcaagcccagctggcaaagagaagtcgctgtctgctaaatctgaaagctcatgcatttccgatcatgatggcccggatgccaatgagaggcccgaggatggtgaaacgagcagcaaagctaaggtgaacaaaagcaacccgccgcaatgtgaagaagaagagttctgacggcgacaaagaagacagcagaagcgagtccgtagtgacatctgagtgccaggatggccatcaagccaacacggaggctgggtgtgtcactccatcgtccaagccagtgtcaaggaagaggaagtgcgttgaacgaagccccgactgcattgcaagcaggctgcggtctcggctcagtatgccgtgatcccccccatggacagtgatcagcatcatgggtctctttttactgtctgaatgcagaggctaggctcggtctcttttgcgatgaagttgtggcgctttcacttgcaagcagttcatggtatgctagcgaagatgttttgtttcagcaggtgattggtgcagcagttttctttttgcagaccttaaaactgtgtttacaaccatgtaatgaaataggctgtgccaatagctgtggttgcagtagcctgcaccttaatgtataattcatgctatgcgagtcataacatgtgcccttttatctaaaaaaaaaaaaaaaaaaaaaaaactcgaggaaggg

SEQ ID NO: 91038 - DNA, 563 bp, Zea mays
  Clone ID: MRT4577_183028C.1
ctcgagtttttttttttttttttttttttttttttttttttttttttttttttggaaaataacggaacaaatttttaaaaggtacccaacaacgatcggttttggctaaaaataaacatgcccctttttcacttttttaaagatggggggtatatcgcccgcttttaattgctacccaccggttgggatgatcaacctcaaattcatcggggcgatagttactgccaaggaggggctcctgttggaccctctcatgcatgaagggccccctttcgttgaccaattgggccagcacctgcctttaaggacccttgtcggggggaatggggaatgggcccactgatggcattggaaaaaaacatagggaatcacatggagaccaggtatcccgtcttaggctttgtttggccattcctgggagcggaaacgatcgttttcggcgaggagcgcgtcccggccggcgatgaggtcgtcgtgcccggccctgaggcggtcgaagtcctgctccagctgcttgctcctccaccgggcgcgggggttttggaaccacacggccccctggg

SEQ ID NO: 91039 - DNA, 205 bp, Zea mays
  Clone ID: MRT4577_183029C.1
ggcaacatcagcctaacatttggggctaaaacaacttattgcaagttaaacatggggatcatgtttatacataccctaaatcataaagcattggcactggggaactttactccatgccccggggaggggggttgggggggttttaattacccaagctattttagccctagattacccatttagaaatttgggccccacaaaactg

SEQ ID NO: 91040 - DNA, 697 bp, Zea mays
  Clone ID: MRT4577_18302C.1
ggccgggcgaggctagcagtgaaaagatcaacatcggacgcagccattcctcgctcctgcaccgttctgtcagggtgtctccatccgcaaacaatcttgctagagctctgaaaccatgtcatacttcacctctatcttttgttgaggtacagaatgatatatctgaaatctctttggttccaaagtacttcaataggtttgctgcagggctgagttagtggtacattctgtcttgaactataagggattattatagctactatgcacctggacagagccgtagtcccttatattttataggatgaagtgaaggcagtacatgttgtatggtagtagcaaatttgacgtgatgaaatccatcctaacataatctgggccgatatgagcaggaagggaagtgcatggagcctggagttgtgagcttggcggacatcttggggaccagggttgcggaccatgttcctcaaacgcccaacaagatatccgaggacatgatcagatgcatcgcggccatatacataaggctgagagacgtcccttccgccgccgcgcagcatgccttcttcccctcaccgtgctcgtccttctcttcagcaagcggactgtcttccaaatacactgcagatgtatggagttggagccccaggtgcaggagagagagcttcactgaggcgtggcaggtgcaggaccacgagct

SEQ ID NO: 91041 - DNA, 543 bp, Zea mays
  Clone ID: MRT4577_183030C.1
agacaaaaaaacatcaaaaccgctgctttaaacatatacgtgtattgaaaaaaactggggccactcagcaataaactcacaccaggatgtttataaaacactcagttccgaacaacattactgtgatcagactaaactggataaactgtcctaccagaaaaaacttcacaagctgagccgctgacgttgcccattatcagaaacctgaactattgaccttgtcgaaagccacactgccggagctggggactttctttttgaagggctcttgcggaaggggggcctcaattctacagttgatggacacaaaatatcagacacttgtgaacctgagagacatcttcttgatgccggatccaacacgcacaagctttgatgctgcccaagccataccctccatgtggacactgtggacagcctcctgcatctacttaatatcagactcatcgtcccatgggtagacatccgtaaggacggcggatttaccagtttctttctttctagaagaggccttgatactggcggtactctcatcaaatgact

SEQ ID NO: 91042 - DNA, 462 bp, Zea mays
  Clone ID: MRT4577_183031C.1
cgcgcgaaaaacttgcctttcactctctgttgcttcaagagcgcaatggaaaatctcgagcgctctctgtgattactgcgagtacccaaacccaaccgaaccgtaatccggcagccattctattcgttcactattagctctgcgcgcgacaccgcacgacatgcccaaagcatacgtgcccactggcgcgccgatcccagtgtccatggccgcgacttgctcttcgtgttgctgcaccgcgaccgcgtccagcagcagctctgattcgtgcatgcccgtgttaagagcgcgccttgagtagccggtgccagtcggagtatctacaggcagtggtggcggcggcggcagctgtccatccgcgcctcggtcgcggagccgctgccgtccgtggtctacgctgacgccgacgctgacaacgtggcctcgctgaacatcaagctcctgagcgcgttgttcgggctg

SEQ ID NO: 91043 - DNA, 398 bp, Zea mays
  Clone ID: MRT4577_183032C.1
gcgacggcggttggcgacatgatggcctcggtgcccagccgtgttgcgctctccgcggcgagccgcctcccgaatctccacgccgtggcaggttgttcgtctccctcgctcccggttctggctcccgtttgccaatttgttggaatttggatgcgattttgtgagtacgtagttactagtactctttagtacctttcagtggataaggtcgatggggcaagtaggatgcgtgctgtccacggtgtttctgtggaggtagaattgtgggggatcccacggagtatgagagcagacaagtactcttccgcttttgcaatggttttacggttactgccaccgcacatctcatcttggagttgattttatttgagaattatgttggttgcttggatgtgaga

SEQ ID NO: 91044 - DNA, 286 bp, Zea mays
  Clone ID: MRT4577_183033C.1
gaattagtgggatatatgatggtttaatcacagtgactaaaatctggactctaaattgctaatagtagaaacagtagctatctagtgccggtagtgtttgggggtgtcttttgggctatgctgatgtggtgggttggagttgatattgtggttgttttgtatggcacattgttcaaataccgctctctatgagctactttttatgtttcatttttcctcgaggtaggttagtagatgtctggaatggatattgccaactaaatgctttttctggttcttaatgaaa

SEQ ID NO: 91045 - DNA, 375 bp, Zea mays
  Clone ID: MRT4577_183034C.1
ttccctctctctctcctcctcatccccctctttctccactagagagccgggacctagcacgagagggagggagggagagagtcacgccgggaggtcaccgtcgccgccgacggccgcgatggctcgcctgttccgcgagttcttttttgactcgtcccccttctcctcctgctgggtggcttcctcccgccggcgtccgcttccagcccctcggtctccgcgctcccctcgccgttcccggacctcggggtcgccctctccaccgcggacctccgggaggccgcctacgaggtgctggtcgcggcctcccgcaccacgggcgggaagcccctcacctatgtcccccagtcctcgtcggtggccgcgggggccacg

SEQ ID NO: 91046 - DNA, 252 bp, Zea mays
  unsure (1)..(252): unsure at all n locations
  Clone ID: MRT4577_183035C.1
tcgctgccgcgtctttagcttggtccttgngggccgcctttttttttttttttatctagaatgtctttctttttctgggagcccaaactcagcaaaaactttattattgaactacaacccacattggtggggnnntntttngnttttttatgagtttngttnatnatnaatttggggggggggggggattgttgggttgtagataattaaatatgtaagttgttggttgtatgggggtagattggattatgt

SEQ ID NO: 91047 - DNA, 205 bp, Zea mays
  Clone ID: MRT4577_183036C.1
gtctggtacagctgctgctgaaagctgtatttggaccacatgtcgatccgacgtgacatgaggactgcgctagctgtcaacagtcacggacacaccagcttggcttttgctaacaccaaattcatatgatcgttacacgggaccaagatgaacaaggtcgacacgctcaagaagcccatggacttgaacatgtgcgtgaacgcac

SEQ ID NO: 91048 - DNA, 171 bp, Zea mays
  Clone ID: MRT4577_183037C.1
gatgttcattacactgatttcgaacgcaaaagacacattggcttaactataggtgcttggttgtttagttctaggaccacacaaaagcatcagtacatggcattttccaactctctaaggcacaccaacgaaaccttattattgtcccggacatggacacccctgcccacg

SEQ ID NO: 91049 - DNA, 202 bp, Zea mays
  Clone ID: MRT4577_183038C.1
gtacgcacttcgtgtttggttagacccagaaaaaatggcggctcaaaacctttcggcaacacaggtgatgtcagcattatcggcgaataacgttcaaacagcagcaggtaatgataatggctattttgtgacctataaaaacaaagtagaaactacgacaaaatcggttgaagaattaagcaacttaattgtgacatcaaac

SEQ ID NO: 91050 - DNA, 1917 bp, Zea mays
  unsure (1)..(1917): unsure at all n locations
  Clone ID: MRT4577_183039C.1
nttatctatttgatcgacattggagtagaccagattcagaatggaggtatctggtggatgattttgctactacctttgggattactaagccgagattgcttgagtgcctggtattttgtcttctagacgatcattcttcagaagccttgaaggaggcctgctctcttctccccaagatctttagcaaggaaacacatccaaagatagcacaagttcttctggaacgccagagacctgatatggcacttcttgtgctaaagtgcacagggcgtgatagcttctctgctacagagaacttcgaaaaggatggcatttcatctctcagcgaggcagtgactgcggtccgtgttagaattgaatgtggcctcctaacagaggcatttatgtatcataggagctactgctctaaggtgaaagagcaacactcagcaaatatgacacacacggaggatgcattcgaaggctcttggatttatcatgttgagatgatgatggtcgaattttgtactatctgcattgaaagaaatttagttgataaaatgattgatctgccctgggattctgaggaagagaaacatcttcacaagtccctcttcgagtctgctcatgaagcgcccatggatccaattggtagtctgcttgttgtctactaccttcggcgttatcgatatttggaggcatacggngttgatcgtagtcttcagaaatttgagcaaaaggaattggaaaatgccactgaagagattgcttcaaaaattagagcaattgctcaatggagagaaagtttggttgctaaatgccttgacatgcttncagaggttcagagagagagtggagaacaaattcagtttgctcgaactgctcaaatatcttctccagctcatgtgggcaaatcacaaaatcctgtaatggacttgagcacaacttttaccagtgttcttcaaaataagtcaagcctcttctcaaaaaacaatgcattgactgattctagtggtctgatccgaagcagccactcagagagaaaggtcccatctgctctgcagaccagggcaccaccccatgggtcacctatatccaatatgagatcaactgtagggggtaagttccccacagtgggccagaatgttgacagtccatttttgaggggggctaaaggtatcagttctagaaaaggagagacgggattcaaagaagggattaaatatgctgatcacgatccactgcctatgtatttgaacttgagttctggtgatacacccaccaaagactaccgaacaagtttgttgaaggccgaggctaacaaaaccacttattttcaaggacaagattctgttggaaaaggagagttccactttggttcacgtgctgtgaagcctttcaacttaaatggaactggcgcaggtcaaaatggcctcgctaagatctcgggatatgctggttttcgtgaggattataaagtaccaactaaggagaacatcttgagctttagcaagaaatcttcagttggtggagcagaagccagcaaaggtgtgtcaaggtggagatccgatgagtctagtgaagaagagagaacaaaccgggagagcggagctcctcttgttactagaaggcgacctagattttcgagaagatgatatatccacatcctcagggatttttttaattgtttgcagctatgccctaatgtgacaacaattgttttaagggaatgtgtatgcgggatgcggctatcatgcataatctacattgccatggccgagatgtagttcaagtgtcactaaggatgctagaaaacaaaatcgagaaggcgtatgcatgtagcattcagagttcagtggctaaattatattttcccaacttttgtgccaaatgcattgtaaatatagtcgtactgaaaaaaaaaaaaaaaaagcggcc

SEQ ID NO: 91051 - DNA, 892 bp, Zea mays
  Clone ID: MRT4577_18303C.1
cattgggacctcgaggccggccgggctcggccctcgccaatctcactccgccacgccggagcacgccgctgcggcgcgcctgcgcccgccacacacgaggggactatggacacggtggctccccgcctgagtcgctcctctacgcgatacgggcccatcagcagcagtgctgcctccttcagtgggcccgtccggaagtggcgcaaggcctgggtgcccctcaccggcaccggcaccggcaccgccgggtccgggggagggagctcacgaggagacaacaaggtggttctgtttagatggacgccggtgaatggttgttcaggaggagggggaggcaccgacgggggcatggagctcgctgctgcgggggcctccacatgcaggcggcgctacgtcccggctgcaggggaggcgcaaagcaccaccaaaaagggcaccagcagcgagctcaacttgaacctcgagctggaagacccagacgacgacactgatgccgacatgagcaccgacgagccacgcgatgtagaagataacagcgcccgtctagaaagccgcttgaagcggaaagcattttagccgctggtcacctagagatgcggatcggagcatcttacgcctgaatcgtctgccctagctaggcggattttgtgtaacataatgtagcagcatgtaacttgtatccgccacctcgtcgtccttcgtctgttccagtttagaacaatggcattgtccatgactgttcaagtccaagtgctcatgttatatttcatagctgttggttatgacttgccactttgtcctgtacgaaatattgtcatggactttgttctagtgtgtaatgctacatggcaacgtctcaagcaagatgttataagttgtggtaaaaagaaaa

SEQ ID NO: 91052 - DNA, 531 bp, Zea mays
  Clone ID: MRT4577_183040C.1
tttttttttctctttttttttttttttttttttttttttttttttttttttttttttttttttttttttttcttttttttttttcttttttgttttttccacttggctcgcttaattttttttgttttcctgattctttttcccgaccccattcgccagaaacaaaaaaaaaaaaacaaaacaaaacaaacaaaaaaaaacaaaaaaaagggggggggcaaaaaaaacaaacaaaacaaaccaaacaaaacaaaccaaaaaaaaaaaaaaaccgaaaaaacccccccgaaagggaaccaaccagggagggcaaaccaagcaaggaaccaaacaaagcgaaaagaccaaagccgaaaaaaaaaaccgcaaacccagaagggaaaaacaaaccgggaaggctgagcccggcacccgccccaagccccaaacaaccctcccaaaaaaagaaagcctagcaaagagagccttccaaaaaggaaccaaaccatgagaacgaagctaccgacgaaagccaagcgcgacaggggcttg

SEQ ID NO: 91053 - DNA, 841 bp, Zea mays
  unsure (1)..(841): unsure at all n locations
  Clone ID: MRT4577_183041C.1
tagagcattcagaccagacgacanacgtccanagcggcagaccatgggataactggaactgcagccagtgctctcaggcgtcgccgtgggctgcgggtggcaggccttcgtggcgtacgtgaacgtcggctgctactacgtcgtcggcgtgccgctcggcgtcttcctcggcttctacctcgacctcggcgtcaagggcatttggagcggcatggtcatcgggggaaccatgatgcagacgctcatcctgctctgggtcaccttcagaacagactggaccaaggaggtggagaacgccagggcgaggctggacaagtgggacgacaagaagcagcccctcctagcctagaagaagactgattgaaggtcactgtagcgcgcgttgatggacctttttttttggcgatgattgagagaccacaccaggcgcgcgtcggaggggatgcaacgcaactggggcaatcatttgggttttgaagctatttaatattatcgcattatagagtgtgcgcgtgcagtttcgagtgattaaagttttgttacgctttcttcggtgtcagctccaacttagggcgactagatgcgaccatcacaccagggtttggaccgtggtgggtggattctattcgtttttttttaagcacaaatatgtctagggcgaagaggaaaaaaatgtagtgtgcaattattgtttcttcagctctcaataaatctcacgattctcacgagaaaccctcttgctccacaaaaaccagcttccagcaaaataaggatccgtgtgtacacttcnnnaaaaaaaaaaaaaaaaaaaaaaaaaaaaaaaaaaaaaaaaaaaaaaaaa

SEQ ID NO: 91054 - DNA, 820 bp, Zea mays
  Clone ID: MRT4577_183042C.1
taataaaggagcttgatgatctaagaagggctcattttttggttaagaaggaaatcaccaacaccaacctctgcaccagtatcagggaagaaatcaacattttgttaggtgagcttgaaaaaaagaagcggggtttagcaaatcccttgacagcctcaacttcaaattcacagcagcgacaaacaaagattaacaagaagcgcaaggtaatgcagaagcaggagcatcacaaaggacaagaagaccggatgcaagggcaactgagtgggctggcagagaagcccgagaagaaacaaaggaagccccaacaggagcagcaacaggaacaagaaaataagccggaagagaagaaacagaaacaagaagatgggccagaagagaagaaaccgaaacacgaagataagccagaagagaagaaacggaaacaagaagataagtcagaagagaagcagcaacagaaaaagcagaaacatcataaatggctgaggcaacgcactcccatgctacctgcacagggttaccctgcaatgtggaacgcagcaatgaggagcgacttggagcctccaccatatgccgcgacgcatggagtccatcatggttaccaccaccctgtccagccaggctggcctggggttcattgcgcatcgccgttcataggaccctctacaccctggtatcctcctcctcagttctatcccaggtagcagtacctgctgtgttgaggggtgttgctccatcgcccagtataacatggattacgcgcaggagttcagttaggactttggagaaataaagtggtatgttttcttcagtgatctga

SEQ ID NO: 91055 - DNA, 617 bp, Zea mays
  Clone ID: MRT4577_183043C.1
agctcacaatcttcggggcaacagcaaagctctttcaggccgccagctccaaggggcagaggcgccagggtcttcggaggaagatatggggatcagcctagaaagatttattgcttattctgtggtgaggacaagggacacactacaagaatgtgtcaaatcaccattcagaagtagaaggagatcgccgaagccgaagctaggtagaatcagccgaagcaggtcttgcacactgcttcgtgccactctccctacataccaaaatatgtgggtaatcatcctacaacttctgttgcttcggctagccattcacaggcttcctggccacaactcccacccccaccaccactacaaccaacatactcccgaagccagtatccagaagggcgccagtacacccagcaacaacgggagcttagggaggaatccgaagcttgcacagtcaacagtactgtgccagaatcaaagcacatttattgagcaatatcctaccccgaaatacttttatgttctatgtcattttgtttttgaataaggaacaatcaatgtaaatctagttttaatttcttgtgatagcttcgcttctgtcagaatgaaatatatcttcttcacaaact

SEQ ID NO: 91056 - DNA, 533 bp, Zea mays
  Clone ID: MRT4577_183044C.1
ccgcaaatcggcgctcggcttccgtcctttccgtgcctccgccgatccgccgcaaccgcgtcgtccgtccccccgttcggtcgccgccctctttcccgcctcccttctcggcctccgtcctcctccgcgtccgcggcctcctcctcgtgcttcatgtctgcgctcttcaacttccactcgtttgtgacggtggtgctgctgctgatctgcacttgcacgtacctcaagatgcacttcccctccctcctcatccgccggacagggttccgtggtttcttttggaaggctgctaggataggtgaacgccttagcccctgggtagccattgggtgctctgtgatgggcatatcaattttattttggtgaaattggaagatttgtatggccttctttgcttacgattactccattaagagaagcatcagaattttgcagttacagtctgattcttcgagatgtcgcatgcttgtaatcttgtagctgtggtgtattatgtgctatgttatgcatttgactatggggcaccatcatgt

SEQ ID NO: 91057 - DNA, 737 bp, Zea mays
  Clone ID: MRT4577_183045C.1
cattgggtacctggaacctcgagtgcgcccggctaaatcaccaactggaaaaaataacacgcacgcaagaggagaaaacaatccgcaaatcggcgctcggcttccgtcctttccgtgcctccgccgatccgccgcaaccgcgtcgtccgtccccccgttcggtcgccgccctctttcccgcctcccttctcggcctccgtcctcctccgcgtccgcggcctcctcctcgtgcttcatgtctgcgctcttcaacttccactcgttcgtgacggtggtgctgctgcttatctgcacttgcacgtacctcaagatgcacttcccctccctcctaatccgccggacagggttccgtggtttcttttggaaggctgctaggataggtgaacgccttagcccctgggtagccattgggtgctctgtgatgggcatatcaattttattttggtgaaattggaagatttgtatggccttctttgctgacgattactccattgtaagatagcccgttacttgcttctttcataagcatgtaagaaactgcacactccttaatagtccttttatcacatttcagaagagaagcatcagaattttgcagttacaaaatgaaactttgagaagtcgcatgcttgtaatcttgtagctgtggtgtattattgtagcaaaaaaaaaaaaaaaaaaatgagcggtcgtatgcatcttgactatcggcgaccatcatgccatgttgtcccatt

SEQ ID NO: 91058 - DNA, 558 bp, Zea mays
  Clone ID: MRT4577_183046C.1
gcgtttttatttatcgtctcagaaccaggtttacaccaatctcaaggcaaccgagctcatgcagcgaacactggttgggccatgctggcgctgattgatgcaggacaggcccagagagatcccgcgcctctacaccgagcagcaagggttttgatcaacttgcagtcagaggacggagaatttccccagcaagagatcataggagtgttcaacaagaactgcatgatcagttactcccagtacaggaacaccttcccgatctgggctctgggagagtaccggtgccgagtcctgggagctggcaagcggtagtgacccggcctggccccgtcaacttgactgaaaggcgctttgttgtcttggtgttctatcttggcacgccgagggctgtcttgccggccgcctagctgtctcatgaatcaatcagcttttttgtgagtagctatgcgcggtagttggaaattggaataatgcagctatgcttttttttagggttgcgctcctagttctaataatgtactacgtatattggaagcagaataaatgttagattgaact

SEQ ID NO: 91059 - DNA, 627 bp, Zea mays
  unsure (1)..(627): unsure at all n locations
  Clone ID: MRT4577_183047C.1
cccacgcgtccggactagttctagatgctgctcggtcatggtacattgaaatatggagtgcactgtactgtagataaattggttccaaatctgtgctcccaggttagtgggctcctctgcattccgttagtggttttcatgttcttggacgttgttctaatattgaaatgtccttggtttagacagtggtgactcgttgcatccaatgtacaaggtgatgtttttttacttcttgataaatatctattattatcatttcagatatttttcaagccaatcctgtttctatgtatcttgtaatggcttcattcttcaagcattttaccttatcaattcattcctcgttctgctggtttgttaaattgtgttgatttcatgtgctatctggaaaatggttctctacttgtgcaagctctgtaccatggttgatatgtgatgctattttattttcaaattgcaagtgtgtcaggctttctactaaagctgttggagtccaagattattatggcttgctaaaaagtatattactgtggtatgatgggcattgtctggtttagtaattnttatgtcaacttctgcaacattgtaggcaagagcaagggattttgatgtgctcatgaaaatcca

SEQ ID NO: 91060 - DNA, 594 bp, Zea mays
  Clone ID: MRT4577_183048C.1
caccaactggggggaaaaaacgcacgcaagcggagaaaacaatccgcaaatcggcgctcggcttccgtgcctccgccgatccgccgcaaccgcgtcgtccgtccccccgttcggtcgccgccctctttcccgcctcccttctcggcctccgtcctcctcctcgtgcttcatgtctgcgctcttcaacttccactcgttcgtgacggtggtgctgctgctgatctgcacttgcacgtacctcaagatgcacttcccctccctcctaatccgccggacagggttccgtggtttcttttggaaggctgctaggataggtgaacgccttagcccctgggtagccattgggtgctctgtgatgggcatatcaattttattttggtgaaattggaagatttgtatggccttctttgctgacgattactccattgtaagatagcccgttacttgcttctttcataagcatgtaagaaactgcacactccttaatagtccttttatcacatttcagaagagaagcatcagaattttgcagttacagtctgattctttgagatgtcgcatgcttgtaatcttgtagctgtggtgtattattgt

SEQ ID NO: 91061 - DNA, 660 bp, Zea mays
  Clone ID: MRT4577_183049C.1
ctaattgctgctggtagaacatttgagagcagtcctgcaatcagaaaggctgcagctttctgttatcaaaagagcttccttccggtggctggggagaaagctatttatcgtctcaagaccaggtttacaccaatctcaaaggcaaccgagctcatgcagcgaacactggttgggccatgctggcgctgattgatgcaggacaggcccagagagatcccgcgcctctacaccgagcagcaagggttttgataaacttgcagtcagaggacggagaatttccccagcaagagatcataggagtgttcaacaagaactgcatgatcagttactcccagtacaggaacaccttcccgatctgggctctgggagagtaccggtgccgagtcctgggggctgctggcaagcggtagtgacccggcctggccccgtcaacttgactgaaaggcgctttgttgtcttggcgttctatctcggcaacgccgagggctgtcttgccggccgcctagctgtctcatgaatcaatcagcttttttgtgagtagctatgcgcggtagttggaaattggaataatgcagctatgcttttttttagggttgcgctcctagttctaataatgtactacgtatattggaagcagaataaatgttagattgagctaaa

SEQ ID NO: 91062 - DNA, 860 bp, Zea mays
  unsure (1)..(860): unsure at all n locations
  Clone ID: MRT4577_18304C.1
cggccgctcgagccggcaggccgggagttaacaggaacgaacacccccatacgattcccacggctcaaggcagaggaagaccgggaagagatacccatggtggaatcgccgtaccgtcttcggcatcgccggctgatggacaccgtgcctgcgacggcgagcggtgatccagcgccaggacatggcggctccaacgggatgccgatcatggtctccatcctggtggtggtcatcatctgcaccctcttctactgcgtttactgctggagatggaggaagcgcaacgctgtgaagagggctcatctagagaggctgaggccgctctccaactcggacctgccggtgatggacctctccaccatcgccgccgccaccaacggtttctccaaggagaacaagctcggcgaaggcggcttcggccccgtctacaggggcgtgctggacggcggcgcggagatcgcggtgaagcggctgtcggcgcggtcgcggcagggcgcggcggagttccggaacgaggtggagctgatcgccaagctgcagcaccggaacctggtgaggctgctggggtgctgcgtggacaaggacgagaagatgctcgtctacgagtacctccccaaccggagcctcgacgccttcctcttcggtaccagaaagaccgcgcacttggactggaagatgaggcagagcatcgtggtggggatcgcgcgcgggctgctgtacctccacgaggactcgtgcctcaagatcgtccacagggacctcaaggccagcaacgtgctcctcgacaacaagatgaaccccaagatctccgacttcggcatggncatgatcttcgaggacgaggagatcgaggtcatcaa

SEQ ID NO: 91063 - DNA, 641 bp, Zea mays
  Clone ID: MRT4577_183050C.1
cagtctgcatcagaaaggcatcggtttctgtttcaaaagagcttcctccggtggtggggagaaagctatttatttctcaagaccaggtttacaccattctcaaaggcaaccgagctcatgcagcgaacactggttgggccatgctggcgctgattgatgcaggacaggcccagagagatcccgcgcctctacaccgagcagcaagggttttgatcaacttgcagtcagaggacggagaatttccccagcaagagatcataggagtgttcaacaagaactgcatgatcagttactcccagtacaggaacaccttcccgatctgggctctgggagagtaccggtgccgagtcctggcggctgctggcaagcggtagtgacccggcctggccccgtcaacttgactgacaggcgctttgttatcttggtgttctatcttggcacgccgagggctgtcttgccggccgcctagctgtctcatgaatctcaatcagcttttttgtgagtagctagctatgcgcggtggttggaataatgcagctatgttttttttagggttgcgctcctagttctaataatgtactacgtatattggaagcagaataaatgttagattgaactaatggtgcgattaaagatgcccc

SEQ ID NO: 91064 - DNA, 2776 bp, Zea mays
  Clone ID: MRT4577_183051C.1
ccagtggccctatagaagagacgggatcccgccaggcctcccgggaccgggagccacgccacgcaggcacgcacgcggaggggagcgccggccgtccgcggcggattgggatctccctcgcccgcccgcccgtccactcgagactcgacggcacccgccgcatttgagctgagctgaggaggcgtgggggacggcgcggggatgtggcgcctgcggatcgcggaggggggcggggacccctggctccgcacgaagaacgcccacgtcggccgccaggtctgggagttcgacgcctccgccgaccccgaccccgccgtcgacgccgcgcgccgcgccttcgccggcagcaggggccacctcaagcacagcgccgacctcctcatgcgcatccagttcgccaaagaaaatcctcttgagcttgaccttccagcgatcaagctcggtgagcacgaagacgtaaccgaggaagccgtgtctactactttgagaagggcaatcagccgtctttctactctccaggcacatgatggacactggcctggggattatggtggccctatgttccttatgccaggcttgatcataacattgtatgtgactggagcactaaacactgtcttgtcatcagaacaccagaaggagatccgtcggtatctttataatcatcagaatgaagatggtggctggggcttgcacattgagggtccaagcaccatgtttggctcagcactgacctacgttactttgagattgcttggagagggaccagatagtggagatggagcaatggagaaaggccgaaactggatcttagaccatggcggagcaacatatataacatcttgggggaagttttggctctcggtacttggtgtatttgaatggtctggtaacaacccggtaccaccagaagtatggctactgccatatctcctgccatttcacccagggaggatgtggtgtcattgtcgaatggtgtatttgccaatgtgctacatctatgggaagaggtttgttggtcgaatcacaccactcgtgttggaattaagaaaggaacttttcaaagacccttacagcaagattgattgggacaaggcccgcaatctatgtgctaaggaagatctgtactatccacatccatttgttcaagatgtcttatgggccactctccataaatttgttgaaccagttatgatgagttggcctggcagtaaattgagggagaaagctctggagacagccatgcaacatgttcactatgaggatgagaacactcggtacatttgcattggtcctgtaaacaaggtattaaatatgcttgcttgctggattgaagatccaaactcagaggccttcaaactccacatcccacgagtctatgactacttgtggcttgctgaagatggcatgaagatgcagggctataatggtagccaactttgggatacagctttcatagttcaagccattgtggctaccaaccttaccgaagagtttggtcccacccttaaactagcacacaactatatcaagaaatcacaggttcttgacgactgccctggtgatctgaatgactggtaccgccacacatctaaaggcgcatggccattctcaaccgcggatcatggttggcctatatctgattgcactgctgaaggactaaaggcttcattattgttatcaaagatttctcctgaaattgttggtggaccgatagaagctaatagattttatgatgctgtcagttgtctgatgtcttatatgaatgataatggtggttttgcgacttatgaactcacaagatcctatgcctggctggagctgatcaatcctgctgagacctttggggatattgtgattgattacccgtatgttgaatgtacatcagcagcaatccaggccctgacatcattcagaaaactataccctgggcaccgcaggaaagaggtggacaactgtatcagcaaagctgctaatttcattgagagcattcagaaaagtgacggttcatggtatggctcttgggctgtttgtttcacgtacggcacttggtttggtgtgaagggactaattgctgctggtagaacatttgagagcagtcctgcaatcagaaaggcatgcggctttctgttatcaaaagagcttccttccggtggctggggagaaagctatttatcgtctcaagaccaggtttacaccaatctcaaaggcaaccgagctcatgcagcgaacactggttgggccatgctggcgctgattgatgcaggacaggcccagagagatcccgcgcctctacaccgagcagcaagggttttgataaacttgcagtcagaggacggagaatttccccagcaagagatcataggagtgttcaacaagaactgcatgatcagttactcccagtacaggaacaccttcccgatctgggctctgggagagtaccggtgccgagtcctgggagctggcaagcggtagtgacccggcctggccccgtcaacttgactgaaaggcgctttgttgtctttgttgtcttggtgttcttggtgttctatcttggcacgccgagggctgtcttgccggccgcctagctgtctcatgaatcaatcagcttttttgtgagtagctagctatgtgcggtggttggaataatgcagctatgcttttttttagggttgcgctcctagttctaataatgtactacgtatattggaagcagaataaatgttagattgaactaatggtgccattaaagatgacaatagaactcttccgaagc

SEQ ID NO: 91065 - DNA, 257 bp, Zea mays
  Clone ID: MRT4577_183052C.1
aagttcgaagctcattatgagaattgattggggcaacatcactgcggcccacagatttctgatgcaacctgtcaggtcttttcgatctgtgtttgaaatcagcatcactgggaagatctgaatcttttcctgaagaatattcttcatcgctgtgagacacccctcgttttcgttgagctggcatgggcaacttccttcccttggaagttttagttgctacaatcttaagtcgtttaggttgcctccggttctcaaca

SEQ ID NO: 91066 - DNA, 219 bp, Zea mays
  unsure (1)..(219): unsure at all n locations
  Clone ID: MRT4577_183053C.1
acgattgagaccaacaagcaacatataaagtggattccagtatcaacaatagagcaacaggggagtccaagatatttttcctccttatgctccttgctctttatacatgtgttgttatcgcgacaatttttccttaatgtttatatgctcctatagcttctctttnttgtnctataccttttcataaattattgctttaatctgtgaaaacccaatttt

SEQ ID NO: 91067 - DNA, 342 bp, Zea mays
  Clone ID: MRT4577_183054C.1
gacctcaggcggcgggaagtttttcctgtggccgccaagaccggagcgtctcggtgctatctcctccgcggctctgcgcgtagtcgatgttggcaactgcagcggcgcgctgacgtgcggccctgctgtgagcttcatcgccccgtatcaagctagttgaggctgacagcgagccacaacttcaggaacacaaccccgaactccgacatccttcgcgggtcgtgccgccctctcccgctcggccgataccatgaatcccccgaaagacttgtaagcctgccgaacgacatgcggtgccaaggagaacgcgaccggaaccgccgaatggatgcctcgtggatg

SEQ ID NO: 91068 - DNA, 772 bp, Zea mays
  Clone ID: MRT4577_183055C.1
aacgacaactggggaggcagcacttccagaggtggctgaagccattctcaagtatgaccagttcagggcgaaggtcctcggcaaatacgacggggagcttgctagagataggaacgagcgtcccgaagagtttcctgagggtcactcggaagggtccaacgcacacggtcacggggaatcgaggatacgaggggattatggcgggggtccggggccgtatgagcgatatgtccgctacgatgcaggtcctggatacaggggctttgaaaggtaacgtctggcaacagtggctcaagacgtgatgtgtgtctgggctctcagttgagtgatggatcgttatgtattgcccatggtcgtcgaggtctcgttggttaagtacacattgcttcggtatccttctaacccaattattcgtttctttaaggctcgactatatcgaatagagtaatgccttgatttgccgaattgtggtaactagttatgatgagtcttgctgtgagtgttcaggcgtgtgggcttttaagcttcataagagagtctgagagatacattccaattcaatcgggctttttgatgtcctcatcaaaattcccgagtaactaagtcccaaatggcaataccctccatcattctgtttatttcgaagtcctaaagtcccgggagtcctacctgcggatacggtccccttaccactcgtgtagactacagtcgcattccctcctcaccatgtttgctgctctccgcgatcatgcaaatgaacccaattgaatcc

SEQ ID NO: 91069 - DNA, 583 bp, Zea mays
  unsure (1)..(583): unsure at all n locations
  Clone ID: MRT4577_183056C.1
ggcggagagaagcacgggggccccctgttccccacaagaggcgaggagcttctcgccgcggccggtcggcgtgtccgtcgtgttcacggatgcccggggactgtttttgtgttcactgcnatttcggggtggcgggggcaacatggagagaaggagcacatgccacgcatcacctcggcgaggccggctccatctccgccggctccttcgcactctacgagaagcatgaggctatgaaggactcctagcacgcgcatcgccacaagatctatgaggaggtcgtggcggcggcggccgcctgctcctgcggtttctccttccactagcactactagatgatgaatgaccacattgaggccgttgaggccggctgcgagaataagcaccacttcttcgggtgattgatcctcccgtatcgtcgtccctccccgtgtgctacgcgtgcgtgtgatagtgatatccagcgcccgtcatgttgtgcgcgcgtacgtatgtgtgcgctcgagtgatgcactattaatcgtgactacataatctatcgcatgtttacgtgtgtgtatgcatgtgcttgtgtttcatcgtg

SEQ ID NO: 91070 - DNA, 286 bp, Zea mays
  Clone ID: MRT4577_183057C.1
cttttatttggatatttttgttttgttttgtatcactataccagaggagacgcattcgtatgagttcgtccattcgagcgttaatcaagcggtgacgaaaaaaaaaagtgaagaacatatgttttttttttttgttgacaccgcatttgaaaaccgaccatccatcggcgggggaaaaatcaaaggtcaagttccacttcccctagtgatcttggccgtgttttaattcttggtccacatggggggggtaggggtattcgagaaaaaacacggctttggcgcgggg

SEQ ID NO: 91071 - DNA, 274 bp, Zea mays
  unsure (1)..(274): unsure at all n locations
  Clone ID: MRT4577_183058C.1
cctctctccctcggcctctccggcagcacagcgcaccttccactgttgggtgtngtgggggncctccgcccccgaacgatcgancttttgcatggcagcatcggctagctccaattgncgggcnatcgctgggagcttcgtcagccgcntcctnnccngcaaggccgcctccccgangagtgccgtgcacncntcgtcgtacgacaagaacccngaggancaggtncgcccggcgttcgttccggacgatgtgatcngcggcgcggggancccc

SEQ ID NO: 91072 - DNA, 422 bp, Zea mays
  Clone ID: MRT4577_183059C.1
ggtgaacgtgtgggcgatcggtcaggaccccgcgcggtgggccgagccagagaagttcatgccggagaggttcctggagaaggaggtcgatttccgcggcagggacttcgatctgctcccgtttggggctggccggaggatatgccccggcctgccgctggccgctcgcatggtgcatctgatgctcgcggccttgctccgccggttcgagtggaggcttccggctgatgtggaaaggaacggggtggacatgtcggagaatcttggggtgacactcggaatgtctacgccgctccaggctatggctatgccgatttgaatcgttgccataggacgcactcgtttggaggaactaaagtagttccaaaatatgctagtctagtctttcagtttgtagaaactatttccggttttttaaaaaa

SEQ ID NO: 91073 - DNA, 195 bp, Zea mays
  unsure (1)..(195): unsure at all n locations
  Clone ID: MRT4577_18305C.1
gagctcacttttttggggccgcccccaanctataactaggggccggccattttaaaaatggaggaaagggactctaccggatctgctaaaatgaaaactggaactggcaaccgtgaaagtggaaggcatggtaccaaacttgaacttcttaaacagcttgatggttttggagctttaaacaaaaaaaaggttttt

SEQ ID NO: 91074 - DNA, 792 bp, Zea mays
  unsure (1)..(792): unsure at all n locations
  Clone ID: MRT4577_183060C.1
ccggccgggtggttctatggcagatattatgttgtcctctgagaagcttagggcacggctgcttcaagagggtctgtgtgaggcagtggtcagggagtgtgaatctattatgatgagtgagctactggaactgcacaatcatataaagtctcagcagcagcagcattctattttgatagaccgccttcggcaactggagacggagaaagttgaactggagagaacagttgtccatgagactaaggagagggaaacacttggctatgccaacagcagacaaagtgatttctattcagttttatcaggaggaagtacaactgaatcagaccctgacactgcaagccacatggctgaagttgaaactgaggaagatgaagttacatactttgatacaagagactttttatctgcagagtctttacggagtgcttcatgtcaaaggagggaactaattgcacatggttttggatcagaatatgttggagattctgttacaaatactgtcaaaactactaaatatccctttgtgttacgtagggataagctaccagagccgaaggaaaaagagaaacatataggattatggtcaataattagagaaaatatagggaaagacctgtcaggtgtttgtctacctgtttatttcaatgaacctctttcttctttacagaaatgttttgaagatttggagtactcttacttggttgaccatgcactacactgnggaaaacagggtgacagcttaatgaggatacttcatgtagcagcatttgcagtatcaggttatgcttc

SEQ ID NO: 91075 - DNA, 416 bp, Zea mays
  Clone ID: MRT4577_183061C.1
gtaactctagcgggggaccgccgctgctcttccatgcctgtgggtttcactcccagttgctggctcccggctctacctcgtcggaaatggatcctccaccgtcggacccgacgttgtttgtccaacctcacgagttcgtcgccaacctccatggtgaactccgcaaagcaggcagtgggcggctggcacagtagcacgcgtcgcagcttgctcttcgcgcatcttgttgctctcgtatgtcgagcgtcatcaggcaaccttgtgtgcgtcgtccatcttgttcctccaaagaaagaaaccgaagaacgatgcgagtagcacaaatgagattgggatggagatgaggttcgtgaagctctcaatgcaggccgtagaggtcgtcatggacgagaggcggaagtctgctgcaggccttg

SEQ ID NO: 91076 - DNA, 364 bp, Zea mays
  Clone ID: MRT4577_183062C.1
cgccgggccgggaaagttcggagtcgaggccgccgcccagaccgcctccccttccccgcctccggtgcccaaggccaggccaacagttttgaggtggtaatggcggaccaggctaaccaacccactgtccttcataagctaggtggccagttccacctgagctccagcttctctgaaggtgtacgggcccggaacatctggcccttctgtctcaccttatgaaaagaagatttgccacgaggaaactacataacccagagctatgctttgggagccccttcaatggcctgtctcccggctgcgcatgcacatgtttccaagggagtgcacgaactccgcgttttgtgctcaaagctgccaaatc

SEQ ID NO: 91077 - DNA, 668 bp, Zea mays
  Clone ID: MRT4577_183063C.1
cggggaatctgagaaccagccgaatccgagctgcggagcctcctcccgatccggctgtatccaactccgaggcttcgaggcatggccacgccacttgctcgtgcgccgctcccgggggccctacttcgccccgctcccgccgtccttcggttggccacgcgctgccgtttccgggccacggcggccagcggtgaaggcgcggctgggccgatgctgcgcacttgcaagaactgcaagcagcagtacgacccgtccgtgaaccacccctacgcttgccgtcaccacaccgcccacttcggaggagaaacaaagagaaaatttgagagcgtttatgctggagggaccatggatactccaaattcaggcaaagtgtttcagtattggcattgctgtgggtcggaagacccatttgatgtgggttgtactgcttctcctcactgttcttatgatgattgaatatctcaggcttgcattatgttcttgtgattgtacttattaattaatattttacatgaaatttctttccaatttgttattatttaaacacttctaaactatagtctcatggttagatttagcctcctaaagtcctaatcacttaacccttaaatgttccctctggatacatttgatcaatttattctttgatgtattttgtaaaaatgaca

SEQ ID NO: 91078 - DNA, 367 bp, Zea mays
  Clone ID: MRT4577_183064C.1
aggaactaaaacggatttggtttttagaagttcaacacaggccgcacctatagcaaccacctcgcaagatcacttatctcacaaacaacctgcggaagcaagcactgggcacctcaccagaccaaacctcgaacactaaccgatgtcgtccacctcctcggtcttgggaccagcaccgatcccaccagacggggcatcctcaatcatgccagcaggagcgcccatgcccgcaccctaagcctggtacatcttcgcgatgatggggttgcagatcccctgaagctccttcatattggcttggaactcctacaccttagtcagctgggtgctgtccagccagctgatggcgccgcctacggcgtacccg

SEQ ID NO: 91079 - DNA, 396 bp, Zea mays
  Clone ID: MRT4577_183065C.1
gcctcgcgttcgaactagagctagatctctagaggacccaatataacatccacgggggggcgcccttacatggggggtattagctcacctatattgaatccactggccaatttactacacggcgttgaacaggcaaaaccactgggtaacccatcttattacccttgttaatcatcctcctttacatacctgttttaatagctaggaggctagcacagatggcctttccaatcagtcttccaaactgattggcaaacgggacggccaatgggacgcgccattaaccggggcattaagggcggttactggcagggttacccttacatttgccagtacactagcgaccgctctttcggcttgttttctttcttttttggctacgtttgtcggcttttc

SEQ ID NO: 91080 - DNA, 886 bp, Zea mays
  Clone ID: MRT4577_183066C.1
ttgggaccctcgaggccggccgggttttggttcttcttagccgtagttttctctcacagccgcagacagagatggaagctgtgtgtggaagtgtttgggtcacatcctctcttccacgctcacccaagtccactctctctctattccgctctactcatcaacacctaacagcatttccttcacaatcccatcttttcttatatcaccctcctccctatgctaatgctaaaaccctccgcgccagaacctcctccaaacccgccattttccttccccacttaattgcttctctggaacaagttgaccagacttacataatggtcaagcccgacggcgtgcaacgtggcctcgtgggagaaattatttctaggtttgagaagaaagggtttaagttaactggcttgaagctcttccagtgctcaaaggaattggctgaggagcattacaaggacctaaaacaaaagtcattcttccccaagctgattgactatattacttcaggtcctgttgtgtgtatggcttgggagggtgttggggtagtcgcatcggcccgtaagcttataggggctacagatcctcttcaagctgaaccaggcacaataagaggagaccttgctgttcagacaggaaggaatgttgttcatggcagtgacagtcctgagaatggcaagcgtgaaatagctctatggttcaaggaaggcgaagtatgcgaatggaccccagtccaagcaccatggctgagagaataataaaccacagatgcccaattacaatgattcttgctgtttctaggttcaataacctgatcaattgttttcagtggcaaatgtagcacttcattaaacctcgagtttaacagttactcaaatttgtaaaatttgcatta

SEQ ID NO: 91081 - DNA, 612 bp, Zea mays
  Clone ID: MRT4577_183067C.1
ggccgcttttttttttttttttttccttttttttttttttttttttttttttttttttttttttttttttttttttttttttttaattaattatttgggtaagaaggaaaaatgaaaaataaaaaattgttgtttgatgaaccaaaaaaaaaaacaaaaaaaatggaacaccaaaaaaaaaggagaaaaaagaaaaaaaaaaaaaaaaaaaagggaggattgaaacaaacacaatacaaaatccctaaaaggggggcccgcacccaaaaaaaacagcggggggggggggaacaaaacgccggaccggttcctacatccaccggttgtccccggccaacaggggcgccgcatgcagcgggggcgtaaagggcgaaaacccccccgccgggaggcccctaaggacgaccgcgggcagggggggggaagcacccacccggggggggtgggggaaaaaacggcgaccccagcgcggggggaaaaaccaccagaagcaccccaaggcgcagcacaccaaccacctgctgggtactaataacaaaacaccggccgaacccccggggggggaggaactgggcccacccccccaccgccaaaggaaaaaattgggggggg

SEQ ID NO: 91082 - DNA, 146 bp, Zea mays
  Clone ID: MRT4577_183068C.1
gccagactatgccttacgcgaccggccatacctgagttaagttgaagccattctacgccaccttatgtgctatatgaacttcctagctctgattgacccattctttatgctgactatttccccgggatcttactgttctgcatctt

SEQ ID NO: 91083 - DNA, 1068 bp, Zea mays
  Clone ID: MRT4577_183069C.1
gtctcgctctctcgcggcttccgaatcctagcgcgagtggatcggcgggcgggtggcggcgatgatggtgagggcgcgcgacgcggcgcgggcgctgctccgcctcgccggcgctagagctggcgtccatagggactatttccctccgctagcgcgcgccacgtttgctcgcgccttcctggatttccgcaagacggggaacaaggaggccatcgagaaggataaggccaggcttaccgatgaactgagtagaggctacttccaagactttgccgagatccgcgagaacgctggcaagattgcgacagcgagtaaggtcatcatcccagaggtagatgctgtgaagtttcctgatcttgatgtggattcccctgatggaggggcactgcatctgcctcttgttgcaccaactctgcaagctgatgatggtgaggctggagaccataagattcctggtgcttcattggtgtgcctttccttccgcgcaagctcgctgaaaatggcagagtcatggagtttaccttacctggatgctttcggtgctgccaagaacatgcatgtttatgaggtctcatttatagattcttgggtattatcattgagtcctatgaggcgagcatttctgaaggcgatgaggaaatctaacaatccacggagacatgttgtgtatgctttcggggaccattatgacttccggaagaagcttcaaattataaaccttctcactggatacatatatctggttgatggcctgggaagaataagatggcaaggctctggatctgcaacacaagaagaactgtcgtcactaacagcgtgcacctccattttgttagatgaaaaatgagatggggtggctaatctttgctattttgtaacttctggtacaagatattttgcttttcactaagcaaatcgagtttttttcccgtgggtaataagtattggatggttagtttttttcactaaacaaccttgattttctggtggaaaatgattttggtatggtattatcgttgtatttaactgctatcctaacttcgtgctataataagactgaattagttt

SEQ ID NO: 91084 - DNA, 648 bp, Zea mays
  Clone ID: MRT4577_18306C.1
aattcggcacgaggattattttttttcctttatgtctgttgcctaacccacatcatctactgtttcttaaatattactcaacctacagactagttcatgaagggctacggttaatacacagatccttttcacagaaccgtacatattccctatgggaaggactactattcctaagtagatctcattgccaactttttgtccgatgatcggtctgactagaggaacactcatttttatgctacgcatatatactgtacattggaaccttggtgctcatacatgggaccttgtatcaacctacacctataataaatgctccactatggcttggaatcatttgactacattagaccacacgctccaggtaagccaactcgcatcaatatcaccttcacagattaactattcgccccttgcgacacatgatacctaacatggtaccgtgtatctcaaacaggtgcttatgtacacatttctcagttattatggcacataatcagagcagataaggtcacccagattgacaaagagacggtattcctgctcatgtaattatgacaaaattatgcacggtttcatagatgactgcctatgagacgtcagctgaaatgcctgataacctgtcaatactcatccttaagcttaagc

SEQ ID NO: 91085 - DNA, 1206 bp, Zea mays
  Clone ID: MRT4577_183070C.1
ccgaatcctagcgcgagtggatcggcgggcgggtggcggcgatgatggtgagggcgcgcgacgcggcgcgggcgctgctccgcctcgccggcgctagagctggcgtccatagggactatttccctccgctagcgcgcgccacgtttgctcgcgccttcctggatttccgcaaggtagctgcttcgtctccgttcctcctcgtttcctccgcaactgcagttaattttagaagattgttgaaccgtataaatggagatggttgagagtgaaatgagtgacttttgtgtgtttgtgtgtgtgttgctggagtgatcagacggggaacaaggaggccatcgagaaggataaggccagacttgcagtaccgatgaactgagtagaggctacttccaagactttgccgagatccgcgagaacgctggcaagattgcgacagcgagtaaggtcatcatcccagaggtagatgctgtgaagtttcctgatcttgatgtggattcccctgatggaggggcactgcatctgcctcttgttgcaccaactctgcaagctgatgatggtgaggctggagaccataagattcctggtgcttcattggtgtgcctttccttccgcgcaagctcgctgaaaatggcagagtcatggagtttaccttacctggatgctttcggtgctgccaagaacatgcatgtttatgaggtctcatttatagattcttgggtattatcattgagtcctatgaggcgagcatttctgaaggcgatgaggaaatctaacaatccacggagacatgttgtgtatgctttcggggaccattatgacttccggaagaagcttcaaattataaaccttctcactggatacatatatctggttgatggcctgggaagaataagatggcaaggctctggatctgcaacacaagaagaactgtcgtcactaacagcgtgcacctccattttgttagatgaaaaatgagatggggtggctaatctttgctattttgtaacttctggtacaagatattttgcttttcactaagcaaatcgagtttttttcccgtgggtaataagtattggatggttagtttttttcactaagcaaccttgattttctggtggaaaatgattttggtatggtattatcgttgtatttaactgctatcctaacttcgtgctataataagactgaattagtttaaatctttcc

SEQ ID NO: 91086 - DNA, 237 bp, Zea mays
  Clone ID: MRT4577_183071C.1
gagccctctagccggcggccgccctcttttttttgggtttttttaagtacctgggcctgtttgtacatggcagatacggccgcgcaggcaacatgaactgtcatgactgaacggatcatgaacgagggccacataaacgccatgggccgtctggccaacaaggccttgcttaaaagggttctctaactgctgtgcgaagatcacaacaagaacatccagtagaaaaagatgcgcatg

SEQ ID NO: 91087 - DNA, 163 bp, Zea mays
  Clone ID: MRT4577_183072C.1
caacgttgcacgacttgtctactcgcatcgcgcacctcttggctctgcatctagtctttgcgcttcttgctgttccctctgtaaatgccatttataatgaaaaggcatgatcacagggctcactggaccttcttagcgataccaacatggaagactttgctat

SEQ ID NO: 91088 - DNA, 549 bp, Zea mays
  Clone ID: MRT4577_183073C.1
agcagtggtaacaacgcagagtacttttttttttttttttttttttttttttttttatcatatcgcccggggggggatattccaatcatataagagtatcaactttatttatagtaatgatactaatgatgtgtctttaccttggcttgatctagtagttagttactagatccgacacccggatctttgtgtgaatctaatattgatgctcggtatttgaatccgttctgcaaatcaatattagattaattggtttgtacctttataatatcgcttaatcgggaggttactttttaccaatgaagatctctcgagctgctcaaagatctttaagtggcttagcttacgaggtagacttgatcatgatccatatccaaccttctcccatctgcttctgcctctaaagattagagtcatcgacgcgattcaagtccagtgctgataaaatcctgctgtccagttcgggaaagcaagtgattgattagttccattggtctattggcttcagcttccagtctaccccgcgtactctgcgttgttaccactgct

SEQ ID NO: 91089 - DNA, 1341 bp, Zea mays
  Clone ID: MRT4577_183074C.1
atgggcgagcagggcacggggctcaaaaggggcgcgggggctcggacgtggccagagaacgcgcggtcgtgggcgcgtccacgacaggagatcgtgggcgagagggtgttacacctaacctcactccacgcaagtatttgggacattgttgagtttggagcgcaggtacccaacgtaggggacaaagattatgatttggacgaaattgcccaaatccggcacttcaactcccaagccactactatactcctcgcatctctatgtcgagaggagtataataaagtgcaagggttgaatagtgccaaggagatttgggacgtgctcaagaccgcgcacgagggagacgaggtgaccaagatcaccaaacaggagacgatcgatggggagctcggtcgtttcgtcctcaaccaaggagaggagccacaagctatgtacaaccggctcaagaccttggtgaatcaagtgtgcaacctcgggagcaccaaatgggatgaccatgaaatggtcaaggttattctaagatcactcgtttttcgcaatcctacacaagttcaattaatacgtggtgatcctagatataagctaatatctcctgaggagcaagttggtacctccacaccagagatacaacccatcgcattcaaagcaacggaggagaagaaagaagagtctacatcaagtaggctccccatcgacgcctccaagctcgacaacgaggaaatggcgctcatcatcaagagcttccgccaaatcctcaagcaatggaggggaaagattacaaacctcgctccaagaggtgatagtgacaggggcgacgacaaaaggggaaagaagaaggagaataagaggtactacaagaagaagggcggcgatgcccacgtgtgtcgggaatgggactccgatgagagctccactgactcctcctccgacgaggatgccgccaacatcgccgtcaacaagggtcttctcttccccaaagtcggccacaagtgcctcatggcaaaggacgacaaaaggaagaaggtaaaatctagagcttccaccaaatatactacatctagtgatgagggtagctctagtggagatgaggataatttgcttaccctttttgccaaccttaacatgcaacaaaaagaaaaattgaatgaattgataggtgctattcatgagaaggatgaactcttggatagccaagaggaattccttattaaggaaaacaaaaggcatgttaaagttaaaaatgcttatgctcaggagatagaaaaatgtgaaaaattgataaagagcttagcatttgccatgacactatttccaaccttagaactgagaatgttagtttaa

SEQ ID NO: 91090 - DNA, 918 bp, Zea mays
  Clone ID: MRT4577_183075C.1
atgacgctcatcatcaagagcttccgccaaatcctcaagcaaaggagggggatggactacaaaccccgctccaagagggtgtgttacaagtgtggtaagcccggttattttatcgctaaatgccctatgtctagtgatagtgatagggacaacgacaagaaggggaggaataaggaaaagaagaagtactacaagaagaagggcggtgatgcccatgtatgtcgggaatgggactctgatatgagctccaccgactcctcctccgacgaggatgccacaaacatcaccgtcaacaaaggacttctctttcccaaggtcggccacaaatgcttcaaggcaaaggacgacaagaaaaaggaggagatagaaaaatgtgaaaacttgactaaagagcttagcatttgccatgacactatatccaaccttagaactaagaatgttagtttaactgctaaggttgaaaaatcaaatgtttgtcatgattcaattgtcaatcttaaagatgaaaatgctagtttgattgctaagattgataaattgaatgaatcaatttctagccttagggatgaaaatgatagattaatttctaaggttaaagatttaaatgtttgcaatgatgttgtttccaatcttagaaatgagaatgctattttacatgctaagattgaagaattaaatgcttgcaaaccctctacatccagtgttgatcatgtcaccatttgtactagatgtagagacattaatgttgatgctatccatgatcaccttgctttaattaaacaacaaaatgatcacatagctcaacttattgctaaaattaatgagcatgaaatagagaatgaaatatttaaatttgctagaagcatgctctatagtgggagatgccctagcatcaaggatggcattggtttccaatag

SEQ ID NO: 91091 - DNA, 1275 bp, Zea mays
  Clone ID: MRT4577_183076C.1
atggaaacgaccacaagccacaggaaggctccatcaagggagtccagcgccaaaggaagggaggaatcacctccccgcgtcaagtcgcaccggagtggcgacaagaagaagatgaagaaagtggtctactacgagaccgattcttcgtcgccttccacctccagatccgatgccgcgtccgccacttctaggtgccaagagcgcaagaagtttagtaagattcccctacgctatccccacatttctaaacacgctcctttactttccatcccattaggcaaaccactggttttttatggtgatgactattgtatgtggagtgataaaatgaggcatcacctaacctcactccatgcaagtatatgggatattgttgagtttggagcgcaggtaccatccgtgggggatgaaggctacgactcggacgaggtcgcccaaatccggcacttcaactctcaagccactactatactcctcgcctctctatgtcgagaggagtataataaagtgcaagggttgaagagcgccaaggagatttgggacgtgctcaagaccacgcacgagggagatgagctgaccaagatcaccaaacgggagatgatcgagggggagctcgatcgtttcgtcctcaaccaaggagaggagccacaagccatgtacaaccggctcaagaccttggtgaatcaagtgtgcaacctagggagcaccaaatgggatgaccatgaaatggtcaaggttattctaagatcactcgtctttcgcaatcctacgcaagttcaattaatacgtggtgatccaagatataagctaatgtctcccgaggaggttataggaaagtttgtgagctttgaatcgatgatcaaaggctccaaacaaatcgtcaacttggagcaaggcagcacctccacatccaaggtgcaacccgtcgcattcaaagccacggaggagaagaaagaagagtctacatcaaataggctccccatcgacgcctccaagctcgacaacgaggagacggcgctcatcatcaagagcttccgtcaaatccttaagcaaaggagggggaaggactacaaaccccattccaagagggtgtgctacaagtgtgaggcgacgacaagtgggggaaagagtaaggagaagaagaagtactataagaagaagggcggcaatgcccacaaagaaaaattaaatgaattgataggtgctattcatgagaaggatgaactcttggatagtgaaagtcgcctagagggggtggtgaataggcaaatctga

SEQ ID NO: 91092 - DNA, 2989 bp, Zea mays
  Clone ID: MRT4577_183077C.1
cgttgctgtcgaagaggtgtatgcaaaatggttgaacactcaaaccttacatacttaaccgttttcatcgttttacccaatttggcatgtttgaggtcgatgttggactctaaaccattaagtcaacttgacttgatctagattgacatatgtgagctccaactcccttgttcatttctcgagcttgatcttgagccttattacttacaccacataactgtagatgttaacttattagttgtaagtcatgtccttatgtagtgatccttgatgcaccataactcttcttaactcgatcaaccttgactttgcaagtcttcttcttcacccctggctttgggttcctagtctccttgaccttctcccgtgcactcggtacctcgaagctcttcttgcctccatcattggcttgatcagttgtcttctcgtcgatgcttatgtaagcaatggggccgaataaatccatgtggagtagctctagcggcctgtcgatcgtcatgatgttcttgtgaggatgatgggagccaacttgcttccctgcttgacatgcgctacaaaccctgtctttctcaaaatgaacatttgttagtcccaaaatgtgttctccctttagaagcttgtgaagattcttcattccaacatgggctagtcggcgttgacagagccaacccatattagtcttaacaatcaagcaagtatcgagttcagcaatattgaaatcaactaagtatagctgaccctctaatactcccttaaatgctactgaatcatcacatcttctaaagacagtaacacctacatcttgatttccatccccgaatgtaatggctctttgggggtctttgtttttctcgtaggaggagaacattcttttctcccctgtcatgtggtttgtgcatccactattaattatccaacttgagcccccggattcataaaccttgggtacccaaacacaagtcttggagcccttgtgtttgcccccaacatatttggcaactactttgcctgatttgttagttagcacataagatgcatcaaaagtcttaaatgaaacattagattcatttgatgcagtaggagatttctttttaggcattttaatatgagtggaatgcctagagctagatgtctcattcttatacatataagcatggtgagaaacataatgagacttcttagcatgaattctcctgattttgtgctcgggataaccaacaggatataaaatgtaacccttgttatcgtgagccacgggagccttgccatctagtgcaaatagaaacatgatcaacagtagatgtagatgtttgcaagcatttaattcatcaatcttagcatgtaaaatagcattctcatttctaagactggaaatagcatcattgcaaacatttaaatctttagccttagaaattaatctagcattttcatccttaaggctagaaattgattcattcaatttatcaatcttagcaataaaactagcattttcatttctaagattggtaattgaatcatgacaaacatctgatttttcaaccttagcaattaaactaacattctcagttctaaggttggagatagtgtcatggcaaatgataagctctctagtcaagttttcacatttttctatctcttgagcataagcatttttcaccttaacatgctttttgttttccttaataaggaattcctcttggctatccaagagtccatccttctcatgaatggcacctatcaattcattcaatttttctttctgttgcatgttaaggttggcaaaaagggtaagcaaattatcttcatcttcactagagctaccctcatcactagatgttgtatatttggtggaggctctagattttaccttcttccttttgtcgtcctttgccatgaagcacttgtggccgacgttggggaagagaagacccttgttgacggcgatgttggcggcatcctcgtcgaaggaggagttggtggagctctcatcggagtcccattcctgacaaacgtgggcatcaccacccttcttcttgtagcacctcttcttctccttctttcccctcttgtcgtcgcacctgtcactatcactagacataggacattttgcaataaaatgaccgggcttaccacacttgtagcacacccttttggagtggggtttgtaatctttccccctcctttgcttgaggatttggcggaagctcttgatgatgagcgccatctcctcgttgtcgagcttggaggcatcgatggggagcctacttgatgtagactcttctttcttctcctccgtcgctttgaatgcgacggattgcacctcgggtgtagaggtgctgccttgctccaagttgacaatttgtttggagcctttgatcatcaattcaaagctcacaaactttcctataacctcctcgggagacattagcttatatctaggatcaccacgtattaattgaacttgagtgggattacaaaatatgagtgatctaagaataaccttgaccatttcatggtcatcccattttgtgctctcgaggttgcgcacttgattcaccaaggtcttgagccggttgtacatggcttgtggctcctctccttggttgaggacgaaacgaccgagctccccctcgatcgtctctcgtttagtgatcttggtcacctcatctccctcgtgcgcggtcttgagcacgtcccaaatctccttggcgctcttcaacccttgcaccttattatactcctctcgacatagagaggcgaggagtatagtagtggcttgggagttgtagcatcccaaaaattcaaatcttgaaattttctcaaacttgcttacaaatgtttcaccattatccccctcaaattctttccagaaatactgcccagatatttcccgagtaatccccttcaagttctttccagaaatactgcccaaatattccaccgatatatctctagatattttcctcctgagaaataccttcagaatcat

SEQ ID NO: 91093 - DNA, 458 bp, Zea mays
  Clone ID: MRT4577_183078C.1
acggggcccgggcttaatttttattaaacccagggaaaaaaggggcccaaatcccatttcaaccgggttaaaaaaacctttaaaccggtgccccaaggggggggaaaacccaataaaaaaggccctttaacctgggggaaaccgtccaagggcccaagggaaccccaaaaaaaaggggtaaaaaaccccggggggttggattgggaaacatttttgggggccaccccctcttttttttaaaaggggtggggaaatctcccccctaagggaaaaaacccttgggccccattgggccaggaggtttattccccggaacctaactttgccccggggggccttagggagccctttgcccaacccccccctgtttagttggccacccatttggtaaaaaaccccttttggcggctttggcgaaagaacccgttgcttttgggggttgccaagggggcccctcg

SEQ ID NO: 91094 - DNA, 470 bp, Zea mays
  unsure (1)..(470): unsure at all n locations
  Clone ID: MRT4577_183079C.1
cccacgcgtccgcccacgcgtccgcccacgcgtccggggttacatatacttcactttataggttgaaacagtgggagcaccttgattggattgctcgtaccactacttttatcttgtagttcatgccaaccagctcgctcaagccaagtgttgaccggaaatgcgtataggttctggattattatttttagtgtatataggatggtgattgttcagcaaagtttgctcaagtaaaaaaaaaaggtgatcctcattcctcctctgtttttattgtgattattatttttagtgtatataggatggtgattgaacagcttgcaaccttgcacttgcagcatattccatccactggaaataattttcctgcagtaatctgcatagcgcaatccttgagtaatctgatcgatataagagcagcatgtagtacctggacctgatcttcttcttttanggaaaaaaaacaaactaca

SEQ ID NO: 91095 - DNA, 342 bp, Zea mays
  Clone ID: MRT4577_18307C.1
attgatcatactatggctgctgatctgaatttgatctatgtggttgcacgtgggttatagtgcttgaaccgtgatctacaaacgacatcacatggtacgcattgtaaaggatataaacgaatgaatgctagatgaagatgactgtagaatagaagcttaatatatgcaggcatttcatggatacaatgatgcaatggggtatgacatggcatgcaaaatcacaatttgagtatcatgactgtacatacataaacgtgtatagactatgcaaagattgtatagagtctcgattagagatcttgattctatacgatctcttgctcctgatcgtgagttgacttt

SEQ ID NO: 91096 - DNA, 1023 bp, Zea mays
  Clone ID: MRT4577_183080C.1
atgtctagtgatagtgataggggcgacgacaagaagggaaagaggaaggaaaagaagaagtactacaagaagaagggcggcgatgcccacgtgtgccgggagtgggactccgacgagagctccaccgactcatcctccgacgaggatgccactaacatcgccgtcaacaagggcctcctcttccccaacgtcggccacaagtgcctcatggcaaaggacgacaaaaagaagaaggtaaaatctagagcctccactaaatatacaacatctagtgatgagggtagctctaatgaagatgaggatgatttgcttagtctttttgccaatcttaacatgcaacaaaaagaaaaattgaatgaattgataggtgccattcatgagaaggatgaactcttggatatccaagaggaattccttattaaggaaaataagaagcatgttaaagtaaagaatgcttatgctaaggaagtagaaaagaataaaaatttgactaaggagcttagcatttgccatgacaccatttccaaccttagaaatgagaacggtaatttacttgctaaggttgaaaaatcaaatgtttgtcgtgattcaattgtcaatcttaaaaatgataatgctagtttaattgctaagattgataaattgaatgaatcaatttctagccttaaaattgaaaatgctagtttaatttcaaaggctaaagatttaaatgtttccaatactttcatttccaatcttagaaatgagaatgctattttacatgctaagattgatgaattaaatacttgcaaaccctctacatctagtgttaatcatgtcaccatttgtactagatgtagagacattgatgttgatgctattcatgatcacctagctttaattaaagaacataatgatcacatagctcaactaactgctaaaattaatgagcatgagatagagaatgaaaattttaaatttgctagaagcatgctctataatgggagacgccctggcatcaaggatggcattggtttccaatag

SEQ ID NO: 91097 - DNA, 317 bp, Zea mays
  Clone ID: MRT4577_183081C.1
cacccgagctttggagcactggtgaggacagatgtgtggagttcttctctgcccgagagcatacacaggaacatgtgaatgatgcagggatccgtgtttgctctgaaccatgaattccctggacaacgtctccagcttcgccgcgggacttgactggcaacagcgatcgccctacggcttcttcgttgtcgcacaatatccgacatccaaatgagtgtggctcaaaccacaagacataccgacaagactggcttgtctagcgtaccggctgtgccagttcatcagctgcatgtgttttttgaacagcccccctggca

SEQ ID NO: 91098 - DNA, 1145 bp, Zea mays
  Clone ID: MRT4577_183082C.1
gaatgaagggattgtgccagggttgatgacctacggagcagtggtggatgggctggtgaagtgtgggagagtggaggatgcatggaaggtggctcaggaaatgggggggcagggactagcacccagtgagtttgtgttctccgctgtgatcaccgggttttgcaagtcaggagaggttgacagggcattgatggtgggggagacaatggtggcagctagggtaaagccgaatgttgttttgtattcagcaatgattgatggttttgcacggtctgggaggatgacagaagctgaaaagttatttgaagaaatggttgatgcgaaatgtatcccaaatatcgtgacatacagctcaatggttcggggatatttccacattgctaattcatcgcgggcactctctacgtgggaggagatgataaaggttggctgtgtgccaactgccattagttacagcatattgatcagtgggttgtgtgatgtagggagattaaaagatgctatgatggtctggaaaaacatgattggtcgtggctgtgcacctgataccattgcttatacttcaatgatgaaaggtttatgcatgtctgggatggtagatggtggtctccgtctatttaatgacatgctggcaaagggtgatgccaaaccagatgtcattagttataatgttctattggatgcgttgatccgcacaaatgacttacctcgggcaatggacttgcttaaccagatgcttgatcaaatgtgtgatccagacccaataacatgcaatatttttttgcgggagattggagttttaaaggggaaagggagggaatttttaaaggggctggtcatgagactatgctataaaaataaatatagggcagcaggagatgttgttatggtcatgctggctaaatatattgtgccggaggctgtcatttggtataccatagtgacaggagtttgtcagactaaaagagttcaaaaggtggttgacaattgttgggatgagatttggaggccttaaagatcatacatattttttaatacgctgatgggcttcttgcagtactttatatattgattttgcatcccatttgaaaagatgtttcctttaatacagtgactttgccaacttatataagttgtagttgtcc

SEQ ID NO: 91099 - DNA, 356 bp, Zea mays
  Clone ID: MRT4577_183083C.1
acaacagttttgtaacagaacggcaggagtatgcattttttgttatatgacacaatacacacaccacacgttttaatgtgccgaagcgatatgattcgaaggttagcccacccatgatggtatgatggttgcatagcaagggcacaaataccatttttgcaaggaatatacgtacgcattctgagaaatccattctctccccaagttgcgccgaacaagttcttaatgaacacacgacttgtagccatcactggcaattccataaccaataagtgcaataccactgtcgaggtcagtgccacaagatgccgtgattacgcctgcacagaagaactgaaatgacaagtggccgacgt

SEQ ID NO: 91100 - DNA, 324 bp, Zea mays
  Clone ID: MRT4577_183084C.1
actatgctctagcatccgcagcttccgcagcctgctaggctttgcagatgacgaccgcggggcgccccatctgtgcgccggccaaggaacggaactcaacaaaagggcaccctcatcttcggcccctcccagaattaatcattacaggacatcttatcacacacatgcctatagcctagaaatgacagtctacagacccaacatgagttacagaacatgaatctcaatgaagaacttgaagaacgtgcgctcatgcactactctttctacgataagtcctattccgaataaagagaccggcggaaacgctctagccatctactc

SEQ ID NO: 91101 - DNA, 284 bp, Zea mays
  Clone ID: MRT4577_183085C.1
aaaggagatgtttgcactatatattggtttaacataatatgctttacatagatgatgaaaatcaaaccaattgaaagtttaaaaactgaaagtatatcaattgaaatcctaaatgggaaaacatgctaatatgaacctcaaacctcataatgaaggatgtcacataaatatgtcactacatcttcattatttggttgacaaaaaaaaatataactcctttcttgaatcactgtgatttcttttccctttacaatttcatccaaccaagtgatcatgaacttttt

SEQ ID NO: 91102 - DNA, 349 bp, Zea mays
  unsure (1)..(349): unsure at all n locations
  Clone ID: MRT4577_183086C.1
aaactgggcaagtcctaccaagcgcatggatnttattttggaaccatatggtgcttccgtttacgtcacctgcaaattctccatttcattcaagaccctaagtttaagccgttttcaactttgtgggtgatatagacagtgcaccctctcattttgaccactaattgctatcatataccccgtacatttgtaccgtcacttttagttaaacaaatcaaatatcaatgaaatgtgcaactctatattttgcactaggcaattactgcgttttgcaacttatgaaggccagctgttattttttttcctttctatattagaaaccaaagctgccaattttcttggatagggt

SEQ ID NO: 91103 - DNA, 948 bp, Zea mays
  unsure (1)..(948): unsure at all n locations
  Clone ID: MRT4577_183087C.1
cgctgcagtatacaacgaagcgagtgtggaaaagcaaggcagcgcgacgaagcggcgccgccagctccccaaaacctccccagctgccacctcctctgcctccctgcgtcccccgagcaaagcagaacaaggggggaaaaagttgacatacgcttgcagcgatggcctttgccgcccgcgccgcgctcgtgcgcgtcctccctccgcgaccatcgccgacctcccaaccgaagcagctcaagcaaggtctaggcggccgcggcgggtcctcgctcgccgttcgggcgaaggactccgatgacttcggggcccttctgtcggagaagctcgatgcgcaggcgcctgagaagcgggatgggcgggatggttttgggagggaggcgagtagcgtggaggaggcacatctgctcttgttgcaatttggatatcatcaattgtggtttctgatcggcgtcgagttggactctgacaaatcatattctgctctcatatatggcacatctgctcttgttgcaatttggatatcatcaattgtggtttctgcacttgattcagtccctttggttcctcaagtgatggaagttgttggtcttggcttcacaatttggttcacatcgagatacctgatatttaaggagaaccgtgatgaacttttcacgagagtcagctccatcaagaagcaaattttggggtctcatgagaactgagcgtctctcttacgttctgttctgttaactggtactgtgttttattgaagatgttttttttttggaataaacagtacatttttttgttttacgccagcatttttttactaatcgaaaggtaagtgcactgtactcttttcgttgattccaactaattttaggtgagtgtanggctgcgangacctaaagtgcgactntcnttgcatgcttcgcggggcccgctgaagcggttatcnattgt

SEQ ID NO: 91104 - DNA, 920 bp, Zea mays
  Clone ID: MRT4577_183088C.1
ccattccgtgccgtcccgagtctcttctcttgacacgacctgcggaaagcaaaaaggcaaaacctcagtgagtcctgtccacgccgatgtactccttcgagcagcaggaccacacggcggcagcgcgtactactaccggtaccgccacgctcgacacgacgagctacctgcagccctgtgccggcgcagctgcagctgcccgctcgctccagctccccgcacatcacccaggccaccaggcgctccggacagcgcccgccgtgccgccgcggcgcggcaagagcgccaagaagcacgcgacggcggcggcggcgcggcactcgccgtcgccgtcgtcgtcgcgccgctcctcgaccaccgtggtcgcgaccgacgtggccaactttcgggccatggtgcaggagctcaccggcttcccgcccgccgccatcttccgcccgctgccgcgcagggtgcacgcggccagccccttcgtcgccgtcgccgcggggcagggatgtggacacggaggttcggaggccacgaacagtagcactgccggcgccggcagcggcagcggcagcggcagcagccccggcgacgcaccggccgtgccgcctgtggcgctggcggcgcagcagcagccgcagttcgcgccgctgggcgtgttcgacggcctgcccgacctcgggtcgccggagttcgactcctggggagacttgtccatcgattaagtactcggtggcaggctaggtctgaaggaacgattgctcaaggatggtaatcggtgggggtatttgctaatttcgttgtgatcaagcgtgttgtgtttattatctatgtgcgtgcacgtgaccatgtgttggcagtttagccccctgtggcagtagtgcttgttgctttcacaagataaaaaaaaacatgctgagctcatgtgacgc

SEQ ID NO: 91105 - DNA, 677 bp, Zea mays
  Clone ID: MRT4577_183089C.1
cccgggctcgcggttcatcgtcaaccatctcgcggggatcttcgaggacgggctgatcgacgccgtccacctccggctcgtcccctacggcaacgcgcgcgtcgcatccaacagcgagatctcttgccatcgacgcctggccggatctggatgtgcatttcagcttcatctactgcgtggaggacctggtggtgaaacggcggtacaaggactgggagtcctgcttcgagaagctgggcctcgaccccaagcccgtaacagaatgctacaaaagcgagcatggccacaagctcgagctcaagtacgcgaaccagaccgacgctctcgagccgccgcaccggtacgtgccctgggtggtcgtcgacgggcagcccctgctagaggattacgagaatttcgaggcttacatctgcaaggcttacaagggcactccaccgaaggcctgcgagggcctgggacgtctgcagatggccctcgagacagcggcggaggcgcgcaacggcgtcagctacaactccggtgtcagcaagcttgcgactgctgaagctgggggtggggagcataaggtgggagaatactagtacgtaattgactagcgacgtgcccttttttgggtcatgtgaagatgaaggaccgttccatctaggcctgctaatggcaaaaaatccaatccactc

SEQ ID NO: 91106 - DNA, 1546 bp, Zea mays
  Clone ID: MRT4577_18308C.1
ccttctggcctgccccgcctgcccaacccagtaaactactgccacccatccgccggcgaaatggcccacgcccgcatcctcctcctggcgctcgccgccctggccacggccaccgtcgccgtcgcctcctcctcctcctcctcctccttcgccgtctccaacccgatccggcccgtcaccgagcgcgccgcttcgacgctcgagtccaccgtcctcgccgcgctcggccgcacccgccacgccctccgcttcgcgcgcttcgccgtcaggtacggcaagagctacgagagcgcggcggaggtgcggaggcggttccggatcttctccgagagcctcgaggaggtgcgctccaccaaccggaagggcctatcctaccgcctcggcatcaaccgcttctcggacatgagctgggaggagttccaggcgacccggctcggcgcggcgcagacctgctcggccacgctcgccggcaaccacctgatgcgcgacgccgccgcgctcccggagaccaaagactggagggaggatgggatcgttagccccgtaaaagaccagtcccattgcggctcctgctggacgttcagcactactggtgcacttgaggcagcatatactcaggccactggaaagaacatctctctttctgagcaacagctggttgactgtgccggcggattcaataatttcggatgcagcggaggccttccatcccaggcctttgagtacatcaaatacaatggtggtcttgacaccgaggagtcctacccttaccaaggtgtcaatggaatctgccagttcaaggctgagaatgttggagtcaaggttttggactcggttaacatcaccctgggtgctgaggatgaactgaaggatgctgttggtctggttcgcccggttagtgttgccttcgaggtgatcagtggtttcaggctgtacaagagcggagtctacactagtgaccactgcggaactacaccgatggatgtgaaccacgctgttctggctgttggctatggtgtcgagaacggtgtcccctactggctcatcaagaactcatggggcgctgactggggtgacgagggttacttcaagatggaaatgggcaaaaacatgtgcggtgagtattccatacatttcatcactacgaaagaacgagaagagatctcgtgtttcaggttatatagcgcactagcactaacacgatactgacttggactctaaacgatgcaggtgttgctacgtgtgcatcctaccctgttgttgcatgaggcacttccggattgtcacatggtctgtttggcatcaatattgcatgtttggcctaagcttggtggatgggttatacagaacgggaactccgttgtgaatagaaacccgttgtgaatagaaaccgtgaagggaaagaattacttagcccctgcgtgtacgtctcccccgtatggctgtgtaggtagattgtcggttcgggatccgaattactcgtaccgtcatacgtgtctatggcattttatttgtgaaacaaaatacccataaatcatgaaataat

SEQ ID NO: 91107 - DNA, 1018 bp, Zea mays
  unsure (1)..(1018): unsure at all n locations
  Clone ID: MRT4577_183090C.1
cattgggaccctcgaggccggccgggataatctcggtttctagcacgcaaacacacggcacgagcagctgagcgcccatggcaggtccccggcgtctcctcctcctcctcctcctcccgctgctcgtgctcctcggcgcgcacccgccgcagtgcgggtccgcggaggaggggacgaaggtctccctggagctctactacgagtcgttgtgcccgtactgctcgcggttcatcgtcaaccgcctcgcggggatcttcgaggacgggctcatcgacgccgtccacctccggctcgtcccctacggcaacgcgcacgtcgcatccaacagcaagatctcttgccagcatggtccgtacgagtgtctgctcaacaccgtggaagcttgcgccatcgacgcctggcctgggatctggatcatttctctactcgtgtggtggtgaagcggcagtacaaggactgggagtcctgcttcgagaagctgggcctcgacgccaagcccgtaacagaatgctacaaaagcgagcatggccacaagctcgagctcaagtacgcgaaccagaccgacgctctcgagccgccgcaccggtacgtgccctgggtggtcgtcgacgggcagcccctgcttgaggattacgagaatttcgaggcttacatctgcaaggcttacaagggcactccaccgaaggcctgccagggcctgggacgtctgcagatggccctcgagacagcggcggaggcgcgcaacggcgtcagctacaactccggtgtcagcaagcttgcgactgctgaagatgagggtggggagcataaggtgggagaatactagtacataattgactagcgacgtgccccttttttgggtcatgtgaagttgaaggaccgttccatctcgttgtccggttttttattgtacagtaatagctaatatgataatgataataattacatttccaaaaaaaaaaaaaaaagtaatgataataattacatttctaatcttctccaaaaaaaaaaaaagagn

SEQ ID NO: 91108 - DNA, 734 bp, Zea mays
  Clone ID: MRT4577_183091C.1
gccggccgggccgggaggttctcctgcccccttttttggatctttacctccgtaatatgctctgatcgcttttgtacaagattttttctcctatcatccttgaatcaacatttttagaagctggataacactttcattgaaagccaggttcagggacctaattgcgagttcatccataaaaagaagagctcagacggctgaatatcgaccatcaacaaagctcggtattcattacagtcataggaatcctaatggagcaaccacaggacgccatatgacaatgcaagaatactattgctatcaattccattataggaaggatcagccaaatccgtacctatgctacggtctattgtcaagccaagccaaagttgatgcacgtgctgctatcgaggaaagtagacttcactacattgctcaaaatcaaaaaaacttaagaatggaaagcattcaaggaatagctgatactgttagtcgtggatgcataaatggcgatgaaatgggcaggagagttgttcttccagcgtctcacattggagggcgacggtatatgcttcaaaattaccatgatggtttagaaatttgcggaaagtatggccctcctgatttttttgttacatttacatgtaacgcttcttggcctaaattactggaagtatctttcaacacggtcaacagctcctgatagatcggatgtagttaccaggggtctccatctaaagcttcatgaattg

SEQ ID NO: 91109 - DNA, 1273 bp, Zea mays
  Clone ID: MRT4577_183092C.1
ctcctatagggcattgggtacctcgaggccggccgggtggcattccgaccgatcccaccgaatggacagccgcctcgccatcgccgcgctcctcctgctcgcctccgcctcctccgctgccgctgccgcggacggcgggaaggtggccgtggcgctgtactacgagtcgctgtgcccctactcggcgcgcttcgtggtgaaccacctcgccaaggtcttcgcggacggcctccgcgaggtcgtggacctcacgctcgtcccctacggcaacgcccggatccaccccggcggagagatctcgtgccagcatggtccgtacgagtgtctgctcaacaccgtggaagcttgcgccatcgacgcctggccggatctggtaatacttctctcacctcttaaactctgctcctagtcataggacttttttcatgcgaggaggagtctgagaaactccggtaaaacgtgtaacaagccgatcgttgatcggttgatcaaaatgaatctgccatcgacaaattagctgtgatcaaagcttcgggggggcaaatcgacaccatttctgcagttttctcaagcaaatcttgtacagtactagttctcaaggcttcagtggatgcccacttcgccgttgttgttgggtacaggatgtgcatttcagcttcatctactgcgtggaggacctggtggtgaagcggcagtacaaggactgggagtcctgcttcgagaagctgggccttgacgccaagcccgtaacagaatgctacaaaagcgagcatggccacaagctcgagctcaagtacgcgaaccagaccgacgctctcgagccgccgcaccggtacgtgccctgggtggtcgtcgacgggcagcccctgctagaggattacgagaatttcgaggcttacatctgcaaggcttacaagggcactccaccgaaggcctgtgagggcctggaacgtctgcagatggccctcgagacagcggcggaggcgcgcaacggcgtcagctacaactccggtgtcagcaagcttgcgactgctgaagatgagggtggggagcataaggtgggagaatactagtacgtaattgactagcgacgtgccctttttttgggtcatgtgaagatatgaaggaccgttccatctcgttgtccgggtttttattgtacagtaatagctaatatggtaatgataataattacatttctaatcttctccaaaaatatagtacgtctgaccttgcgagcagcgtgcgatatttgctgcggacagactgctct

SEQ ID NO: 91110 - DNA, 251 bp, Zea mays
  Clone ID: MRT4577_183093C.1
ggtcatcctgcagtacatcgacgaggtgtgggcggggacggggccggacgtgctttcggtcgacccctacaagcgcgcggtggctcggttctggggcgcgtacattgacgacaaggaggagactgcgtgtctggggatgctgttcaggtgcgctaacgaggaggaaagggctgccggtgtctctcgcgcccgtgaggcgcttgactcgctagatggctcgttcctggactgctccaaggggaggtccttct

SEQ ID NO: 91111 - DNA, 275 bp, Zea mays
  unsure (1)..(275): unsure at all n locations
  Clone ID: MRT4577_183094C.1
gtccttctatagacctccttcaaactagcgaaagacttgtctgagatattcagcactttgggtttccacataggatggataacttggactgttgcaggggctgtccgatgagagcttctctgggtggcgcagtcgggcgggagtccaggaatgaggacagctgcgaatagtgtcgatggttgtgccactgatgtcctcacttgcgcacagaactgcccacagaactgacaccggttactaatcctttgcctgttctttagcctgtttannnncgc

SEQ ID NO: 91112 - DNA, 753 bp, Zea mays
  unsure (1)..(753): unsure at all n locations
  Clone ID: MRT4577_183095C.1
aaagacgaaataactacatttacccctgcctctaaccttagcagaacaaatatcaaaagttgaatgttccacaaagagtgctacttgtttgctatgacccgattcaggttcttctgcatgtatctgcacagtacattaactattttcatgttgcttattagggcattggtacactcgttacctaccatagttggttaattaggtttggtttatttcgtattcgtaccatgaaatttcatggatttcattatttcgggtacaacctgatactaatgactttaaccgatctataaaccctttgcacagttctaatccagaagaaactggtcttcattttctgcaaggaaacaaatatgtgcaaactgttctgtactgatattttttctggggaatgaaacagaacttttagaacaagctgtaaatgttctcaaaacctcccccagttttttacctttgccaaagtaattaatcacttggtttgtgatgagtggagaattggagatctaaaatgcttaaattagagtattctgatatattttctgttttcacgtttatctcaaaccatggtactatgtttctatcagttgataaatagattgtgtgtctataattatgcagataaatgtgtaagtattataaacatncttaatcaacccttcctctcccccatncttatttactactactagcattcaaatttggctacagatgtaagaattttctgtgtaatgaacccctatctctccctccagg

SEQ ID NO: 91113 - DNA, 520 bp, Zea mays
  Clone ID: MRT4577_183096C.1
aacgaaagaaatttttaaatttttttggttttaaaacctgggtttaactttgtttccctggaataaattacataattttacatatcccctcaaattatcgaaaaaaaccccccagggttcctaccaaatttgggttggtgggggttttgggcaaaaaaaccgacggggggtttaaaaaaatttggggggaatcccactttcccagcaaaaaatttttttgtttttttaaaaattttgaccaaaaatcctgtttaccctttccaaacccgaagccaaaccgaaaagggggggccaaaacctgggttggaaaaaaagctaggcttttactttcacactggggacctttcgggggactgggaaaaaaatccttttaagcaaactttcttaccaaacgcgattggggggctacaacttggagggggatctaagggggcatcggccttcaaaagcatgggcgagtacttcctcgatgcgcttaaaaagcaaaatttccttgtgggaaaaaattggaaatggaacc

SEQ ID NO: 91114 - DNA, 1444 bp, Zea mays
  Clone ID: MRT4577_183097C.1
cattgggtacctcgaggccggccaggatggcaatgcgattagatagtttttctacttcggatcgtgtgcccttttattaggtttcctttatgtgactggtagtgctaggttcatttcgagctcatgcgcatatatgccccatgctaacaataattccaatcaagattcaagttgtccacccactagcgccgttaaccctttgtttgttttgtttgcttcactactcctcgatcatgtaggaaaagatctcctagcagctagccagctacagcctacagcaagagatcggcgcgttgattgcttggatcgaccgaccggccggggtggtcgccatgggacgcgggaagatcgagatcaagcggatcgagaactcgacgaaccggcaggtcaccttctccaagcgccggggcgggctgctcaagaaggccaacgagctcgccgtgctgtgcgacgcgcgcgtcggcgtcgtcatcttctccagcaccggcaagatgttcgagtactgcagccctgcctgcagcttgagggagcttattgagcagtatcagcatgctaccaacagccacttcgaggagataaaccatgatcagcaaatactgctggagatgacaaggatgaagaacgagatggagaagctggagacgggcatcaggaggtacaccggcgacgacctctcctccctcaccctcgacgacgtcagcgacctcgagcagcaactcgagtactccgtctccaaagtccgtgcaaggaagcatcagctcctgaaccaacagcttgacaacctacgtcgcaaggaacaaatcttggaagaccagaacaccttcctgtaccgcatgatcaacgagaaccagcaggccgcgttgaccggcgaggtgaagctgggggagatggcgccgctggcgatgctgcagccaccgccggcgttcgcgcactcggccaccgcctactacggcggggagtcgtcgtcgtcgggcacggcgctgcagctgatgtcggcggcgccgcagctgcacgccgacgacctcgggttccggctacagccgacgcagcccaacctgcaggacccggcggcgccgtgcggcggcctccatggccacggcctgcagctgtgattaactgcgatcaattgggaggactgtcacatgctctgcatcgaagagggactattggagcacacacgcagtttcatggtcgcaaagcccgtcatgcataatttcgatcatatgttagtttgtcatctgaatagttttatatatgcatgcaatgcaatcaattctctggataataattcaactattgttatgtatctaattaagataggttcgtagactactcctctccatcatcatatccgtgcaattgtggtaccaatagctaagccctaatctagtatttaatcacatcatcccatttccggatatccccccccaatcattcggatgcg

SEQ ID NO: 91115 - DNA, 434 bp, Zea mays
  Clone ID: MRT4577_183098C.1
tccctctgtctagccggctcggcaccgggcccgtgaacacctatctataacctattcttatatattaatgacgtattttgacgattgaggtctattgtataaggagagggctgatataacaaagatgatatactcaaatcactcatctccgtatactgcgcttgggctagtgactgaaagggatcacgaatactgcctgtccgtataagcagtgcagaccctggtagagtgtcagatactgagctatctgtactatgtaacacacaatgcccttgagtatgcaaggatctagcagtggacatacatggacataggataactgggcggcattgttgacagcgagctaacggaatatgacagctgtagagccttttgatcaggttgagaagccttgcttggtcatcaggatagatttactgactcccaggatctga

SEQ ID NO: 91116 - DNA, 241 bp, Zea mays
  unsure (1)..(241): unsure at all n locations
  Clone ID: MRT4577_183099C.1
gcctgcaggtaccgggttcgagtgttcgggctaggcgtacgcgttctggcattttctcttgcataccgattgcctatcncccctcccaaccataagaccgatggcgcccaagtgccgagaagatagcccgcggctatataagccggtggaggaggagcccgcggccgagaagactaccgccgggaagaagcccaaggcggagaagcgggtccccgctggcaagtccgccggcaaggagggc

SEQ ID NO: 91117 - DNA, 2536 bp, Zea mays
  Clone ID: MRT4577_18309C.1
ccagtggaagggcgtgcgtcgggcgctactggagttacgagtcagatgcgtctcttcacgtagtgatgactccatgatttttttgcaaatactacttaaatctcttaagagtctctatattaaatactacagtatatgtcctaatcgtgctaatagttcagtactcccattggccggatggcgctgtccttataattgcagctccaatccccccacccaggcccagcacaaagggaccgagctctcgccagtcaccatccaagaatctccttcctctcctcctctcgcgtcctgtccaaggatccggccggcaaggatctccggggcgcgcgagcagccatggccgcgaacggagaggatttccggggccctctcctgcttggagcgcgagacgacggagcggcctggtggggccgtgacggcgccgaccctccgcgaggccgccggagcagcagccgcccgtggacggcgctggccatcgccgcggcgctcctcgccctggcgggcgtcgtcttcctcctcagctccagtagctacgggggccgtcccggcggtcccgtcccggcgccgccgccgccgcgcggcggagcccgcaggaggtggagtccgcggtgggcgcggcggcggcggacgacgcgcggtgctcggaggtggccgccgcggcgctgcgcgcgggcgggcacgcggtggacgccgccgtggccgccgcgctctgcctcggcgtcgtgcaccccatgtccagcggcatgggcggcggcgccttcgtcgtcgtccgggacgccgcctccggccaggccgtcgccttcgacgcccgggaggccgcgccggccgccgccacgccggacatgtacgcggcggacccggcggccaagtacaggggcgcgctggccgcgggcgtcccgggcgagctggcggggctccacgccgcgtggtcgcggtacgggcggctgccgtggcgggacctggtggcgccggcgatccgcctcgcgcgcgacggctacgaggtggtcccgtacctggcccgcgcgctgcaggagtgcgagggcgacgtgctcgcggaccccggcctgcgcgccgtgttcgcgccgggagggcggcgggtgctggcggcggggaagacgtgccgcaacccggcgctggcggccgcgctggagcgcgtggcggaggagggcgccgcggcgctctacggcggcgccgtcggggaggccctggtccgcgacgtcagggcggcgggcggggtcatgacgatggacgacctcagagggtacagggtggacgtgggcgccgccttgcgagccgacgccatggggttcaccttcctcggcatgccgccgccgtccagcggcaccctcgggatggcgctgatcctgaacatcctgcaagggtacagctcgctcgagttcttgaaggagctccttggcatccaccgggtcatcgagtccatcaagcacatgctagccatccgtatggacctcggcgaccccgacttcgtggacgtgaccggcgacgtcgccgagatgctgtccacgacattcgccgacaaagtccggcagaggatcgtggacaacacgacgttccctcccggctactacttccccaagtggagccagctggacgaccacggcaccagccacctgtgcgtggtggacggcgaccggaacgcggtggcgatgacgacgaccgtcaacgcatacttcggcgccaaggtgctgtcgccgtcgacgggcatcgtgctgaacgacgagatggacgacttctccgtccccgcgaagcgcacgccggaccgcctcccgcccgcgccggccaacttcatagcgcccgggaagcggcccctgtcctccatgacgccgctgatcatactcaaggacggtgagctcgccggcgtcctcggaggcagcgggggcacgaacatcatcgccacggtggtccaggtgttcgtgaaccacttcatcgtcggcatggaccctctggcggccgtccagcatcccagggtgtaccacaagctgatcccgaacgtcgtgacgtacgagaaccagacggtgggcgacggcgaggtgatcgcgctgggcggcgcggcgagggcgttcctggaggagaggggccaccggctgcgcagcacggactcgggcgccgtgtgccagttcatcgtgcacgagctggcggagccgccggccgcgcccggacacggcgtcttccgcgggaggctcaccgccgtgagcgaccccaggaagggcggcagccctgcagggctgtgattgtgaattgtgatggaggctggtgcgcgtggatagttgcgccttccgatccaactttcgtgcgtggatctcatctcctccctgtagatagatagaaagattcatagacatcatgcattgtttatatatatattgcctagatgggaatccatcaaactgctttcgcgaactagtggacaggcacgaccagtgaaagtttcgagaaacaatagtgaacatttgagagaatttatatgtaacaggtgacaagatttaatataatgtgtatttgcaacaagatg

SEQ ID NO: 91118 - DNA, 103 bp, Zea mays
  Clone ID: MRT4577_1830C.1
ctaagcttaccactctatacacgatccaactttatttacgcctgcatgctacctcatatctgttctgattctacacttagtttggcttcactctccatcactc

SEQ ID NO: 91119 - DNA, 334 bp, Zea mays
  Clone ID: MRT4577_183100C.1
tgcaaacaatccgctctgctgtgaagttaacaacaacgaacgaacgccatcatggcggttttcttggacgctcacaaaccgtacctgatcgctattgccatacacatcatcggcacctgcctgttcctgatcttcaaggcagccttgcacgactgcatgagcacctcgctattcatcttctaacggatcgccgacggctcactcattgatgtgcccacagccattgctcatcaaaggaagaatatgcgatccatgtctggtaagctcgttgtcaagctctagttgctcgccttgatctcgaacacactcagctctaacacgtgcaacctgaccc

SEQ ID NO: 91120 - DNA, 239 bp, Zea mays
  Clone ID: MRT4577_183101C.1
tccttccgctccttcttaacgccgagctataataggcgtcgcttaaggcgagggcagcttatgggtgcaccgtacaatttctgtctattatcgaccacgctaagtgccccacccttaagcctgttatttgactttatgggcgcaacgggtacactacgggtgtgaagagggatctcattgacgaccgtgagcagtgatctcagccaaccattgtcgctttaatccacccgttgatgttc

SEQ ID NO: 91121 - DNA, 2221 bp, Zea mays
  unsure (1)..(2221): unsure at all n locations
  Clone ID: MRT4577_183102C.1
cattgggtacctcgaggccggccgggctaaacctgctcggcggcggggtcccgcccttcctcggagcagtcgccacgctcctggagctcaacctctcctacaaccccttcgcgccgggacccgtgccggccacgctcggcggcctctccgacctgcgcgtgctctggctcgccggctgcaacctcatcggccccatcccgccgtccctcggccgtctcgccaacctcacaaacctggacctgtccaccaacggcctcaccggcccgataccgccggagatcacgggcctcgccagcgcgctccagatcgagctctacaacaactcgctcacgggacccatccccaggggattcggcaacctcaaggagctgagggccatcgatctagccatgaaccgcctcgacggagccatcccggaggacctcttccacgcgcccaggctggagaccgtgcacctctactccaacaagctcacgggccccgtgccggactcggtggccagggcgccctcgctcgtcgagctccgcctcttcgcaaacagcctcaacggcgcgctgcccgccgacctcggcaagaacgcgccgctcgtgtgcctcgacgtttccgacaactccatctccggcgagatcccccggggtgtatgcgaccgcggcgagcttgaggagctgctcatgctcgacaaccacctgtcgggacacatccccgaggggctcgcccgctgccggaggctgcgccgggtgcgcctctccagcaacaggatcgccggggacgtgcccgacgccgtctggggcctgccgcacatgtcgcttctcgagctcaacgacaaccagctcacgggagagatctccccggcaatcgccggcgccgccaacctgaccaaactagtgctgtccaacaaccggctgaccgggagcatcccgtcggagatcgggtcggtgtccaacctttacgagctgtcggccgacggcaacatgctgtctggcccgctgccgggctctcttggcggcttagctgagctgggccgccttgtgttgcggaacaattcgctgtctgggcagntgctccgagggatccaaatccagtcgtggaagaagctgagcgagctcagcctcgcggacaatggcttcaccgggtccataccgccggagctcggtgacctgccggtgctcaactaccttgacctctccggcaacgagctcagcggcgaggtgccgatgcagctggagaacctgaagctggaccagttcaatgtgtccaacaaccagctgcgtggcccggagacgtaccgcagcagcttcttgggcaaccctgggctttgcctggatgatgcgctccatcttcatgtttgcagctgccatcctggtcgccggagtggcgtggttctatcggcggtaccggagcttcagcaaatcgaagctgcgcgcggaccgctcgaaatggacattgacgtctttccacaagctctcattcagcgagtacgagatccttgattgcctggacgaggacaacgtgattggcagcggcgcgtccgggaaggtgtacaaggccgtgctgagcaacggcgaggtggtggcggtgaagaagctgtggagcacggcggtgaagaaggaggagggctctgcatctgcatctgctgccgacaacagctttgaggcggaggtgaggacgctgggcaagattcggcacaagaacattgtgaagctgtggtgctgctgcagctgccgggactgcaagctgttggtgtatgagtacatggcgaacggcagcctgggggacgtgctgcacagcagcaaggcggggttgctggactgggcgacgcggtacaaggttgcgctggatgcgacggaggggctgtcctacctccaccacgactgcgtgccggcgatcgtccaccggggagaattttgcaatcagacaacgacagagggacggcgcccaggaagggagtaacggcgcgagggtactgggagaatgtgacatgagctaatgaccattaagagagtccgatgctatatgttcaaagcggataggattataatgccacaaatgcaattgccgcgatggcggtgccatgtttctgaagcccgccgttggcggtgccatgattgcaaaattctcgcggtggatgtggagctgttcggggagaaggacctggtgaagtgggtgtgcagcacgatggagcacgagggcgtggagcacgtcctcgacagcaggctggaca

SEQ ID NO: 91122 - DNA, 322 bp, Zea mays
  Clone ID: MRT4577_183103C.1
accacacatacactaacacatttacaaactcatagaaaaaaaaaacaaaaaggcaaacggaaaaattataaaaaaaaaaaacgcaaacaaaaatataaaaataaaaaaaaaaaaaaaaaaaaaaaaataaaaaaaaacaatataaaccattattaattataatataaccgtttataagactaaacaaactacagtgaagcctctaacttaaacagacaagataaatataaatgagactaaaatataaaacttaaaaattaataaaaacatctattaccaaaataactacacacgatacatcacaatatgatgaactcacact

SEQ ID NO: 91123 - DNA, 594 bp, Zea mays
  Clone ID: MRT4577_183104C.1
atggagatccagggcgaccatgggagggctagggatgacttctgcgtggggagagatggagggagcggctggggagggaggagatggctgggcgagcagagagggcgcgaccatgggagagggcaccggccagggagcgtccatggatcgagaggtgaaagggaaaaggtgtggggaggaggtgacgtgaagaaacaaagctcctgcctgcagagggcgcaagcacagaaggaggatgggagcgacgacatgggaggagggtggggcggcggcataggagcggtggacaggaggaggctgggggcggcaacacatgaggggttagaccaggctggcaccgaccgttctgagccaccacaacgtgagacggcctccagcggcggcgattcttggggttcggagtccatgattattgggcggcagcagtcgttcccgagggaggcattgggtgtgtatggtgagaaggcgtcgcgggatggaaacaaaatgatagcgatttgtatatatcatcaactcaaggtgatttcactatttgctacatttttcatatacgtcttgtcagaatatcatgtgaagacagttccatatttataa

SEQ ID NO: 91124 - DNA, 284 bp, Zea mays
  unsure (1)..(284): unsure at all n locations
  Clone ID: MRT4577_183105C.1
agcagctggctctctgccgtttccactggccactgcgcctcagcacttgcaaggagaggcagctagtttgaccaccgttccccacactatctcaccgggagtttctcgccggatcgagcaccgtcttcctgccgcgcgcggagttcaccggaaccggacccggcggagggaagcaccggctgccattgctcgccgccgtctcgcaaggcgacccgaacccgatgcgacggagcaggatgcctgataagagaggngcggccgngancgacgaccggcccgacgac

SEQ ID NO: 91125 - DNA, 482 bp, Zea mays
  Clone ID: MRT4577_183106C.1
gcctgcaggtaccggtccggattaattcccgggtcgacgagctcactagtcggcggccgccctttttttttttttttttttttttttttttaaagtcttttgcttttttatattaattttttgtttttacagacctattttttaacttttttttacagcaaaacaatgctaagagccattggccgaaccaaccgggtgggaattagggcatgaaacactctaaaacgagggggggggagagggacataaagctgagatcaacggagaaatacttgcgtgaaacagaaggggggtttttttaaaaaagtggtacacaaaccctgcccccccccaaatatgcggtatcaaatggggggttctgaaaattttgcagccaaagcccaggacaaagtaaataatgtaaaaaaaccggtgttaatgggcttcaccggcttgacatttaaacatcgctcaggaacttcgtggaagctggcgcttccaaa

SEQ ID NO: 91126 - DNA, 566 bp, Zea mays
  Clone ID: MRT4577_183107C.1
ccggccgggactgcgccggctccctccacctcactaatgtacgttcaacgctgagacctcagcatactactacaagaagtaacacttctccgtgatgcctgactcactcgccgtatggagccaagacggaccacgtcaccccgagggtcaagttcaccaccgagccccaataaaataatcaatgatatatatatataactaggatcgatcaggagtaaaatgactggctctaccggcctgaggaaccccctggtcaggcctactataactcctcggcggcgcgtccgagcatcggcgtgtggacgccgaacgaaggcgtcatcgaccacttgtacgaatatttcgcatagctgaccgctaagcaaaagtactgtgcggacacaattccacgcgacatacgagtacaacacgatagagggaccagaccgaccccgcgaacgacgggcataacttcaattacttggtgtacagtcacagcccgatttccacgcggtaaatgtggcacaggacgtggattaactgaacggccaacaaccccatcagacagtgcttgcgtattgcgccgc

SEQ ID NO: 91127 - DNA, 313 bp, Zea mays
  Clone ID: MRT4577_183108C.1
cgcgttcgctcacgtattcgggaggctttttcctccactagaacgagggctaccacggggggcgcatcatatgatcccatgctacgatcgcggctaatcacaaccacgacaacttctgctcgacactgctctagttcaagatcgggacggtgccggtccagagccaggagtcctgcgacctatgcctggaggacaacctgccgctgatccgcacgatccactgcaagggccagtgctcctatcacaacggcatcaccattcccgtcatgaacgtcctgcacgatgagcccgacacggcgtacctggtgaaggc

SEQ ID NO: 91128 - DNA, 289 bp, Zea mays
  Clone ID: MRT4577_183109C.1
ctcctctggccgccgcggggagagaggccgagatggcagatgagattgccaaggctcaggtcgctcggcctggtggcgacacgatctttgggaagatcatccgcaaggaaatacaagccaaaatcatttttgaggatgaccggtgccttgctttccatgacatttcccctcaagcaccaacacattttctggtgatacccaagaaacatgatatcccagatttctgtggcagaagatgatgatgaaagtcttcttggacacttaatgattgttggcaagaaatgtgctg

SEQ ID NO: 91129 - DNA, 230 bp, Zea mays
  Clone ID: MRT4577_18310C.1
gagttcgttcgagctgtcattgatcaggaaggctatatacagtgtatgatgaattgtactttcgtctttaccatgacatgcaacatcacctgacatcctctcactctctgaggaattaacttaatattatttccagcacgtgttacagtgttctgcaatgtgcctaagtatagcttctaatacgcttcaatgtacttggacacatagtattagcggaacagcaagcaatg

SEQ ID NO: 91130 - DNA, 369 bp, Zea mays
  Clone ID: MRT4577_183110C.1
aaccaacgaaaaaaatccccaatccatctcctattctccttcgctgcagtcttcaccactgtcggcgctgacgcgctgtcctgctctccggtcgcactccggctgaccgccgctgcgtgtccgacatgctctttggctcgcaccgctccggctgaccgccccgttgcggcgacggcattgcgctccggctgaccgagtcattgtccaatctacgtagtacctgcccaatccactgccgccctcgtatagcaagctcgcgcctccgtaggcggactattgtccagcccgagctccgacaacccaccggcgtaaatggtgcaacccgtgcttccatcatcgccctctgcaatcccctgctctacagcgcga

SEQ ID NO: 91131 - DNA, 526 bp, Zea mays
  Clone ID: MRT4577_183111C.1
ttcgggaaccaaaaatcaaatgagccatcgcaatcacgagggggttgccctactatttactaaataaataaatatatctcggctgccactataaagtttacaaggcaaaaaatagaggattgcggagctgaaaacaccgtgaagcccggagatgtcatccatagccgcgaatgtggctaccgcgtcctctacaagaaacgaaaccgccagattgtccactatgagccccgctgagtagtgaacacgagggaaaacactgaagatggatgatctattactccccacattacctatgaaaacagccttctgggggaaatgaaaatggatgacttaccggtcgtatgatcgagagcctccttatgaacctgagctgtataatttgaaacggttgaactggggcactgattgtgacaactgataccactgcagcaatcatgttgatgatatcctagatgtagaatctaatgcatgcctgatatgccagcgctattttttgttaaatatcaatcatgatttggccccatgt

SEQ ID NO: 91132 - DNA, 577 bp, Zea mays
  Clone ID: MRT4577_183112C.1
cattgggtacctcgaggccggcccgatggaaaatacaaatagaaagaaaattgccacaaacctgtcgttctgtccagttccttggcggcggcagctagctcacgtcccggcgaaccctcgtcggtggccaagggccgttacactaaggaagaagacacagatccaagggttgactgctaaggaagaagacgctactcctcatcttcgatctgatgaggagaaggccattgcagcagaggtgttcgagaatgaattgagccgtgagatgtttctaaagctaaaaaatctaaacatgcgggtagtttggcttcggaggcagatatgtttcgtggagtgtttgttccttttggaagaagttgctactatcatacaactgaagctcaccaaggtctaccggaggtttctactgctattttgtttgaatttttcgaaaagccaatagcagcaagtatctcattgtgtgttgaggaaagagatattttgttgcacggtcaatttcagtagaacatttgcgatcagaactatttgctattgaaaatttgagatatttgataaaaaaaaaaaaaaaaaagcggcc

SEQ ID NO: 91133 - DNA, 323 bp, Zea mays
  Clone ID: MRT4577_183113C.1
tcgcccacgcgtgcgttagaaagaaagttgggtaactaaacaatatatatggcaagtgctatcaagaaacaaatagaaggaaaaatacaagaagcaagtatgatggacctgatcgcaagacctattggtgagctgatggttgcgtgagtaatgtgacgtcagaaaaaagaatcaactactacataaactatgtatagaagcggcagattcacttcataagatgtagcacctgtctttactaaaagagtgtatggattgaggaatgaaatgatccatgttatgctgcactgaaggaatcgaaagtgtgcaccgctttcttggac

SEQ ID NO: 91134 - DNA, 221 bp, Zea mays
  unsure (1)..(221): unsure at all n locations
  Clone ID: MRT4577_183114C.1
nttggtgacgcgcgggatgatgcgttccgcgcgggggtttgtcagagttggggggtatccgccgacaactgcgataacgacaacgttagggcttacggcagaggtccatgagggcaacatcatgctatttcgggagacgcaaacgtcccgcacatactgaatcctcagcttataaaaagaagagacgttgttccttgaccttgcgggccttaatggccagg

SEQ ID NO: 91135 - DNA, 313 bp, Zea mays
  Clone ID: MRT4577_183115C.1
aaaacagggaaagttaataatttttgggctaggggctcatgtttgcaccattcatccttgtttttgatacactaatttttagcagaaacgagacttttttcattaaaatgttattaataggctcaggttaatgcatggggttccggctaccaaatatgttaacaggcggggaccctaactttttttagttcaagcatttgcatgtcactgtaagctatcaggaatgcccaatggaactagcaccggagaccgtgtgtggtttgcaaagggtggcaccccatttttcatgaccttggccatcgggtcagtaaat

SEQ ID NO: 91136 - DNA, 1524 bp, Zea mays
  Clone ID: MRT4577_183116C.1
cattgggtacctcgaggccggccgggttgtataattgaaaatcattcagatgacgttaggctttgcatgtatgctataggatatggatcgtacttaatcacccctgcacacctctttaaagcaaacaatggagaattaacgtttcgatccacgcgaggagtgtacaagatgagaaactcagtggaagtgaagttacatcacgtaaaggggcgcgacttagttataattcaattacctaaagactttcctccatttccacagaaactcaaattccaggcacccaatcgcgagaacaaggtgtgcttagttggcgtcaactttcaacagaatcattcttcatgtgtgatttcagaaagcagcacaattgctccaaaagggaacaatacattctggagtcattggatctcaacaacagatggtcaatgtggtctgccattggttgacatcaaaactaggagtatagttggggtacatagtcttgcatccgtaaacacgaatgtcaatttcttcgtatcaatgccagaagacttcaacacatatcttggtgagctcgtctcaaagaatgaatgggaaaaaggatggcagtataatccaaatttgatatcttggaatgggctaaaccttgtatcctctgcacccaaaggcgctttcaagacagcaaaactcgtcgaggatttatcatttgatgtcacggagcaaggaatccaacatgaaacatggctaacaaagaacatacagcaaaatttgcaagttgtagccaaatgccctggacagctggtcacgaaacatgtcgttaaaggcccatgcccacacttcgcattgtacctatccacgcatgaggacgctgagaagttctttaggccgctcatgggcaagtatgacaagagtaggcttaacaaagcagcttttgttaaagatctcaccaaatatgcaaaaccaacttatattggcgaggttaacactgatttatttgagagagctgttgaacatgttatcaggatcctacgcgatgtcggaattcaaacatgtgaatatatcacagatgaggacgaaattttcaaatcccttaacatgaatgctgcagttggagcactatacacaggaaagaaaagagaatacttttccgaatacacacaggaagacaaagcagagataattaagcagtcatgcgaaagagtttatgaaggaaagcttggaatttggaatggatctctcaaagctgaaataagacccatagagaaaacggaagccaataaaacgagaacattcacagccgcaccattggaaacactactagcaggtaaagtttgcgttgatgatttcaatggccaattttactcgcagcatttgtatggaccgtggacggttggaataactaaattctatggtggttggaatagattacttgaaaaactaccagatggttggatttattgtgatgcagatggttcgcaattcgatagttcactcactccgtatttgataaatgcagtgctttacattcgattacgattcatgggacca

SEQ ID NO: 91137 - DNA, 667 bp, Zea mays
  Clone ID: MRT4577_183117C.1
gcacgagatcgtacttaatcactcctgcgcacctcttcaaggcaaacaatggagaattaacgtttcgatccacgcgaggagtgtacaagatgagaaactcagtggaagtgaagctacatcacgtaaaggggcgcgacttagttataatccaactacctaaagactttcctccatttccacagaaactcaagtttcaggcacctaatcgcgagaacaaggtatgcttagttggcgtaaactttcaacagaaccattcctcgtgtgtgatttctgaaagtagtacaattgcgccaaaagggaataatacattttggagtcattggatctcaacaacagatggtcaatgtggtttaccattggttgacattaaaaccagaagtatagttggggtacatagtcttgcatccgtgaacacaaacgtcaatttcttcgtgtcaatgccagaagactttaacgcataccttagtgaacttgtctcaaagaacgaatgggaaaaaggatggcaatataatccaaatttgatatcttggaatgggctaaaccttgtatcctctgcacccaaaggcgctttcaagacagcaaaactcgtcgaggatttatcattcgacgtcaccgagcaagggattcaacatgaaacatggctaacaaagagcatacagcaaaattt

SEQ ID NO: 91138 - DNA, 616 bp, Zea mays
  Clone ID: MRT4577_183118C.1
ttttttttttttttttcgtaaatggggcgtgccatggcttcattcagggtatctcagcagacaaatatcggagtattgccgcatatccatccttcatatccttctcgcagcgcgctcgacactgcccaaaggctcttgttcgtaccgcatgattccctgatttgttgggagactggcgtgatcatacttcgttgatgatggtggggtatccggatagcgatgcgcttagtcaaagagaccgaagcccatgtcgtcatcggactcctccttctcctcctccttggcctcctcagcgggcgcgtcagcagcaccgccagcggcagcggcgccaccagcagcgggggcagcaccaccggcaccaccggagggaacggaagcaagcttctcagagccggaagcgatcagctcgttgatgtccttgccctcgagctcagagatgagctggtcgagacgggagtcatcggcctcgataccgacggactcaaggacagccttgacgtcggcagcggagggggaggtgttaccaccgagaccgaggaggaggtaggctgcgaggtgcttcattttgaatgtggttgtcgaagtgtgtttctgggtaggaacaggagcgcaatcg

SEQ ID NO: 91139 - DNA, 311 bp, Zea mays
  Clone ID: MRT4577_183119C.1
agcgtggtcgcggccgaggtacttttttttttttttctttctttttctttttcatcaagggcataataaagggggaagaaattcaacctccatatcaacggctccggtgtaaccggatcaacatacaacctatccatgtcccatgaaccctatttgctaaacagcaacatccaaaaattttaccccaaccggttaatacaacaacatcgggatcatccacccactgggaagggggatcagttcccctgggcgcccactgcctccgttgtttctgtgcctgcccaaaaatacctgcccgggcggccgctcaa

SEQ ID NO: 91140 - DNA, 492 bp, Zea mays
  Clone ID: MRT4577_18311C.1
cccttccaccgaagggggcattaattaatggataaaaacaactttatacaaaagcatcccagggatttccccggggggggggggggaaaacccaaaggccctagaggattcgattcattggtccgtaaataaaacgaaatgaaacgaaaccgaaatcaaacagctactggtcaaccccgttggggccggaccaaaacctgaccacggggttccacacccactgaacaagaaacctgcccccgccaaccccgttaactttgaaggcccccccgaagcccccgtccgtaagcaattgccccgggtacccccctcccccgccggggccgaaaatcccctcgaaaaggtctgcaatctccgggggaaacaacgggtcccccccggcgtaccaggctttggcaagcgggttgaaccccatctccgcaagctcgtgcccaatgaccctaaccatgccgtccaccccaacgttgccgttgggcgggaactcggccctgc

SEQ ID NO: 91141 - DNA, 279 bp, Zea mays
  Clone ID: MRT4577_183120C.1
ctgcgctccaggggcgcgcactccctctcgctggcggacaccgtcgacaacgtgatgggcatcgtcatcggagcgcacggcaccacctcgacgctcatcaccttcatggtgcgccacctcgccaacgagccagacgtcctcgccaagatcacccaagaacaagatgagatcgctggcagaaacggaagagacggtgctctaacatgggaagacgtttcgagcatgaagtacacatggagggcggcgctggagacgctgcgcacggtgccgccggtgttc

SEQ ID NO: 91142 - DNA, 2381 bp, Zea mays
  unsure (1)..(2381): unsure at all n locations
  Clone ID: MRT4577_183121C.1
cattgggtacctcgaggccggccggggcgctctctcctcctccacccggtccatccgtcgcgcgccaggagcccagaaggccaggggttcaccgtgctgtacctgtacccctatataatccctcgcatgcaacgcgcctcggcttagccagctcgaccgacgagacgacaacgccgccgtgccgcgcgcacgcccgacgccgacgccgacgccgacgacgacacgccctccgctcggccccggtgaggcagcgaacgcccgccacacgtacagataccgtgcgcgcccggcatgggggtgaccaccgccggggaggccgtctgtaagtccccggcgcgggcctcggtcatcgtgaggctcaacgccgcgttcctcgccttcttcctcttcgcctacgtggcgctcctcctccaccccaagtactcgggcctcctcgaccgcggcgccacctccctcgtccgctgcaccttccgcgactcctgcccgccgccgtcgccgtcgaaccagcagctctcacggaagctgggaggcgtggcggcgaacaaggtggcggaggaggagcgcatcgtgaacgcggggcgcgcggcggccatgttcgacgagctccggggccggctgcggatggggctggtgaacatcgggcgcgacgagctgctggcgctgggcgtggagggcgacgcggtgcgcgtggacttcgagcgcgtgtcggacgcgttccggtggtcggacctgttcccggagtggatcgacgaggaggaggacgacgagggcccgtcctgcccggagctgcccatgccggactgggcccggtacggcggcgacgtggacgtggtggtggcgtcgctgccgtgcaaccgcagcgcgcccgggtggaaccgcgacgtgttcaggctgcaggtgcacctggtggcggcgcaggtggcggcgcgcaagggccggcgcgacggcgccggggcggtgcgcgtggtgctgcggagccagtgcgagcccatgatggacctgttccgctgcgacgaggaggtggggcgggagggggactggtacatgtacaaggtcgacgtgccgcgcctggaggagaagctccgcctgcccgtgggatcgtgcaacctcgctatgccgctgtggggatcaggaggtcgagggatccatgaggtgttgaacgcgacgtcgtggtcgggcgggcgtcgtccccggcgcgaggcgtacgcgacggttctgcactcgtcggacacgtacctgtgcggcgcgatcgtgctggcgcagagcatccggcgcgcggggtcgacccgcgacctggtcctcctgcacgaccacacggtgtcgaggccggcgctgcgcgcgctgtcggcggccgggtggacgccccggcggatcaagcgcatccgcaacccgcgcgcggcgcggggcacctacaacgagtacaactacagcaagttccggctgtggcagctggccgactacgaccgcgtggtgttcgtggacgccgacatcctggtgctgcgcgacctggacgcgctgttcgcgttcccgcagctggcggcggtgggcaacgacggctcgctcttcaactcgggcgtgatggtgatcgagccgtcggcgtgcacgttcgacgcgctcatgcgggggcgccggaccgtccgctcgtacaacggcggcgaccaggggttcctcaacgaggtgttcgtgtggtggcaccgcctgccgcgccgggtcaactacctcaagaacttctgggccaacaccacgggggagcgcgcgctcaaggagaggctgttccgggcggacccgcccgaggtctggtccgtccactacctggggatgaagccatggacgtgctacagggactacgactgcaactggaacgtggcggaccagagggtgtacgccagcgacgaggcgcacgcgcgctggtggcaggtgtacgaccagatgggggaccacatgcgcgggccctgccgcctctccgagcggaggaaggtggagatcgcatgggacaggcacgtcgccgaggagctcgggtacaccgaccagcactggaagatcaacatcacggacccgcggaaatgggactgatccacgactactccgtccgtcgcctgctgcattttcgtacataataccccacacgtagctggtcgagagccagatcgctaggcgcgcagcattttggttcgtgggtacatttaggccagctcagtttcataagtggagctgttgttccgaggtttttagcttcacgtacgaacagcttttccgatgaagctgaggggttttcgtgatcttatttggcaaatcagctttgcattggacaataaacaaataaaatgaccgtaatgctctctgcttttgtttccttctaannaaaaaaaaanaaaatttaa

SEQ ID NO: 91143 - DNA, 517 bp, Zea mays
  unsure (1)..(517): unsure at all n locations
  Clone ID: MRT4577_183122C.1
gtggcggccgcttcgaaggccggcccggtccgggnaaaaaaaaaaaaaaaaagcaagaggtcgaggaagaggaggcgggagaggtcgcgccaatggtgctcacgcgcccgtcctccgctctcttcttctcctgctcctcatccgcctgccttcgtcaactcaacccgctcctctccgttgcctgctgcgcctggagtgggccccgcgccacgccaccagcactcccgcagaatctgcgtaggttgcgaccggtttgtctagcttgccaactaaatttgcgccgagaatgcgagaatgccttatgagctaactagattgcttgggtttgttctggcgcaggctctgcgcaggtaattccgcatgctcatgagtcatgagcaaatttctgtcgctcttttattaattttggtgtagatcctctgatgcagtactcatgtactatgttgttttagcagttatccttcaattctgaaagtggatcattgtttgccaaaaaaaaaaaaaaaaaaggccccta

SEQ ID NO: 91144 - DNA, 581 bp, Zea mays
  Clone ID: MRT4577_183123C.1
aaaaaaaaaacaaaaaaaaaaaaaaaaaacaaaaaattttagaaaggtccgagcggcggagcttctgcgtttccgtttccgttgtggggatggattgcagcgctgcggctgtggggcaaggcactgggcatgtgctactgtcctaaatgatactgtgatccgatttcaattcgacacaccataccgagcccaaagagtgaactgtctggcctgagttagcgtgaggcgttaagttaccgttaaatcaggattgcagatccacttcaccggctgcgttttcgaataaacgcaaaccttgccagcctcggttaacttattgacccatccaccgctcgagcagagcctgcgttgacgtgtcgcgcttctgttccgtttcttacttacttgctgcgctaggctctcactcatggggtgaggggcgcgttttcacttaactggggggttacggtactgcaatcatgagagtcaaggggccagcaaaggacatggcatccgaaacgacaggccaatgccaggcaaccgatccataggacgggccgctgtcgtgaggatatcagataggctccgttaacgtgcagggc

SEQ ID NO: 91145 - DNA, 519 bp, Zea mays
  unsure (1)..(519): unsure at all n locations
  Clone ID: MRT4577_183124C.1
ctgagacacgagggcaccgtcaatcggcttaagagagaaacctctggtgtgacggcgtgacaacagccaacaccgttggcaagcatgtctccaatctgacctgagtagaggaagagtaagagaggccgagccttcctcatcttgggcggctgtgcctgacccattttctcaagatatggtctacgttccaataccagatgcgggggagcctaacaggaaattaggcccacctacaggaatgttgaaaaacagacctacaatcaccctctaggatctatgcgaggacatggatgctgtagtgactaggtcgtgcatcttgccancgctatggacagtatagcggcacaatacctcggctgagcaggctcatgccaagtgataacacaggcttccacagacagctctttatttattgtgaggtttatcaccatgcattatgatcaaagaacactacttatgccaaaactcctagactgactgaatcaatttaacactctctaatgtggggatagatgctag

SEQ ID NO: 91146 - DNA, 1072 bp, Zea mays
  Clone ID: MRT4577_183125C.1
aaaaactgctcgctcaattcgctggcatgccactctggccgcggcgccgcgtgtcctcatcgcggcgccgcgtgtcctcatcgcagcgccccttctccaggtccgaccggcgcctcccctcgtccctcccatgggccatggcacgctcgcccagccatctcccatggccagcaacctcgcttccacacagtgctcccctactcgtgcctggactttgctcgcccaggtcttcctccccatcacgcgcagcacccaatcagtcgccgctctgcctcttcatcctgacgtggccacggcgagcatctgccccgccgtccgcggctgctggacgccgcccactgtagctcgccggcgtcgtgcttcctcaccatgactgcgtccctgccgcagtgccggcaagctcgcctctgtgctcagggtgaaaaaatataaaaaggacatcgtaagcctattgaaaaatataaaagcagttgagccagctccgggagctcttcgtccgcttcgacctcgacggcgacgggagcctcaccaagctggagctggcggcgctgctctgctccctaggcctcgccccgcggccggggacgagatccacacgctcatcgccgccatggacgccgacggcaacggcaccgtggagttcgacgagctctcctcctccctggcgccgctgctcctggggccctgccgccccgccgtggccgtcgaccacgcgcagctcgccgaggccttccgcgccttcgaccgcgacggcaacggcttcatctccgccgccgagctcgcgcgctccatggcgctcatgggccaccccatctgctacgccgagctcaccgacatgatgaaagaggccgacaccgacggagacggcgtcatcagcttccaggagttcacagccatcatgggcaagtccgccgtcgacttcctaggcctcgctgctctgtgacttcctctctctctcttcctaccacatcggaggcgatctcctcctctgttcgtgcgttccttcccttttcttctccatttggcaattgccagtgcgcgttcgaagtgaattgatatgtgcgatgtctgt

SEQ ID NO: 91147 - DNA, 210 bp, Zea mays
  Clone ID: MRT4577_183126C.1
aaaaaccgccgacccacgcgtcgttgtgtttactaatctcttcaacacttctggtcttcaatcccacctcggagggattttcattataacccttctctataacaaatattactgaaactacctacataaataaccttatgacttacactgacctcccatttactttataaaacaaaatacatttcaacttgtatatttctgcatctatca

SEQ ID NO: 91148 - DNA, 389 bp, Zea mays
  Clone ID: MRT4577_183127C.1
cccaggccgaatatacttcaccactacgctgtacgaaccacttcttttcaactccaccctagggttcctttctagcacttgatctagtcggcctagcttcatattccagttctcgtgacaccatggtcaccaattcaggggcaactcctgtcggagagtcgcaagtaactttcaggccgcttcatcctacgttcgcggcggaatgtaatgggatcgacttttcacaaccagttagtgaagaaaatgtcgaaattatccgcaagggtctagccaagtatggcgtcctggtgtttcgccgtgctgaactcgacgatgcgaggcacgtagctcttgcacgccaactcggtgagcttgatcggtcaaccgtgtttgtcattgcctgtcaaaag

SEQ ID NO: 91149 - DNA, 249 bp, Zea mays
  unsure (1)..(249): unsure at all n locations
  Clone ID: MRT4577_183128C.1
gggggggggtccttcttaccctcctcatggggggcaacttactcaaccatttggaggagccgtcatctcctaaggcacctcctataattctagtgcactagctttgcactgtctttttctgccccttcttccaccaccctaattggggggggggggcgggttaaccctatacattctcccntcctaaccatcttgtcaattctctcccctctaacttcatctctcctgtccatgccctgacttggcctc

SEQ ID NO: 91150 - DNA, 225 bp, Zea mays
  Clone ID: MRT4577_183129C.1
atggcgctatcgatcgcctcctccaaccgccgggactgctcggaggcgtctgttgcaggtgcagaaggccccgcggcgtcctcttcaagaaccttcactgcgcactggcgagtgtggttgtgccggcggctcagaaccacgtcgtgctggggctgggtcccaaggcggcgcgccaggaccgctgaccgggagcagagcatgcgcgccatggatgccttcacgtaa

SEQ ID NO: 91151 - DNA, 384 bp, Zea mays
  Clone ID: MRT4577_18312C.1
ccacgcgtccgcccacgcgtccgcggacgcgtgggtggcgtttgtggcggagattcccaagaacgcgtccggcaagattctgaggaaggatctcatcaagctcgccacatccaaatccaaactatgaaaattgtttttcgtattccagcactgtaaacacgaaaaacaattttcatagtttggatttggatgtggcgagccattctctacgctgccccggtagtttggctgttgcatgcttgtataactgaagatcccgtcggctatgtgcttgcttgtgtgcagggctgtgttctcgtacaatacaatattgggagggaatactatgcgcctgtacgtatggttggatgggaataatatacggtaatttcagtgtgtggtatc

SEQ ID NO: 91152 - DNA, 332 bp, Zea mays
  unsure (1)..(332): unsure at all n locations
  Clone ID: MRT4577_183130C.1
gtagaccaaacaaaaccaggtgggatgttgacaccccagtcagggtcatcatttattggggggcgccaatggggggtgaaagaaaaaaaaaggggccaagagggggtactgcctnacccgacgcctaatcgcctaccctaccaataactcaatgactcacttgtttttttcccgggaactcctcagggacaggccggccatccatcctcggatccatgttgcacccaatcaagaacacanagaagggagaagggaaggggggagggggagagagagaatggcatccggtaaattaaaacgtcgtcgtgcaggggttggagggggcgtcattt

SEQ ID NO: 91153 - DNA, 214 bp, Zea mays
  unsure (1)..(214): unsure at all n locations
  Clone ID: MRT4577_183131C.1
agatcaaatactantnatnaaataaattactatttntattcttctttcaactccacatcaactaactatttaaaataacaattnccnaccncctaaactttttttttaaaagagcttgttttctncatncattttncccntcccacaaataccccnccnnnncccattcattcccantctttactanctanttcatcnatcatccattcatcct

SEQ ID NO: 91154 - DNA, 217 bp, Zea mays
  Clone ID: MRT4577_183132C.1
aagctaccaagcccggcaccgctccatgcatatccatttggcattacaaaactaatcgggcggtttcatctgctgcaggttaatcgggtcctcatatcataccagggggattcatggatatatgtaagagcggcaaaatagcaaatttttttgccacaccggagccgccgcggaggggaaccatggaccagaaggaccggctgagctgcctttcccg

SEQ ID NO: 91155 - DNA, 1185 bp, Zea mays
  Clone ID: MRT4577_183133C.1
ccggccgggattttcaatcccagaacagggcccgagcgagagcccacgaacgaagggctccttctctctcctctcgttgctgcattggcagacctcgagtgttgcgggagataattttggaatgccattcgagcgttctacggctccaatttctctgacttctccctgagcctttgcggccggctggagctggacggtccccgggcagcgcaggcagccggactgcgggagtcacctccatggcctcggctgctactgcaaccctccccaaggttcagttgaggccaagatgcaacagctacttccaggccctcaaccctaaggtgaccggtcaagtccatgcccacaccaaaacatgcgttgcctgcaagtgtccgacccatatccacgggttgcttgtttcagctggaggaaggaggacattcctgccggtgtctgcagttggatcaggtcagggctcatcggtcactgaggccgacaggaagagcgatttgtcgctggagaacgtcaagacgtccgttgtatcccgcgacgatgaaaagattaatgtacgagtgcagttgcctggaaaggcgacgcaaaaggtgtttgatgaggctctgacgttcttggcccgtgatgcgccaccggttcctggttttaggaagtccaaaggagggaaaacatcaaatatacccagcagcatcctgctgcagatgcttggcaagagccgggtcaccaaattcgttcttcaggaaatactgagcatcaccattgaagaatttgtcaagaaggaaaacctgaaggtgaaacctgagatccagacaacccagtccgaaggcgagatggagtccgcgttcgcgccgggatcagcatttgggttcaatgttgtccttcagctcgagacacctgactctgatgatccagaggagaaacctggctctgatgacgatttacaggaggaatctggttcctcagagtagaaagaaatgcatatcgcctgcatgcatttatcaaccttcttcatgtgccattccttatgaatgaatgtactgaatggaaagccgttgcaaccgttttgagttgagagttgcaactgaaacatttctgaagatatgagtggccgactcgcctctcttaacatgttgacaaacatataaaaaaaaaaaaaaaaaaaaaacatttctgaaaaaaaaaaaaaaaaaa

SEQ ID NO: 91156 - DNA, 288 bp, Zea mays
  Clone ID: MRT4577_183134C.1
ctaatgaaaaggggcggggacaatttgaattgcagacttttgacacctactataccaagatcaaacctgcaggtctgctttctaattcactgatgacatgatgtttcataagtctgctgctatccacagggttattctatgacaagtctcgctgggaacttccttaaagtatttcttgaccaactcctgatacccatttgatggttccggccccccttcctaacgccgatgtgtgatggcaactcttgcatattcaccggaggtaactgcttatattggatacgcctt

SEQ ID NO: 91157 - DNA, 912 bp, Zea mays
  Clone ID: MRT4577_183135C.1
tgggacctactgtccaggccatgcctgatggaagcacacatgatgtaaatgtcataataccatcactcgatctcaaagtttgatgtgcttcatcctcatggcatcctgattgagactcgattttctgatttcaacaggtgatggcaacctcaccaagatcagatatcctgatgaaccttcctgcactcgaaaaactagaaacaatgctcctcgtgagtcttgattcacataatcctctcaaaacaattcattctggtacctaaatgtatggctgaatttcattctgtagggtatattggatagctttcacaagccagagttctggtatgcagaccagaggaaccagtccttcaaagaaagcaagaaatcattccagcgaagtgaggataaatggtggttacctgagccatgtgtcccagactctgggctgtctgattgcatgcaccgtgaactgcagcagaaaagagaccaggcaagccagatccacaagatggccatggaaatcaacagcagtcttctctctgaaatgcaagttccattatcatacttggagacacttccaaagagtgggagggtgggtgtcggagacaccatctaccggtatatgtcttcaggcgatcagttctctccagagcacctcctcaacttcctcagtttgagctcagaacatgatgcacttgagattgcagaccgtgttgaagctgctatgtacgtgtggcgaagaaaagcaagtgcaacacatgtggtgtccaaatgggagaatgttaccgagctgaatgctgatggagacaagaatctggtccttgccagtagggccagaagcttactcctgtgcttgaagcagaggttcccaggcctgtcacagactaccctggacacaagcaagattcagtacaacaaggacattggaca

SEQ ID NO: 91158 - DNA, 721 bp, Zea mays
  unsure (1)..(721): unsure at all n locations
  Clone ID: MRT4577_183136C.1
acggggggggggggggggggagnnagacnttcacaccaaactgaagagacggaggaagccgcgatnncgaaaaaagtgcggtacctggcgnnaacgaactncaaagccnaaaaggannctatnanannnaaagnnnggcattattttannacccgntntangnngtantancnnaannaataanannaaactgaactgatttaaaatggganctttaaaacttgaactgattaaattggcagtttttaaaanngcaaacgtcatttnttaaaaagcaanngaaagaaaacccagccnnagcgaggnngccagggtnngaaagaaattgcaattcnagggattagaatggnnggttcgcttnccggacggcttttcacattcacattttaaaagagtgtggacgcgaganngaggtcgcaccccctaanacacttnactaaaattcaacaattatgnnngccctctgtatggnnaggttcaaagccctggaagcctgcngnnncttcagggttaggttaatgatttnnccgaggttcgatttaccaaaannacaaagcaanngacgtaggattagtngcaaannctacgaggattaacaaaagaattactttacttttcgcccagattccattcattggccgcagtctatggaaatcgatagtgctatggcgtattaaccgactagtaacggtactctaaaggaaaacaaaaaacgatagag

SEQ ID NO: 91159 - DNA, 577 bp, Zea mays
  Clone ID: MRT4577_183137C.1
gactggatctcacagcggtaagaagcacaacctgctacgtgcaaaagaccgagagagagacgaagcggagctgataatattttttttaaaaaaaacaatactaactagctagcgatcgagcagcgatacagtacaatggcgccgaagagcctgcttgtcgtcgccgccctactcgccgtcgtcgtctccgcctgccagctgccccgcggtgcgacggcgttggaggcgagccccagcaccaacaccaacaccagcctcatcgtctccggaaccgtgccatgcgccaccgggaactccattgacccggccacggtcccggcgttccctaacgccctcgtgcagctcgtgtgcggcggcaaggtcgtgggcagcgcgacggcggacagcgccggtgccttcgtcttcagccagagcagcgccagcagggacctggtcgccgccgccatgcacaacctgtgcagggtggtcgtggtcaccccgctgggcgcgtgcgacaggtccctggccgcagccgccgggacgctgtcggcgccgctgaagctcgtaggcatcaccaccggcagcggcagcggcagcg

SEQ ID NO: 91160 - DNA, 270 bp, Zea mays
  Clone ID: MRT4577_183138C.1
tccatccacagcaccgtcgactcttgcatcagagacagcaacagaatagaagtcagcatcggaatctcaatggtgcgggagatagaggaagtcaccggagcagtcatcaagatcatctccgaaaggatccatatgccaatctcatgttgcagcgggaaaaggattgggtctctaaaatccagatgatgcaactgcaaagcactgatccctacctggatgattttattactagaattactttgaaaaactggagaaactgtcagctgctga

SEQ ID NO: 91161 - DNA, 356 bp, Zea mays
  Clone ID: MRT4577_183139C.1
tctaaaaattactaaatctagatcaatactatctaataaatccaaacttatcataaaaaaaaagagggagccttacaaaaatactaatgtgtcccctaaaaatcaattggggcgcccgttctatagaatccacgttaatgtacgtttccttgcgtactactaattttttaatggggcccccagaatccatttcgccggccggcgtttaacaccctggggcctaaaaaaacctggggattaaaaaactaaaccgccctgaataaaatcccctttctcccagatggtgaaataccaaaaaggcccgaacggatcgcccttccaaacagttgcccaccctgaatggtgaatgggacccc

SEQ ID NO: 91162 - DNA, 296 bp, Zea mays
  Clone ID: MRT4577_18313C.1
atttgggctctagattatataatctggttgtttgtttgctagctagattatttacactggattatataatctggctagattataatcccaaacaaacatgctcataatctactattggcagttgccactcaaaaaatttaaccgactttaaatgaacgctgacaaaattgattgtttctattactggcatcaattaatactagaaaactaacatcaaaatttgagttgcatacaagttcattttctctacgttaggttacgctgaaagccctaagattctggatgctccggtgtct

SEQ ID NO: 91163 - DNA, 2677 bp, Zea mays
  Clone ID: MRT4577_183140C.1
tctgttttcgcaccagcgccggcacaggcaacgcagcaccgcaccgagccgagccacttagcgagcgagggaacagcctccacggcgaggagagaatggggagaggagggatcggaggcgcggcggccatggccatggccatggagaccgccgatcctgcccgtgcattcgtgaaggacgtcaagcgaatcattatcaaggtgggcacggctgttgtcactggcatgaatggccgattggccatggggaggctcggttctctctgtgaacaggtgaagcaactgaattttcaagggtatgaggtgattctggtaacctcaggagctgttggtgttgggaggcagaggctccaataccgtaaacttatccatagcagcttcgcagatctgcaaaatcctcagatgaactttgatggaaaggcatgtgctgctgttggtcaaagtgtcctgatggcgatctatgacacattatttagccaacttgatgtaacgtcatctcaacttcttgtgacggatcgtgatttcaaggatccaagttttggggaccagctccgtgagactgttttttcactgttagatcttaaagtagtacccttatttaatgagaatgatgccatcagtacccggagacagccatatgaggattcatctggtatattctgggataatgacagtctagcagctctgttggcagcagaacttaatgctgatcttcttatcatgcttagtgatgtggaaggactctatagtggtccaccaagcgatcctcagtcaaagattatccacacatatgtcaatgaaaagcatgggaagctaattagttttggagagaagtctagtgttggaagaggtggcatgcaagctaaagtgtctgctgctgctaatgctgcatcaaaaggtgtacctgttgtcattgcaagtgggtttgcaacggatagcatcattacagttctcaaaggcgaaaagatcggtacacttttccacaacgaagcaaatttgtgggcatgttccaaggaagctacagcccgagagatggcagttgcggcaagagactgttcgaggcgtctacagaagttgtcatcagaggaacgcaaacagattttgctagatattgctgatgctctggaagcaaatgaggatgcaattaggtctgaaaatgatgccgatgttgaggcagcacaagttgctggttatgaaaagtcgttggttgctaggatgaccctaaagccaggaaagataacaaatcttgcaagatccattcgtaaaactgctgacatggaggaccctatttcccatacattgaaaagaacagaggttgctaaagatctggtttttgagaaagcatattgcccattgggtgttcttctcattatttttgagtctcgtcctgatgcattggtccagattgcatctctagcgatccgaagtggtaatggtctccttttgaaaggagggaaagaagttatgagatcaaatgcaatattacacaaggtcataactggagttattcccgatactgttggcaaaaagctcataggccttgtgactagcaaagaggaaattgctgatctactagcgcttgatgatgtaattgatcttgtcattccgagaggtagtaagtctctagtttcccaaatcaaagcaacaactaagattccagttttaggtcatgctgatggtatctgccatgtttacattgacaaatcagccgacatggatatggcaaaacggatagtattggatgctaagattgattatccagcagcatgtaatgcaatggaaacactacttgttcataaagatcttaacaagagtgagggacttgatgatctattagtggaacttgaaaaggaaggagtagttatttatggtggacctgttgcacatgacaagttgaaagtaccaaaggtagactcatttcgtcatgagtatagctcaatggcatgcacagtcgaatttgttgatgatgtgcagtcagctatcgatcacataaatcgttatggaagtgcacacacagactgcatcatcacaactgatagaagtgctgcagaggcctttctgcagcaagttgatagtgccgctgtgtttcataatgcaagcacaaggttttgtgatgggacgcgttttgggctaggtgctgaggttggcataagtacagagcgcatacatgcccgcggacctgttggagttgatggacttctaactactcgctgcattttgcgcggtagtggacaagtggtgaatggtgacaagggagtggtttacacccacaaggatcttcctttgcaatgaggcaaataacctccgttgtggtcgtaacgaatggctggactccccttttaagtacccttttcttttattccatgctacaaagtttggtgtcgtaacaagcagaatgcctatttagtaggcattgatgtaatcagaccattttgtcgtggtgttccttgtcgtataaaacatccgagacatctgtattagaggcgcggtagctagttgatacgcgattgttctggatgaaatttggatctgttccaatgcaatgataatgcatgtgtgatgaggtcctaaaaaaaaaaaaaaaaaaaaaaaaaaaaaaaaaaaaaaaaaaaaaaaaaaaaaaatagaagaaagaaagctaacaaaaaaaaaaagaaaatataataacataatatgct

SEQ ID NO: 91164 - DNA, 1179 bp, Zea mays
  Clone ID: MRT4577_183141C.1
gtgcggcgcagttttttttttttttttttttttatgagccagcatgtagtctgatttcttggccagcaacacgaccatcttcctcgtacgactccccccctctaaatacgcaattgaatgatcgaacatgtatccgcggtcggaggcgaagcaggcccgacgcaaaggtcgacgcggcatccctaaatccaaggaaagattcccgcccggagaacagcgaactcgaccctaggatctccgcctcttaagaaactaggggctctgctcaatgcgtggccggcgagtccgtgccaccaccgtccgcagctgcgactggcagacctgcgccgggaacttgcacccgaaccgcttcgtcactatcgcgccccacctcccatccgccggcggcacagacggcgctcccctatccaccggtgccccgcctcgccgctcggtcttgtcgctcgctcaggcgcgcccaccgcctgctcacttccacgtcggggtccgcgattcccgcgcccgtcctgcacaggatcgccacgctgtacctcaagctcggcgcccgcggcgacgcgcggcgggtcctcgaggagcgtacaaggcggcgtccggcgagggaggacgacgcggcggtccaggccaagcggcgagaggcgtacactaaggtgcgggagctccacgcgcagatccgcgcggcagggtacgtgccggacacgcgctacgtgctccacgacatcgacgaggacgccaaggcccgcgcgctcatgtaccacagcgagcgcctggccatcgccttcgggctggtgagcacgccgcccgggacgccgctccgcgtcatgaagaacctccgcatctgcggcgactgccacaacgccgtcaagctcattgccaaggtcgccggccgcgagatcgtcgtcagggacaacaagcgcttccaccatttcaaggacggcgcctgctcctgcggagactactggtgaggaagccttcacagctagcacgcacaaaggttacattatccataaaatgtttgtaaattcgtaacacttgttagtggcgagagaaggatcaaagaattggttgagccaacttgtagaagcattggccagcaacatcaccgacttccaagtacgatttgtgcgctgcaactgcaaactgcaaatatgcaattgaatgatcgaacatggaaaaggacac

SEQ ID NO: 91165 - DNA, 433 bp, Zea mays
  unsure (1)..(433): unsure at all n locations
  Clone ID: MRT4577_183142C.1
ngattcggcacgaggctctctctctctctctctctctctctctctctctgtgtctctctctgtctgaggcgcggacgcagagccagacccagagccagaccccgagagcagaacagagcctacgcgagctccgtgtccctagacctgcccgagggcgcgcgcgagggagagggggggcgagaggacgggcgcgggggcgccgggggaggaggaggagacgaaggcggagcgcgtgggcgcgccggagaggggcggggtggggaagggggaccgctcccgcccgcgcaggggctcgctgggtgaggtccggagcggcagtgagacacggaggaggtggcgcgcacgctcacgttcccgcccctgggccgggagctcgcgcgggacctcgaaagggaccgggacttgcatctctacgtcgtcgccggcctcgagg

SEQ ID NO: 91166 - DNA, 373 bp, Zea mays
  Clone ID: MRT4577_183143C.1
cagtaccgtccggaatcccgggggagcgcacgcgtacggtgaagattaaaacctaattaaaaaatgatatttacaacaatatattaaataatggttataagggatagggggggggtgcaattaatatatacacttgaaccatcctttttttaaaaccaacaatggtattaaaatatgggggatgggggtataaaagtaaatttaataataggaagtttaggtttaatctgatcgttatgcgaaaactatataactataagaggggatatttattagtgatgataaagtattttgagtataatctgtcttttaacattcagtagaaaacaaattaaatttgttaattggagaaaataatgtgagatgcatacaa

SEQ ID NO: 91167 - DNA, 256 bp, Zea mays
  Clone ID: MRT4577_183144C.1
cccacgcgtccgaattcatcaagctcaacacgatttcaattcgattccagttcatccatccaacgcctcccgcctgtacgtatagaagaaagaaggaagaaccgtcaccgtacgtcctcgccagtacaggcgggaggcgttcgattccagttcatccatccaacgcctcccgcctgtacgtatagaagaaagaaggaagaaccgtcaccgtacgtcctcgccattatttgtactggcgctaagttctagatcgcga

SEQ ID NO: 91168 - DNA, 568 bp, Zea mays
  Clone ID: MRT4577_183145C.1
ctcgaatacgcaggagagttgtgtataattacatgaataagaaatatagaagggtatagaccctattacatagaggacacacacaattgtcacctgatacaaacaaacactaccacgaccaacacacgggaaaacactaagggcctaacccaccgacctgaagataggagagagctttagcatcagccatagaccagtacagaagctcctccttagccattctaacagcagaaataacactaggaagacacttatcaaacacacttatttatatgcaaacaaatatttcatacaataaagtaaacacattttgcaccagtaaaatgaaatcagctaaaaggtactataacattaacaagcatatggatcaccggcgcatatatttaaggaagtttaaaactgtagtgctgattatattaacttatgaaacatgtgtgttactgttcaagcagtctgctgcaccatatcaccaactaggaatgataaaagggaagtttctttttgcagttctttatagaacattttaatgatttatgactggcatgctgaggcatgctttgggatattt

SEQ ID NO: 91169 - DNA, 2217 bp, Zea mays
  Clone ID: MRT4577_183146C.1
atggaggagcatgttcttcaggtgaaacaagtgtttcagaaactaaaggatcatcagctgaaactgaaactgtcaaagtgtcggtttgcacagaccacccttgagttcttgggacacatcatcagtgcagaaggcattgccactgacccagaaaaggtgcaggttattcgagactggcccattcccaacaacgtcaaggaggtgaggagttttctcggcatggccgggtactaccgtcgatttgtcgctcactacggcataatcagcaaaccccttactagcttgctcaagaaggaccaaatttttgtgtggaatgatgaagctcagaaagcctttgaagctctgaaggcagcattggtgcaagcaccgttgatcactggcgcccttacctccaacatggagaatttttttatcaagactgatcagcaaagcctaacccatctagaagaccaaaagttgtcgactatctggcaacaaaaagccataaccaagctattgggtctccaattccgcattatatataagaaaggggtggaaaaccgtgtggcagatgctctttctagacggccaaacctatgcactgatggttccaaactgcaactcaacgtgttagcaacttcgacagtggtaccaagttggctcaccgaggtgactaacagctatgaggagaatgaggaagctaagagcattctgagtacgcttgctgcaggggatacaatagagccattcactttggtatcaggagtgatcaagcataaaggaaggatttggctgggtagcagtaaccaagtgcaattaaaggtgatgactgcccttcatgacagtcctataggaggtcattctgggttcccggtaacctatcatcgcatcaagaagctgttttactgggctggcatgaaaggacagatcaaggagttcgtgcagtcttgtgagatttgcacaaaggccaaggccgacagaaatagataccccggtctgctattgccattacccataccggatcaggcttggcaagttattagcttggattttatttctggattacctacatcccgacgcttcaactgcatattggtggtagtagataaattttcaaaatatgctcacttcctagccatgtcccatccttttactgctctatctgtggccaagctgttcctatcacaggtctacaaactccatggcctaccattgtctatcatctctgacagggatccaatattcaccagtaacttgtggcaggaattgtttaagttggtgggcacaaaattatgcctcagtagcgcatatcacccccaatccgatggccaaactgaatgggtcaaccaatgtgtggaagcttatcttcgatgctttgtccatggctgccctaaacagtggtccaattggctatctcttgcagagttttggtataatacttgttttcacactgcactgggtcagtccccgtttgaggttttgtatggccacactccatcccagttaggactgtcaactattgaacaatgtcaaagtgctgatctgcaaacatatctggcaacaagacaacttatgctccaacgggccaagttacatcttcaaagggctcaagatcggatgaaaaaacaagctgacaaaggaagatctgaaagggtgtttcaagtgggacaacgtgtatttttgaaactgcagccaatttgtcagagttcgatggggagcagattgaacactaaattgtcatttcgctattttggatcgtttctgatcacaaaacaggtgaatcccgtggcttataaactggcattaccagaaggaagtgcgattcatccggtctttcatgtgtcccaacttaaatcagccgaagaaactcgtatcacaaccgatgcaaccatgccagacctgctgcaggagctgaaaatacccacagaggtgctggagtctaggctgcttcgcaaaggtaacaaggtaatacctcaactcctaatccgatggtctaactggccggcttcattgtctacctgggaagatgaacacgccatcaagcagcagttcccacgggctccagcttggggacaagctgtctgtcaaggggaaggggatgttagcagcacagggcacctgaacaccgggaaggatgctgcgatggaagaggcggacgctgaggttcaggaagcaaagaggagcactcgggctaaaaggccgaatccaaagtatatagaaaatgtgtggatgaattag

SEQ ID NO: 91170 - DNA, 771 bp, Zea mays
  unsure (1)..(771): unsure at all n locations
  Clone ID: MRT4577_183147C.1
aattcggcacgagggcatacatgaatctgtggaatatggtgcacctgcttctgcaacaactcatactcagaatggatttggtgaatcaaaaggttgccatgtcaagtctgcactcgaaaatactcatgtgtcagaacctttttcccaccatgatactgaagaaaatatttccaaaattggtggttgcatgcatacatcccagcaagataatggaatggaagatgctatcgagaatcctttaattagtttatcaactcctagttgcaagcatgaaggtgctttgtctgaggaagcagtgcacacaatgaaggattatgctggaacatgctcatcaaatcccagggtacccatgcagttgcatgacgaccttgcattcccaggtcctgaaaaatcaggagatgaatcagtcaatgttgaggttaaagtacaccatggttctaagctgtctcagttaggatcaactgatctcttggatggtactgaattgcttcaccagggccataaccataaagatcgatccaatgaggatatgatagagcaggttgcttctgaaccctgcacaaatggggatgatatcgtggaggctgcggctgctaccaaatgcttagaaagtggagcgatgctggttccatccgaagagagatcaaatttgaatgataggcagcttacccccaagctggaaagcccagacatcantggaatctggcccttaactgtgataaagatgctcgcaatactntggaccatggatctgttgtggctgttgctggt

SEQ ID NO: 91171 - DNA, 436 bp, Zea mays
  Clone ID: MRT4577_183148C.1
tcatgtgatatgcacccaattacaatatacgcagactacgactgtaacgtacgtctaagactactagcttgatacgtgcacaccgtcatggcgacggccagtgccgcttaaagcttgctcgtcccagcgactgttatctgccggacaccctatgaatgcacatacacgaggtcccaagacacaaaatatatgctgcctgtcaggggcggcatcacattgccatgtaggccacagaagcctatggggctgacgaccaagacagacgattcctatggctgtccaggggagaagtgctgaccgttctgggcggcttggtcggcagctatgcccacatataccaatctggtttccatgaggactgtaagccaacacagaggagagctgccgactacgcgagaaagggactgaaaagctggtagagagctcggaccccaac

SEQ ID NO: 91172 - DNA, 153 bp, Zea mays
  Clone ID: MRT4577_183149C.1
cgcttcccggtttagacgcgccaccatccggcttggaccgttgcagatttggcaggtgactggcccgttagtgatatgggggagccagacttacgactattattctctctttttaatactattataaatgaacagaagtttataaaaaatatt

SEQ ID NO: 91173 - DNA, 410 bp, Zea mays
  Clone ID: MRT4577_18314C.1
gtgtcgacggacgcctctaaagtgcatcgcatcagtgatccaccatgactcagtcaccagtgggcacgattacaactaattcgtggctcatcgtattagctgtggcgtccgcgatcgttgcagcgtcggctgccgacgccaatacaccgagcagagcgttcagcacctgattaccgatcaaccatgagtgctcaacactagtaccacagaagtccgtctcagatcgtaggtaggagccccttcactacagactgtctcgaagcgcaacatcgagagtcacatgattgatgaagtccacaagcacagggtaatagaccaatatctctgccgcgctaaaggatatcccggtaagcaacaccaatcgcctgatgttgcatttcaagacctgaacttacttacgctaaaaggta

SEQ ID NO: 91174 - DNA, 335 bp, Zea mays
  Clone ID: MRT4577_183150C.1
ggcatggatactggtcgtagccaagctgatgctcaggctctggcctgtgcctctggtggcaaagctgtgagcagcgcatggatcatcgactctatagcggcttgcaaccttcgaccttccatgctaccctagatgtgtacttgcattgcatgcacggtaggtttgactaatggacagaaaaatagtgtaaggccctgtttcaaatcaaaaaaaaaaaaaaaaaaaaaaaaaaaaaaaaaaaaaagggaagggtgtgtggaggggtgtagcggtggttgagaaaaaataacaaaaaggggggccccccgcctgggggccctgcctacccgggaatt

SEQ ID NO: 91175 - DNA, 513 bp, Zea mays
  Clone ID: MRT4577_183151C.1
gtccatcgattaattccaatgggcgtgggttcttggttcattattactacacaggacacagcatcgccgcagcttatgtttacagtgtgtttcatcctccacacaagctccatagttctggaccgcaagaaacagttcaccaaggcatggcactccttcttcatggggggaaccctaggctctgaggatggaaggggcgttcaagaccgactacagggcaccatatgggggcctgcttattgcggcccactacaacagcggggggagagaagccggcgagccagcatgatcccctgccggaaggggtgcacttcgtggttaggctaaacgggtattaaaagcctgggggatacggggctccccggagtcggacccgccagtgagggcggctagtaccccttgcacgaactccttgaacattgggatgtgcagcgtgaccttcaagatgaggagcgttatccacttcaaggcgcagacctggaacacatcgacgggcttgatgtcgggggtttt

SEQ ID NO: 91176 - DNA, 1542 bp, Zea mays
  Clone ID: MRT4577_183152C.1
aaaaaccccgccggcgcctgccggcagtggcactcgcttctccccgaaaaacggctgaaccctaaaccctccctagctcccgccgcctgcttcacagttcaccccggccatggtctccaccgctcgcgccgccctcccgacgccccacctctctctcgcttcctcctcccgccgcaggccccatctgtttttcacgccctcctccgcacctcgcctgcgcggcggcgctgccacctccatcgccgccggcagctccgcctcgccgcagcagcaccaggtcaccacgcgcctgggcgacgtgatcgaggcgcagcagttcgaccgggacgcgctgaacgagatcttcgaggtggcgcgggagatggaggccgtggagaggggttcccacggcgcccccagccgcgtcctcgaggggtacctcatggccacgcttttctacgagccctccacgcgcacgcgcctctccttcgaggctgctatgcggaggctcggcggggaggtcctcaccaccgagaatgcgcgcgagttctcttccgccgccaagggggagacactcgaagataccataagaaccgttgagggttattccgatattattgtactgagacattttgaaagtggagctgcaaggaaagcagcagatactgcaaatattcctgttattaatgcaggtgatggaccagggcaacatccaacccaggctttgttggatgtgtacacaataaagagagaaattggcacactagatggaattaaacttggtttggttggtgaccttgctaatgggaggacagttcgttctctggcttacttgattgctaagtaccagaacattaagatatactttgtatctcctgatgttgttaaaatgaaggatgatatcaagaactacttaaattccaaaggtgttgaatgggaagaaagttcagatttgttggaggtggcatccaagtgtgatgttatttatcaaacacgtattcaaaaagaaagatttggtgagaggattgacctttatgaagctgctcgtggcaagtacatcgtggataaaaaggtcttagatgtgctgccaaaacatgctgtcatcatgcatccccttccaaggcttgatgagatcacagtagaagttgatagtgatccaagagctgcatattttaggcaggctaagaatggcctctacataaggatggcattgctcaaacttctgcttgttggtcactgacatttcggctagtgctttagcttgtgctgcgtcaagggattagaaggtattattcttaatataatgatcgaggctgtcttacccacgcaggtcgagtttttagaaacatgtactaataatcagcagcttgtgtcaaaattcaatgttcgctgttgcaggtaataaaagtctgcatccatgcgaatgtgcagcgatgtttggcagagtttggtgttctcatgtgctgtgagaacatggaacataattaattttgcctgcacaaaaaaaaaaaaaaaaaaaaaaactaaaaaaaaaaagaaaaaaaaaaaaaaaaaaggccccta

SEQ ID NO: 91177 - DNA, 367 bp, Zea mays
  Clone ID: MRT4577_183153C.1
tttataagccagggacagctgcatccaccgggttggttttaacagcactatcatacacaagcacaagcactcacacaacactgcatacgctcgacaaccacgccgcatttatgggctcttcacgccagagcatacaaacggacgcgtacacaacacgctaggggcgctaatgcgcggtcagacacacacgcgttgcatcactacaagggactacaatgccaaagggaccctacacggggaaaaaaggtaccaaaacttgcactggcacgtcacggttaacaggagatcagactgcttcatcaggccaacgacactggacatgaacagggagccaagagtaagtcaaatccctatgagcttctgaccc

SEQ ID NO: 91178 - DNA, 303 bp, Zea mays
  Clone ID: MRT4577_183154C.1
atcccaacccttcatttcttttcattgctccaaaacccagttttcaactaatggttttctcattaaactaaatgtttagaaaagttgtttagagtttttctttttcttttatatagtcctcctgatccagtataagactatttagtaacgtgcatttgtatggtgatatctaaagtaagttagattgatgtaagagatcgggtagctgcggaacaaaattagttatatcctaattaggtacagtgaatgacacaaaatcattttagcaatgcttcttaaccttttggggtcacaggcgttttg

SEQ ID NO: 91179 - DNA, 297 bp, Zea mays
  Clone ID: MRT4577_183155C.1
acatgatgaagcttatcacgctcctcgtcagcactgagaccagactcgagcacccttgttctgtaagcgagacatactggcgcgtgttattttgcggatttgagttttttggcgacgttcttaccttggctctgcagatttacttttggtgcctgttctaagtgcaaacccagcaagtttcacttgtactgtccattagatgcaactacatcttgcggtggtgtttctttcttgtccacaatgaattgacatccattccatagagctgatagcctgtaataacactggctaacacac

SEQ ID NO: 91180 - DNA, 1631 bp, Zea mays
  Clone ID: MRT4577_183156C.1
atcaaaaagtagggcacgagaaaaaatcctttttagacaaacaaacaactggcaacagaaatgctgaagtcatacaagtgcaactaactacataggtctgctgagcagtacatggcctaatacatgaacaattcagataacgggggaactacagatcatacagtcagctgcgtgagctagttatatagctcatctatcaaacaagatacagttcaatgtgcatcttatatcaaggtacatccagtcctcgccttcatgtttgtcactgtaggaatgctgttctaccattatgttgtcggagcaaaagacgcactagatagacaacagcagaaccgcaaaaatgtctttggttgtttcagaggaatgtttaggcaaagatctcgtcggataaactgtccatgccttctatctccttttgaccggagttctcgatctcgaccgcctcttcctgccagccgatgaataaggcgaatgcctgcggtgagaatgcttgctatgtggagaccgcgaaattcgtctgtttctagattttgggggtgaaggtgacatgctggttttatgggaataatgctttctctttttcacactatcagaaggctcatcacttgaaacactccctcgaacatgtgagttctcctttctagtacgacttctcccccttgtacctgccagccgatgaataaggcgaatgcctgcggtgagaatgcttgctatgtggagaccgcgaaattcgtctgtttctagattttgggggtgaaggtgacatgctggttttatgggaataatgctttctctttttcacactatcagaaggctcatcacttgaaacactccctcgaacatgtgagttctcctttctagtacgacttctcccccttggtgatcgtgaccgtgaacttctgctgttatgacttgtcatctgccttaacctgtcgtccttttcatcctttcctttcccccttctatcatctctatttctctctctatccttcgaaaaatccttccaatctccctttgcaccatcaagcttagagttacctctggaatgtggctcccttgtatcggattcatgctttgcagccctaccagaaccttttccctccttgcagctatcccttttgtcaatatttccatacatgctgtatttgtcatcgttattatatttttctgctctagaatattcgagttcttttgtatgatcagccttcacctcattaacaaagtcctctttgctgctcttttctgaatgtctgtgactgctttccaaatcattgtgcttttcagcattattgccaaaagaggtttttctgttctggatatctacctctgcatacgtatgtgccttctcatccattctgtcaaatgcaccctttggctcagtacgagttttggccttggaacggaactccccattctctgtatcacgaatatgcatttgttatgaggtaccaactgatgatggcttcaaggagaaaagggcttcgaggatggcaagaattctacgagtatgaataattgctgagctgatgctactgtgtagctcattattgataccattgttttttccaggtatgataatcttcatggaatcctttaaatttgaatgtgatccattcttagaaatgcaaggg

SEQ ID NO: 91181 - DNA, 650 bp, Zea mays
  Clone ID: MRT4577_183157C.1
ccccccctcgagttttttaaattctttttttttttttttttttttttttttttttttttttttttttttttttttttcccccttggaaattttttgcttcttcccccgtttgttgggatgggggaggtttccaacaaaaaaatttcaaaggttttacccccgccaccgttttaaaatacaacagcattcgagttaagctgatgggaatccttgcccaaagggtttaattcccgcttcgggggggcacccccaaggggggccatgaaaattaacatttcctgccccccttgaaaaaacctgaaaaatgggacaaattttcagggttcctgacccagggaaaaaaatttggggggcagtttgtttcaccaagttgaaaaacctaaggatgtttgtagggccccaattccaatcagaaaccgggatcccaaggtttccaggaattttatttaatcctaaggggcaaagggtcccttcccagcccccagggcctttgaaaaacccctttgaaaattttttgttttaagggagtgggagagggatctaaggttttcctttggacggatcacacaaataaaccctgcaaaaaagtttttcttggaagtaaccctaaaattccatggagggggccaggtttattcagctttccaagg

SEQ ID NO: 91182 - DNA, 119 bp, Zea mays
  Clone ID: MRT4577_183158C.1
ttttcgaggcaaaagcatagcgaccacagacggggcgcgcttcatggccttattattctgacattaactaagaggtgaggaggatactgctgtcacgatcacttgggagaaggcgaggc

SEQ ID NO: 91183 - DNA, 1024 bp, Zea mays
  unsure (1)..(1024): unsure at all n locations
  Clone ID: MRT4577_183159C.1
atctcgtgggacgcatccccgccgccgagcggcngcggcaaggcccgcaaagcagcatcgacagctccggcgccgccgccaccaccgtgacaatcacaagcctcgcgccgagctgcaccgtcaccagccggagcgccaagaccagcgtcagcagcagcgcggccagcgacggcagcggctggagcaacggcaccggcgccggcggcagcgcagggaagccgcacaagggcggagatccaggtggaaggccatcctcgcggcgcgcgcgcgcgacgggcccctcgcgatgggccccctccggctgctgcggaggctcgggtgcggcgacatcgggacggtgtacctgaacaaaatgagcggcggaggcgctggcaacggcggcgcggcgaggccctgctggttcgcgatgaaggtcatggacaaggcgtcgctggagagccggcggaagctgagtcgcgcgcagacggagcgggagatcctgcagctgctggaccacccgttccttcccactctgtacgcgcacttcgagaccgaccgcttcgcctgccttgtcatggagttctgccccggcggcgacctccacgcgctccggcagcgacagcccggcaagcacttcccagagcacgccgcaaggttttacgccgcagaagtgctccttgcgctggagtacctgcatatgcttggagtggtctacagagatctgaagccggagaacgtgctcgtgagagaagatggccacatcatgatctccgacttcgacctctcccttcgttgcgcggtgtcgccgacgctggtgagatcttccctgaactccgacgccaggaacgcgcaggctgcatgcatccagcccacatgcttcatgcccaagctcttcggccagaggagcaagaagagcagcggcgccaagaaatccaaatccaagggcggcgagcccaggcagcagcaggctcccacgggcctgccggagctcgtcgtggagccgacgggggcgcggtccatgtcgttcgtggggacgcacgagtac

SEQ ID NO: 91184 - DNA, 398 bp, Zea mays
  Clone ID: MRT4577_18315C.1
agctatgcttgtacgtcttggatctgaggcctcgctcaaggaacgaaccaagtctggagttttctggtgattggataaaactttggcagctgcaagtctaataatctgaagctatggacacacaaatgtctgagagaaggtctatttacgcggagaacacgtttgatgcagctagagaaatactctatcaagtggagtatggatataagcatgcaaatgtgttctattttgatggctgggatggaattggtgcatctgctgctctcaaggaagcagcaaaacgcctaaaatcttcagcatcaaagtttgacagcgttctccatttggattgctcattatggaaaagtaggagggccctacagaaggctatcgccgaggagataaagctcccccattca

SEQ ID NO: 91185 - DNA, 278 bp, Zea mays
  Clone ID: MRT4577_183160C.1
gaaccacacccacagggggaaacaacagataggcacattgtccactgggcatatagaggtgcaccaaaacatctttcacatgctatgcagccacagatacactagatatcctcatacgagctatatctgatgggaacgctgagcaccctggagcatgctgccaccttcgactctacaattcctcatccagggagcatatgaagctgtctattatgtacaaagcaacaagttgtgtccattgaggagcacaccagcacttattcattgcaatggctatt

SEQ ID NO: 91186 - DNA, 447 bp, Zea mays
  Clone ID: MRT4577_183161C.1
ggccatgctcgacgagccactatgggtgggacgccctttgcatacctgattggcacgggctctaatatgataaagaacagctatgctagaggcatctagccaagcacttgatatacatataaaactggtgtgacaccatgaggcaataaacaatattcggcacaacaagctaaacaatgaccgtacaggacgcgaggcacatcactgggtgtctcagagaattctaccagggaagagatcgaacaggaatacaataactatcgttgaaaagaacggcaatatgggagctttgaccttcaatcggagggtcaccgggccaacgagtgcctagaaacagcgtgccacaagaacactcaagatgagcctcctaactgacataccggcccttgagtctgatcgagacattcttttccccctcataagataactgcgcataccaacatcgga

SEQ ID NO: 91187 - DNA, 376 bp, Zea mays
  Clone ID: MRT4577_183162C.1
gacccacgcgttactgtttggagttgcaaaacatgcactatgaaggagacggttgcaagattgcccgactctccttcgcatctgattgagcgagtgaggaagatagcgctcgtctcaacaattgtgatactcgggaccggtaataatatatggcggcctttgttacctgaccaaagaatcatatcatcagtagtgtctgatgacggacataaaccaccctgcctttgatacaactgggtacaacagcgagattatttcttagacatgcaaaggattcttgggttatattgcaacacatattgggcgagcgctaccctggtgtgatgctaataaccagttggcaattgggccggggtgtaggatataaaaaagcact

SEQ ID NO: 91188 - DNA, 738 bp, Zea mays
  Clone ID: MRT4577_183163C.1
cgctcgagggccggcgggccgggctctcgcgccccagaagccccgacgctcaagcccccagacgccgcagcgccgccactccacccgcagcggcaaccatggcggtcggcaagaacaagcgcatctccaaggggaggaagggtagcaagaagaaggccgtcgatccgttcaccaagaagcagtggtatgacatcaaggcgccgctgctgttcaccagccgcaacgtcggcaagaccctcgtgtccaggacacagggtaccaagattgcctcagagggtctgaagcacagggtgttcgaagtatctctagctgatcttcagaacgatgaggaccaggcctacaggaagatcagactccgtgctgaggatgtgcaagggatgaatgtcctcacaaacttctggggcatggacttcaccactgacaagctcaggtctcttgtgaggaagtggcagacactcattgaggctcatgtggatgtgaagaccactgacaactacatgctccgcatgttcgccattggcttcaccaagagacgcccaaaccaggtgaagcgcacttgctatgcccaagcaagtcagatcagacagatccgccgcaagatggttgagatcatggtcaaccaagctgcaagctgtgacttgaaggagcttgtgaacaagttcatccctgaggtgatcggaaaggagattgagaaggctacctcaagcatcttccccctccagaacgtgtacgtccgca

SEQ ID NO: 91189 - DNA, 602 bp, Zea mays
  Clone ID: MRT4577_183164C.1
ggagtgccgctgccgaggcgaagggtgggtctggacctggtcctggacgcccgagcggtggttcagcccagaatggcacatcggctaaaggaagagtgcctgttctgatcaacggctcttacgcgaacgcgaattccgcggatgccggagatggcaacggaatgagagcgagtgcaaggaatgctgccggctccacgcaccaattgagaagcggaactgcagctttaggcaataccgttgctgtttcatcccttaatcagactgcgagtgcagttgcagtagcggccagggaaggaaatggaactgcaactgcaggcaataaccagaccttcctgattcaggctcctgcggataacaagaaccacagttcagttgcttcagatggaagcaatagcagtccaaccaataagcagaatgaatcgcctgctagtcctcaggggagcactagcacggtgaaagatcaatctgcacgagggcccaccccagcagccattgtgccggtgaaagcagatgctaatgccggtcggcgcatgaaggctgattggactgagaacatggccggctgcgacttgttctacgggaattgggttcgagatgactcg

SEQ ID NO: 91190 - DNA, 459 bp, Zea mays
  unsure (1)..(459): unsure at all n locations
  Clone ID: MRT4577_183165C.1
ggcgcgcctgggaggaacgccgggcccctgcctttgccctgccatgctccgtttcctgcaggcgctcgccagcaggcagtctacaggcctgcaggtacgcacgcccgcactncgtaccgacccccgncgcggcgatgccctgagacatgcccggatctcaacgatcggctcgcgatgcacggtgcatgcagcgttgagagcgccacaccaggaggacccgccggccacataccacgataacagcgaccgaggccggagaagagacacccgcccagggcctgaatgaaaaggctggggagcatccaaacgggcctacgagactacgagggctgtgttcgcgaccacgctggcaactaccccggacaccaagaccaataccagtaagaacgccagtgtcactaccgtgactacaactagtagcaacagggggtactccattgccgactcggacaaggctgc

SEQ ID NO: 91191 - DNA, 1016 bp, Zea mays
  Clone ID: MRT4577_183166C.1
ggccggccggggtcagccagaatcctgaagcgactattgtccctttcaattcccctcccctacctgaggccctgaagcctgggtagccgatccatccgaaattccgaaacccctgcggcatgggaatggaaatcgagaggccgccgcagccaccgcctgtcgctgctgccatggctgcggcggcagccatttccacggtgctcggcgacgacgaccttctgcgcgagatcctcgtacgcctcggcctccccaccagtctcctccgtgccgctctcgtctgccggcgctggctccgccacgcctccgatccggccttcctccgccgattccgtgacctcaacccgccccgtctcctcggcgtctacctctccacctcgtccggccccgccccgcgcctgcggttcctcccgattcgtccggtcccggagctcgccgccgccgcccgccgcgccggctccttcttcaacgccttcaagggatcctcggccgctgtctacgacagccgcggtggccgcctcctcgtcaccaccttcgatgaccgccacgactccacgcaccaggtctgccgcccgctgtctccgggcggggacaccaccgtggttccgccgcccccgccgccgccgccgatccagctcaacaacgacgaggagtgcctcatctaccactacggtgaattccttcgcgatgatggcgacggccgctcctacttctgcgtggtgatggggtttagtgagctgcagaccaccgtgtacttgtacgagttgcacaacatcaactgggttgtcaaagcctcggcggccgtgttgctcgctttattgccaccgaaaccaagggttatgctcttcgatagcgccaacttctacatgttgtccgcaaccaacaggattcttgtgtgtgattttccatcctcaagtatctcagtcatggagctccccaatggggtggagaacaagcccggtggttgcatcatgctttccaggggagatagttctggaatctttctgatctatgtcaaa

SEQ ID NO: 91192 - DNA, 1088 bp, Zea mays
  Clone ID: MRT4577_183167C.1
gtcagaccaagcggcacgcacaagcgcacagccacggtgagcagagaagaaacgcatccacagaagggacaaacgtccggagcggattccacattccagtctcggtctcggtccatgggcgcgggaaagggaggagacggcggcgaggcggcgcccgaggccgcgcagcccgtcgtgctgaagatgaaactgcattgcgccggctgcgcgcacaaggtcaagaaggccatcaagcgcgttcccggtgtggactccatagtcacagacgtcgcggcgaacacggtcgtcgtggtggggacggccgacgcgggcgcgctcaaggcgcggctcgaggccaagaccaacaagcccgtggagatcgtctccgccggcggcgcccccaagaagcctcccgccgcggagcccaagcaggacgccggcgccggcgtcggtgagaagaagggggtcaaaagcgcgagccccaacgaggaggagaaagagaaggggaagaagcaacaggcggaggagaaagagagagagaaagagaaggggaagaagcagcaggtggagtcggtgctgctcaagatccgcctgcactgcgacggctgcgcctaccgcatcaggcaacgcatcggcaagatcaaaggcgtcaaggatgtggtgctggaggccaatgccaaggacgaggtggaggtcacgggcaccatggacataccgaacatggtctcctacctcaaggagaagctcaaccgcgacgtggaggccgttgcgctgcccgtaaggaaagacggcggcggcggcggcagcgagggcgagggtgagggcaaggacgacaagaagcacagcggcggcggcaaggacaaggtcgtggccggggcagccggcgacgacaggatggacaagggcaaagggatcgaggcgtcggcggccggtccgtcaacggcggccgccgcagcgtacatgtctgcgccggcgggggcgagcacgtaccacgtggctccgccgcacgggtacgttgcgtatgagcaggccccgcctcccgctagctactatccctacccgtactacggctacggcagtggcgatggcatgggcccgccgacagcacg

SEQ ID NO: 91193 - DNA, 551 bp, Zea mays
  Clone ID: MRT4577_183168C.1
acgcctgcatgtaccgggcccctattacacggtcgacctactcgttcgacttcatgcaaggagatgcccgatcaaacagttattatcaaaggctctggatttgtcgtttctctcaactcacgaggaagcgtatatacctatacctgacttgagtgccaccatgaatatatgaaaaaaccatctgtatgtgtgcatgttgccacaacgacctataagatacataactcgatgtgccaaccgcagatatctgatatcgctctgatgttacaataacacgcactctagtcccgatcctgccaatggactccttctatcggctccgttagcaacttctgctgatgggacaaccatccacctgctatatataccccctcagccaccttttgcttgacagcatcaacgttactcaaggcatgaggagctgctggtcctgatatctcaacaaatgcatttccagacctcaacacctacaggggcaacacggtgcacacccaggtattatacgtggagctcgagcccagggtcatgatcctgagccaccatttcagcaa

SEQ ID NO: 91194 - DNA, 170 bp, Zea mays
  Clone ID: MRT4577_183169C.1
gctgatcgggctcatgttcgtctactgcagggccgacatcccggaggacgacgttaatctgctccggatgatgctcaacataggcagtcgccatacggggctctactacaactgagtactgaatgacatactctgctcaatacgcaagagacatggcagacagatctaca

SEQ ID NO: 91195 - DNA, 1917 bp, Zea mays
  Clone ID: MRT4577_18316C.1
attgggtacctcgattctcctcccgaacaccctactcgttctcccccatcggcgccgctacgaccagcgtttgagccactcgccgccgcgcacgatcctccacgccttgctccagtcctcgtcggcacgcctccttcccaaccctaaccctagcactagcagtcagtcgagcggcggcaagtcaagggtctgtcgagcgggccggcggcgaagaagtgtctagcgaggcgagtcaggtgcagggggacccacccgcagcggtggcgtgaagcgcgtttgactggatcgaccaggttggcggctaaacagaggaggttgcttgtttgttttctccgtccggctgcggttttcctttgactggatcgatcagatttgccggcggcggcagcggtcccccggcaaaggcgtggggatccctgccgggatggaggtgccgtggctgctgctggtgcacgggtcagtgacggcgctggtggtggtgtcgttcctctgcgggcaatggcccatcttcgagggcaccttcatccagagcatcaaccacttcctcacctttggggcctaccactacctcctgcggtttgtgcagtctgtgtgcggcactggggctagggatctcgtcctcggtgtcgagggatactgctgcgaccgacccaacccgatattgcaggtattttatgttgccataattggagtgacatattttataatagtgcagacatctttccagtatattcctgggtattatgtgagtggactgcacagatatctgagtgttgtggctgtttctgttggtgctatactcttcgtgcttactagcttttctgatcctgggactgttactgctgaaaatgtttctcaatacgtatcttcctacccatatgacaacattatttttgtggagaaagaatgttcaacttgcaagattactaggccagccagggcaaagcactgtagaatatgtgacaagtgtgttgctcgattcgatcaccattgtggatggatgaataattgcattggggagaaaaatattcggtattttgtggcctttttagtttggcatttccttatatgtctgtacggggctttaatccttggcttcattcttgctggtgaaataaaagagcggaaaattatatacattctgacagtttattatggcatcgataattcattctcgggcttgtttccacatgttgcacagtggttgcttgctgtgcataacactcagatactcttgagtgtatttttggctatattagcactgctccttggtggcttttgtgcttaccatgcacatctttgtttgacaaatacaacaaccaacgagacattcaaatggcaagactacatcatctggatgaaaaaggaaaatgaagcaaaggcggacgctgccacgctcagatccagcataggctcggccaatagtgatgcacagaaagctcctccaagcaaatggaggacgttcttcatgagatcccgcacaccaagcatggaaccagttgtgagaaacaacatatatgacagaggcatgattacaaacctgtgcgaggtggtcgtccctttatcagaacggaaggcattttcccgcatgaaatcagattgatgtcttttgttgcagttgctttgtcaccaaactgttgttgtatatcagtgtagaatttgcgacacatttttttggtcataccatagaggcatagggaaaaatattcagggtaatcgtgttcagtacctacgtcctatttattataggtgaaaggttttgaagttgcatttgcctttgcctttgcaatacgccgatgtcaatattctgtttttagaacatgattatgaaaatgtacgaaatatgaaactcatactatatgccttcgagtaattatctggccttaaaataaatttctagaagattgagttatattt

SEQ ID NO: 91196 - DNA, 343 bp, Zea mays
  Clone ID: MRT4577_183170C.1
aaaaaaaaaaaaaaaaaaaaaaaataaataaaaaaaaaaaaaaaaaaaaaaaaaaaaaagggaaaaaaaaaaaaaaaaaaaaaaaaaaaaaaaaaaaaaaaaaaaaaaaaaaaggggcggccgccctttttttttttttttaaaccaaccatgcttaacgctttaaataaaaaccgtccagccgtttatacccaaactccgccgtccccggttttgttgccaattaacaactaaatcggacttaatgcggttaatctgtttaaaccccggcttgagaatttttaaaaacacccaacctatggggggcgttactactattaacaacatgaccccccgttttttt

SEQ ID NO: 91197 - DNA, 2068 bp, Zea mays
  Clone ID: MRT4577_183171C.1
ctcgcccgccccctcccccccccccgccctccccccccccccccccccccgtgcccgccctcccccttccccgctccgcgcactaaagatgcctccagccttcgccgccgcaccttcctcctcgatgtaagcgtctgagcgccgaaccactggccctcaaagcccttgtcacttctgtactgctggtgcttgtaaaatatgtgtatatatatttcagatgtggcgttcgcatcccaactgtgcgtcgtttcgaagcgcaaaggacggtttcaacgccaaggtacgtgcgtaatccgctggcaggttacgcactgctccgggcgcagcaatacaccacactacaacaatttcctacggtgaatagttgatagtgcagctctcaagtttcagttagtttaattactggatagtggatatagaaccacaatcttcagctaacagttgggccaaagacatgagtgctgtttttcgattctcgcattttagaatgatatctggaagacggaattagatcagtcagtttcattgccactataccaccacacctttaccttttaaataaaatcgcgccatatgtggaatgttttctacacttccatacgtgcagaaaagaaacttaagaaagtaataggtcaaagcctgtagactctatagctaaaagtaagatcttcagaaccagatggagaagagaagaaacagctcattgggatggcacgagcaacctcagaccatgccttcaatgcaacgatttgggatgtccttgttgatccttcataccacagtcagggtcttggtaaagcactcatggagaaagtaattcgtactttgctccagcgagacatcaacaacattacactgtttgcggataacaaagttatagatttctacaagaacctggggttcgaagttgatcctcaaggcatcaagggcatgttctggtaccccagattttagcaccagcagccagatatatcgttcgaggggttgttgtacttgaagcatctccccgttctgaaagggtaattgcaggtcagggctccacgccctgatggatctcgcacttaatatttcacccttggtgagaagctgtaattttcttcaatgctaaaacgaccatgtgatcggctcaactctccgcacccctgttgtaaccataaccccaacaaaacacgctatttgtgatacccgtgtttcatacatgcgctctggactcttgccatctgtatgtaacgtacgttttcaaatttctacattccaaaaataaaaaaaaaataaagccatcagttcaccattgtttaatcatcacaggctcttctgtggtcatatgcattagttgaggcacaggtcctaatctgaaggttatttgcagaaattcatttttctagatgatgaacatcttaggtacttgtagaagttatttgacagagggagaagagaagaaacagctcattgggatggcacgagcaacctcagaccatgccttcaatgcaacgatttgggatgtccttgttgatccttcataccagggtcagggtcttggtaaagcgctcatggagaaagtaattcgtactttgctccagagagacatcaacaacattacactgtttgcggataacaaagttatagatttctacaagaacctggggttcgaagttgatcctcaaggcatcaagggcatgttctggtaccccagattttagcaccagcagccagatatatcgttcgaggggttgttgtacttgaagcatctccccgttctgaaagggtaattgcaggtcagattgacaggtcaggggctccacgccctgatggatctcgcacttaatatttcatccttggtgagaagctgtaattttcttcaatgctaaagcgaccatgtgatcggctcaactcgccgcacccctgttgtaaccataaccccaacaaaacacgctatttgtaatacccttgtttcatacatgcgctctggactcttgccatctgtatgtaacgtacattttcaaatttctacactcgaaatggaaaaaaaaaactgtatccatcagttatccatatgcgcacaccatcg

SEQ ID NO: 91198 - DNA, 698 bp, Zea mays
  Clone ID: MRT4577_183172C.1
gataaacaaaatgttcctttactttgaatcagcattaacggtaaacatagaaaccaacaaccagagaaatgaaaacaaagaaaagttaacaagataacagcaaaagaaacagaataacagacgcaaatctaaggggttgaagttctgtctatttgacctttgggttgtaacatgaacaaaaatataccacctgcaactgaaacattcagagattcaaaagtaccttccattggaatgtttacaagctcacatgcctggagggtctctgcagagagaccattgccctcacttcctaacactaagcacagagactcattcaacagtgaatcagctagttcgttggacagcgagtaggtttctttggatgcatcacttttttttttttttttttttttttttttttttaacatgaacaaaaatatcccccctgcaactgaaacattcagagattcaaaaggcccttccattggaatgtttccaagcccacatccctggagggtccttgaaaaaggacactggccctaacttcctaacactaagcccagggcctcatttaacatggaatcaattggttcgtgggaccacaagtgggtttttttggttgcacccaatgctttattgttaattctcggtttttttttgaaccgggacaaaaattttcctcttgggactgaaacattggaggtttcaaaggggcc

SEQ ID NO: 91199 - DNA, 880 bp, Zea mays
  Clone ID: MRT4577_183173C.1
cgaggccggccggatgactcacacttgtcactcaccccgcgccgctccactccactccagccaggcgccagcgctcacccacccatggcgtccgaggccgcgccgcgggtcgtcgtggacgagtgccggggcgtgctgttcgtgtacagcgacggcacggtggtgcggcgcgcgcagccggggttcgcgacaccggtgcgggacgacggcacggtcgactggaaggacgtgacgttcgacgaggcccgcgggctggcgctccgcctctacctcccccgggaccgcggggccggggccgggcggcgcctgccggtcttcttctactaccacggcggcggcttctgcatcgggtcccgcgcctggcccaactgccagaactactgcctgcgcctggcctccgacctgggcgcgctcgtggtggcgccggactaccgcctcgcgcccgagcaccgcctccccgccgccatcgacgacggcgcggcggcggtcctgtggctggcgaggcagggcggcggggacccctgggtcgccgaggccgccgacctcggccgcgtcttcgtgtcgggcgactcggccggcggcaccatcgcgcaccacctcgccgtgcgcttcggcggctcgcccgcggacctggcccccgtcgccgtgcggggatacgtccagctcatgccattcttcggcggcgtggcgcgcacgcggtcggaggccgagtgccccgccgacgccttcctcgaccgtcccctcaacgaccgctactggcgcctgtcgctgccggagggcgccacgcccgaccaccccgtggccaacccgttcggccccggcgcgccgccgctggacgccgtcgagttcgcgcccaccctggtcgtcgtcggcggccctc

SEQ ID NO: 91200 - DNA, 574 bp, Zea mays
  Clone ID: MRT4577_183174C.1
ccggccgggagataacctcctcacgattccactgaaccactctgacaccactcttcttaccacacacagcacattcgcaagtttatcatcggaaaaatgtacgtctgccgatactgccgccgatatctctgccttggtgcccaacctccttagaccgatgcaaacgaggatcgagtccgtccgtgacaccatcacgacgaagatagaccacacggctgccgacatcgataacgacgacgagaacatcaactacatctcaagtgacacggtgactgcgatgcaggcctgcaacctggttgatgctaacgctggtgactctgccttgctcgcgtgaaacccaccacatctctgtgtgaacgatttgataataggattgagaacttcatgaacacgtactacctgctctactactaaccacagacagtgtatcccgacacaaacccgtcacatcctcgatgaatacatgtgtgaggtctccaaacatcaccgcatgtccatagatctgctgcactcctgcagacactaattgatccatgtgctatacaagctatatgtactctactccatttgaagt

SEQ ID NO: 91201 - DNA, 298 bp, Zea mays
  Clone ID: MRT4577_183175C.1
tttttcgtaccaggtggccatggactgcgctgagatggatcagaatcaggaggacatacggttactgatgccggtgcaattttgcatgctgcccgagttctcattggacccggtgcccccatactactcgtactccaacgctggcgcggggatgccgattcttgctatggcagcaagaataggtggcggcgcacgggggatgtaactcaaacggatccgcctgatgggaaagccgatggccagcccccagcccatgagcttctaccagcagatgggcacggggactgcttgagctggc

SEQ ID NO: 91202 - DNA, 228 bp, Zea mays
  Clone ID: MRT4577_183176C.1
cttcacccattagtgaattcacctcccccacacccccctccggggggcatcttacaaacaagaagggggctacaatgaaccctcaatgttcagatctggccgtgaagaaagaaacccttcgcgggccaaacgggcccaaccgggggagacgaatcaataggcagcctcggcattctctgctggtgccaggctgttggcaccaccatccatgaaaccctttttaaagag

SEQ ID NO: 91203 - DNA, 227 bp, Zea mays
  Clone ID: MRT4577_183177C.1
gctctctgctgcggccggatccaggctcgggcttctcccctccctggcgtacctttggaccgcggcagcaactcggctggcggacgcttgctgcccaacctgaccattggtttttccgattctttgtttgtttgtaaccgttacgctcaccaccaccttcgcctcctgcacaccgcgccagccaaaccactcccacccgtgaataaacctcgcaaattgccgaactg

SEQ ID NO: 91204 - DNA, 156 bp, Zea mays
  Clone ID: MRT4577_183178C.1
tctccgggtcagtgcactgggtggctgccgcgccaatgagcaagtgaggctctgtgagagcttgcaggaactgcggagagaaagcgcctagggaccatgtatctcacggcggtaaaccttagccaagcttcacgtctgggctgcgctgtcctgact

SEQ ID NO: 91205 - DNA, 564 bp, Zea mays
  Clone ID: MRT4577_183179C.1
gggaggtggtggcatcatggatcagggataggatgttctatggaatactctagggtatagcgactcgcatcatgtaattatgtactagatgtggaaaaaataacatccgaataagaagacaccgtaatccaggtaaaaaaaaaaaaaaaaaaaaaaaaaaaaaaaaaaaaaaaaaaaaaaaaaaaaaaaaggctcctcaattctaatttttaaggttccttttcctcccaacggtcctggtacccaaccaacaacccggaacaacaataacaagcgaacttgggattaagttccttggtggttaatttggaaaaacttgccaggttcctgggaaaaatttggaactggcggtaaaattttttaaggttgggcattcctggttcctttcaaaataaaggcccttcaattgaatttaataatggtggggggggggccctttcttcaagtttcggtggtggggggggggttatttttcggtggggggcaactggtccaaaaaaagaacaatttggggccgccccatttggcgggggttggcctaacaaggttttaaaatgggttggg

SEQ ID NO: 91206 - DNA, 335 bp, Zea mays
  Clone ID: MRT4577_18317C.1
attctgggttacaggaaacgggaggatctaattataggaagtggcatttacaattacatagagccaggaccacatcttaatctgcaagaaaccaggacgcccgttctgacagacatgctaaaaaatggggaaaccgaaagcaatttagaattaggcactgactcttgaatcggagccctgttggagcatgtgtaaaatgaacacttactcagaacactagatatttcgtaatgaacgctgattaggctctgcatgatggaattgggggtccttagatgactggaacgtgaccaggaacactctacccttctgcaggtaggtcttgtatcatggct

SEQ ID NO: 91207 - DNA, 287 bp, Zea mays
  Clone ID: MRT4577_183180C.1
ggggcccaacaggggaaggtgtccaaattttggggggcaagaacctttccagtttttttggggaaaaactttggaaccaggaactttcagttaaaattctgtgatttaaatcaaaaacttcaattcacacaaggttccgggaaaaaaaaatggcgtatccaaacacctattgaagctcatggggtgaaaaatttttggagaaccacatatccattaaccttggggcaactgggtgagggcccccatagcttaaaagaaaaggggaacccttttttttttgggggttt

SEQ ID NO: 91208 - DNA, 388 bp, Zea mays
  Clone ID: MRT4577_183181C.1
gggggcccccgccaataaaatttcaggggaaggggtttggggggggcctcccggaacatggccctaaatggggggggcaatacaattaaaatgggggtttgggttgatcggggaacattcacaggggggtggggcaccaaagggcccaaacgggggggttttacccaaaaaacctcgttgcctgggaaaaggaatgcccataccgattttacgatacataaaaagtttaaggtgggcctagtcaaactggtcccagtaagggttaacttgctccaaaggaacggggggggggggggccctaaagctgcccataccggtttaaaacgtttcccactgggggggcactgaaacagggttgttttgacccctgaaagggttcgattttttt

SEQ ID NO: 91209 - DNA, 259 bp, Zea mays
  Clone ID: MRT4577_183182C.1
aaactaaaaaaggagggacgggatcatttataaacccggaaacactggggggcatacaaaaaaaaatttatgggggacatactcatgaacaagggggagcccacaaaggggtgaaaacaacagcaaaagggccttttctcggttaaaacaggaatagctatcaaggaacaaacatatcacattttgctaaagaatcggggaaactaacaaaaaaaagattcttttttctgggggaaaagcggcttggtgtaccggttaa

SEQ ID NO: 91210 - DNA, 615 bp, Zea mays
  unsure (1)..(615): unsure at all n locations
  Clone ID: MRT4577_183183C.1
ggggggggggggtttttttttttttttttttttttttttttttttttttttttttttttttttttttttttaataaacgggaacttttattaattactggggggtttaattacactttttccaaaaggccacaagggcttcntttccctggggttgtcggggaggcccccgtcgggaactccttactggtcgttcccgcgtgctttagtaaacaactttggaacaacattatccccaaaaaacaagccaacaacaaaattgggttctagtctggcttgaatctgggggaaatcctttccaggccgcccttgcccttttcctttgcccttttcgccttggctccaagggttgcccccaaccccgttccccttcccttcccttgggctggtcccccgtttgccctgggggcggccccggccccaaactcgggaccccctttgtttttcctttgtctggtttcttttttttcgctttgtcttcgcggtcccccccttgttgctttttttttttcccctggcccccctggtcctttctctttttttccccccccctgtgtttgggtctctgcttcgcttttctttttctcgcttgttttggcctccctcccctttttct

SEQ ID NO: 91211 - DNA, 1279 bp, Zea mays
  Clone ID: MRT4577_183184C.1
tgggtcctctccccaatcctgctcatcgatcccggtgatgtgtggtccgtcggcgacgatgacgaggtcctcaccgtcttcgtcgtctccttcatcatccccgagcccccggcgtccatctgtctcgttgagcacgatctggatgtcgtcctcgctatcgctgtcccattggtcgctcccggccgcaccagctgccgccgacgacgagagcccagggatggctggcccggaatcctccgcaccaccccccatgagcggatcgagatcattatcagcggcgggcagcttcacgggcggcgcagggtcgccttcgtcgtcgtcctcgtcggcccagtcgccggtcgggtcgaccccgggtatggggtcgctccctcctaggatccagtcgtcgtcttcctccacccccgccgccgccgccgaactcgacgtcttcctccatcgcggcgcggcggcgggacccggggaggtggaggatggtaggcggcggcggaatagtgcgaggaagaggaggccgagtcgtggagtgcgcgctacggaggaagacgacgagttcggcgacctctacaccgacatactcatccccactcagccccccacatccaagtccgcgttatccaaccctgttacagtcgaaaccctaccccgtccgcctccaaaccctaatcctagccctgtggcggcggcggcggcggcgggggtggaggaagacgacgactggatcctaggagggagcgaccccatacccggggtcgacccgaccggcgactgggccgacgaggacgacgacgaaggcgaccctgcgccgcccgtgaagctgcccgccgctgataatgatctcgatccgctcatggggggtggtgcggaggattccgggccagccatccctgggctctcgtcgtcggcggcagctggtgcggccgggagcgaccaatgggacagcgatagcgaggacgacatccagatcgtgctcaacgagacagatggacgccgggggctcggggatgatgaaggagacgacgaagacggtgaggacctcgtcatcgtcgccgacggaccacacatcaccgggatcgatgagcaggattggggagaggacccagtagcggcatgggcacaatgagagcgaaaggacggacgtgagccctgtaagacagccgcggcacctgtgtggaacgatccggtacagtagcggcggccaagggttccatcaacagcaccattccatgtccaaggtcagttacttgggccaagaggccgtacgatacactctggccacccc

SEQ ID NO: 91212 - DNA, 258 bp, Zea mays
  unsure (1)..(258): unsure at all n locations
  Clone ID: MRT4577_183185C.1
tttttttnnnnnnnnnnnnnnnnnnnnnnntaagcctctctagtggttttggtgtccggttttacatgtgtggtggtccaagctggctctccttgataccgcggcacttggtcttgcatgttagcggcacaacaccacgaagaacattgagcgcagtctcatgaacccacactaggtggcctcgacatggcggttttcgtcgaggcacaggggtcatcgatacgtggtggcctcgacgcggagggaagaagacaccat

SEQ ID NO: 91213 - DNA, 423 bp, Zea mays
  Clone ID: MRT4577_183186C.1
aaaagctcagggcacagccccacaggttcacattttgttccaaaactttaatccaggcccagggcagttttaaaaaaacaaaaaacctttataacataatcatggggggcaaaaactaaagagatggggaaaggggggtcccacacccatcagatgaccgggaaaagcctattcaatctcctggaaaaaggccccgggggcggccccaccagcggggggggaagcaacctcgccggaagaaaacttgcccttagccttggggggggggcggccccgggccttggggtccaagagccccttgcggcccttggcaagcttaagtttagggacaatcaccttggggggggggatgccccctttaacgggggagccgttcaccttctcgcgggggatccgctcaacggggataacccaggggggggg

SEQ ID NO: 91214 - DNA, 338 bp, Zea mays
  Clone ID: MRT4577_183187C.1
gcggccgaccttggctcgttcgttgggatttatattcggagaacatgcatttttctttgccaaaattccagcgcggtatcgtgcagctgatgatggtttctacagccatgccagtgtgggatgctatatctgcccgggtggcccgtgaatatctctacagcaccgttctaagatacttcctgttcttgcagactaagagcatgggtaataatgctgtgggtggattgtagctgctgttgggctggaccaacaacacatgggatgtagacttaatggcttggatgccaaccaactactcttgcgaggatcaaacggtatactgtctattatgaccggga

SEQ ID NO: 91215 - DNA, 239 bp, Zea mays
  Clone ID: MRT4577_183188C.1
cttacccagtggacaaatttttttgggagctccatggggcagcccaaaagacgcagggtcttcttgatcccaattggttatgaaagcgtgtcccaaattaagacccaaggatggcaaacaacactttttttgtacaagctaacggcaccgtgccacaagcattatttaaataggaagggtccaaaacccctgggaaaccaacccttcccggctgggattttttttttctttttgaattt

SEQ ID NO: 91216 - DNA, 615 bp, Zea mays
  Clone ID: MRT4577_183189C.1
cattgggtacctcgaggccggccgggacgcccccaactgctacgtttccccgacgcccaactggccagctcactgtccccactgtttctgcgtccgcgcaacttctccaggtcgcgcgccatacagtatataggaccacgcacccgcacgaacacgccgcaccagctcccgcacgcgccgcaaccccacgtccccaccccgcgccattccttggaccttgctcgtgcacgcgtgtccgatcgccaaccatggcggccggcgccggcaagtcgaaggaggcggaccccgcgcggtgcaggaggcacccgaagcaccggcacgcggccggggtgtgccctttctgcctacgagaccgcctgtcgcgcctctcggccgccgccgcgtccgcgtccgcgtcgtcctcgtcatcgtccccgtgctcgtcgtgggaggacgccgtagcgcggtcgtcggcccaggtgccgcggccccgccgcggaagcctcgcgctgctgctgcggcaggaggggagggaggcggcgtcggcggcggcggcgctgaccgcgggcagccgagcggagcacgaggagaggaaagccaagaggggcagcttctgggcgaggcttcagcagcagc

SEQ ID NO: 91217 - DNA, 973 bp, Zea mays
  Clone ID: MRT4577_18318C.1
ggccgggccgggatttcgaaattccaaaaagaaaaaaaattattgatccacagctggctattccaaatcaatcaatagtggcggaccaattatatatggtcaaccccctcgccattgcctgcaagcaaggtatctgtctccccgttttatggcttgttgatcaggccgtcttcgctcgctgaccaccaccgcctcgctcgtcgagcatatagccatgccatggcaagcacaggctcagagggatagataggtccagtgcaagcgcgcaggcatcgtcatccagggagggtggtggcccgtggtccacatcgatgcgatgccggttcacgttgcgctcctcgccgtgccggcggtggccgctgggttcctgcaggcgttccagttcgcgttcctgctgtggcccttcaacctggcgctgccgctggcgcgccacctgccgcaggcgtgcatcgcgttccgcggggtcgcgtccttgtacggagccgagctgcggcggtacgcgggcgccgccgcccgggccgccgtgcccgtgctgcagccgccgagccaccaccggtacgcctcgctccgcctccgcggcgtgcagcagcgggcgcacggggatgccgtcgtcgcgcacgccatggtcgcgctcgtcgacatctcctactgatgccggccgcttgcatcgcgactccgggcgcacgtccgggcgattcctcagccttttagcatgccgtcccgagtgtaaataaaacaatatataccggttcttcctccctaccttcgtcagctgaggtgtgtagtttgtttcttcaccatggacctgtggcgagcttcaatgtgtacaagaccggaattcgagttgcttgatgtgcctcctgttgaagtcgtgactactagtactagtatcttgaactacattgcgataggcatagaccatgtcaattctgtacagtatgtcatttgaagctactaatcagcgaacggtcgt

SEQ ID NO: 91218 - DNA, 290 bp, Zea mays
  Clone ID: MRT4577_183190C.1
aacaacaccaaagcatgcttaatttttaaagggcgtttgtttaatttacagcatattttattgatactgggacatcctggagaacatacaaatacctatgtttacgggacgggacacccatacaagtttgtatttgccctcgcttacttgccggggacaaaattgggggcgtaagcccaagctttttttttgacagggtcaacgagggggtccgcgaggtttttgaagggaccctttccggtgacaatggccttcacaaaaaaacccaacatggaaaacatggggggggg

SEQ ID NO: 91219 - DNA, 411 bp, Zea mays
  unsure (1)..(411): unsure at all n locations
  Clone ID: MRT4577_183191C.1
gcacgaggaggagggggcccgcggcgccnacacaaagacacagaaggcgccagacagagagacgcagcaagcaagggcgcgggcacgagaaggacagcgcgagcgagaaacagcgccaagggcagccccaaggacaaggcgagcaagagggngcaggcgaggaacagagggggggggcagacaacttgtctttcggaagcacgcgcangacggcgacgagggggggggggtcnccaccgccacccctgcggctcggcgcgagcacgcgacaggtccgggcgcgccaaaaaaaaaaaaagcaccgcagccgcggagcgcccaggcgcgggaggacaggcccgcgggtggcaaggaggcccccgcccgggtcccggggcagagggacaggcccaggtcccgcaccgggcgcgg

SEQ ID NO: 91220 - DNA, 227 bp, Zea mays
  Clone ID: MRT4577_183192C.1
gccgggaacgcactctttccctgagcatcagtacaaccaccaccgccgcctggacgtcgacacacgctcgcctccttccatggcgccgaggaacgctctccccgtcgccagcgccgtggccgacggtatggtgatgcagccgagggtccgctgaccatcggaagcgcccgtgacgcaggttcagcgccacggatccgggaatgggaaagtaacgcacgcaggtggct

SEQ ID NO: 91221 - DNA, 417 bp, Zea mays
  Clone ID: MRT4577_183193C.1
gggcaaaaaaaaaaaaaggccccccaggcaaaaagagggtcaacacgggaaaagcgggggcaaaaaaaaaagggggcgggaaacccccaaacactaaaaaatcagggggcacaaagcaaaaaaagaggggggaaagcaaaacgggggggttcccatcccaacgggggaaggggccaaaacaacggccccaaggaaagccctcccaggagccccccttaaaaggcttccaggggaaccgagcagctttggggggaccccaaaaggaaaaaatccacccccacttttggacctaagggaaccggcacgggtaaacctggggaaaccccactttcggggcaaaaaaaactttgggggggcagggaaattaaacttggggcggcaaaaaacttaacggggaggggcaaaaatgggggccct

SEQ ID NO: 91222 - DNA, 1005 bp, Zea mays
  unsure (1)..(1005): unsure at all n locations
  Clone ID: MRT4577_183194C.1
cggtaccggaacttcccgggcttgctttttatagtcttattacaaatggttaccaggtttcagttgntcatgaaaattagtatgctagaaaaaagtgttacattgcataatactgctaaacacattcaattaagttttgattctaatatcatttagatcaccattatcaaactactagagtcatgtatctcccactaactttgtttcttgattgagtttactactgagcacctcggatccacaatccaatttggggttgataacctgtgcatgcatgtggtgaacgcattgttaagaaaccaccttgtatgcctataccatttgggtgtcgttcagtggttcatgttcagtgttattaaaactacgtttaaacgatgtttaaactacgtttatacgtcaaaactctaattagaggttgaaaccacgttttagcgttctaaactgtaaaacacagtgttttatgtattttagaccatacttttgggcccagtctattagttacttttgaggttcaatccagctcatgggtgaagttttggtaagccactaacctctctattttggtatttaacttcatattattgtctgaaattatgatgtattggtatttttcctgtgttgtttaaaactacgtttaaactttgtttaaacgtttaaaagtcaaaatttcacccataagcgttccaacgttttaccgttttaataacctgggctgtatgtaaatctcatcttgatctttgctggaaaagttaaatgtactcatttgaaatggtcttgatgttagggtaaaatcaattttgaaaatacagttggtctgtcacattggatcatagtattctttttgcatggctagctctccttgtgagttgcgttttatgcctgtatcttttaggatcctgctttctaagatgatcacttcagcaattctcaaagtgtccgttaaaacagccttgttcttctgttcactgctgagcatncttgttttgttggtgggtgggcatcata

SEQ ID NO: 91223 - DNA, 521 bp, Zea mays
  Clone ID: MRT4577_183195C.1
cctcgaggcggccgggacgtaagaacgcatataagaccatcttagaaatccccctatctcctcaaccgaaactggtcctacttcatctattcttattgaatttatcaaccccgccgctgctaccccctttatcacacaccatgaggatacgcatcaccatccacatccgccagcgcggaatacaagtacgaaaacgcgagatatgagctgtactgactccagcatgttattcacgctgatggtcaaatgcccacagactaaaccattgtgcgaggagatgatgcatgctacaccttgtcttcattgagactgtggctaccaagacacgaaccccgtgctgttatagctgaccttgaccccactgtcatcgatgatgtgaggacatgacacactatcgccaattcttactaccagaacatctcatcagagacatggaggatgcaatgcaaccactgtcgcatacgaggtcactactccattgtgaacacatgataggtgacctgtgaacatgaccgcatcag

SEQ ID NO: 91224 - DNA, 175 bp, Zea mays
  unsure (1)..(175): unsure at all n locations
  Clone ID: MRT4577_183196C.1
ttaccccccgcaggtcgagtttttttatctaaccaaccagtgcaatagtcttcctttatgaagaaatgtttattagtaataataataatggcgcaaatgcaatgcaagacattctgattgnctaatttatgcaatactatatcctctggagcttgggcaccctaatcaaatatag

SEQ ID NO: 91225 - DNA, 1898 bp, Zea mays
  Clone ID: MRT4577_183197C.1
gtcgggccgggagccgggatccgtgatgcaagacaatttcctgaaccactgtgaattgggaccctcggggccgcccgggccggccgggaattacacaaatagatcaagcttatatacgcaattaagtaggtagccacaatggaggacaaggtgctcatcgccgtgggaacggtggcggtggtcgccgtcctctccaagctcaagtcggccgtgaccaagccgaagctgaaccttcctccagggccatggacgctgccgttgattggcagcatccaccacatcgtcagcaacccgctgccctaccgggcgatgcgcgagctcgcgcacaagcacgggccgctcatgatgctgtggctgggcgaggtgcccacgctggtggtgtcgtcgccggaggccgcgcaggcgatcaccaagacgcacgacgtgtcgttcgccgaccgtcacatcaacagcaccgtcgacatactcaccttcaacggcatggacatggttttcgggtcctacggcgagcagtggcggcagctccgcaagctcagcgtgctggagctgctgagcgccgcgcgggtgcagtcgttccagcgcatccgcgaggaggaggtggcgcggttcatgcggagcctcgccgcgtccgccagcgccggcgccaccgtcgacctgtccaagatgatctcaagcttcatcaacgacaccttcgtcagggagtccatcggcagccggtgcaagtatcaggacgagtacctggctgccctggacactgccattcgggtggccgcggagctaagcgtaggtaacatcttcccgtcgtctaggctgttgcagagtcttagcacggcgcgacgcaaggcgatagcgtcccgcgacgagatggcgcgcatcctcgggcagatcatccgcgagaccaaggaatccatggatcagggtgacaagacttcaaacgagagcatgatctccgtcctgctcaggcttcagaaagacgccggcttgcccatcgagctcaccgacaacgtcgtcatggcgctcatgtttgacttgtttggcgcgggcagcgacacctcgtcgacaacgctgacctggtgcatgacagagctggtccggtacccggcaacgatggccaaagcgcaggccgaggtccgggaggctttcaaggggaagaccacgatcacggaggacgacctgtccacggcaaatcttaggtacctgaagctcgtggtgaaggaagcgctcaggttgcactgcccggtgccgctcctgctcccacgcaaatgccgggaggcgtgccaggtcatgggctacgacatccctaaaggcacatgcgtgttcgtcaatgtctgggcgatctgtagggaccctaggtactgggaagacgccgaggaattcaagccggagcggttcgagaactccaacctagactacaagggaacatactacgagtacctcccgttcgggtctggccgtcgcatgtgcccgggagcaaaccttggagtggccaacttggagcttgcactggccagccttctgtaccatttcgattggaagctaccaagtggacaggagcctaaggatgtcgatgtctgggaggctgcaggactggttgcgaagaaaaacataggcctggttctgcaccctgtcagccacattgctccggttaatgcctaattgacgaaccagtttgctcctgtatttttcatgctttactgatatatgagaaaataaatccaaccagttccctcctgtatttttcatggaagaaaaaaatctctgtatctatctatctatctatctatctatctatctatctatccataatgcttcatcaagagaaatgttggcgaaaatctatttttgcaagaataacaatatcagagccaacaacagttttataaaaaaaaaaaaaaaaa

SEQ ID NO: 91226 - DNA, 174 bp, Zea mays
  Clone ID: MRT4577_183198C.1
taagctcggaattcggctcgaggttaaacgctaaggaatgctttttaatactcaggacccataccctcgtgatgatcggggccgtgcacatggagctgagctagttcatatagcggaggccatgacaactgctgacctaatttcattgcacatacgtcttacccctgcaacaaa

SEQ ID NO: 91227 - DNA, 393 bp, Zea mays
  Clone ID: MRT4577_183199C.1
gtcttaccagcgtttttgagggaaccgcggccgaggagccccccgaggcggcggccacggacgacacccagaaccggcgccaggacgacagggcgcgccgacacggccaggcccccagcgccaacagggcagcgcccccagacgcaaccacacgcagggcattattctggaactgatgacctgaatactttatgtgggggagcaaatgtttcgattagatatgatagaagagtgcactacatggttcaaatgctggattaaagattgctatagatctgcttgggcctatcaatgcaaagaatactaagatcacatatgcagacctggctcaggttgctggagtggatgcagtcgtagtgactggggggccatctgttgaatttattcctggct

SEQ ID NO: 91228 - DNA, 248 bp, Zea mays
  Clone ID: MRT4577_18319C.1
ctgcttttttaaaggtgttttctttgttctgaaaaaaacttcggcagattgctgcctgtctgtgactggtttggtttatagcaagctattagatgtatgacattttcattggttaagggctagtttgggaaccccatttcctcaaaggatttctatttttaaggaaaattagttcattttcccttgaaaaataggaatccttgagaaaatggtgttgccaaactagccttaagcggggctttaagtcg

SEQ ID NO: 91229 - DNA, 472 bp, Zea mays
  Clone ID: MRT4577_1831C.1
ggggaaaaacgttaggatagggacacaaaaagccacttataaggggggccaaatatgtataggaaaaaatttttggaggtttggaaagactaaaaaaggggcctactgggatattaagaaaccactacgttattccaagccatgggtgactatgggctatgggattcgagaataccagcacattaaattacgattggggggaaaaatttcataaaatgggggaaggttacgcattaatggggcctttaaaaagggtgacaccctcacacttataaaaccattcactatatatattaaaaggggcagggggggcattaaaaagtgggctgaaattttcctgacagaatttacaaaaagctttgccaaaaaaaattttaaagtgaaatcgggacttaacaatactccccggggtgcaaaaagggcaggaaaaaacaaggtcaaacttggccaatccctttttaagaggggggtt

SEQ ID NO: 91230 - DNA, 283 bp, Zea mays
  Clone ID: MRT4577_183200C.1
tgtacctctcacacttctgcaaatttatttgtacagttccatcgctttatagttatcttcagcacagggtgggtacatacattctttctattaataatcacgtgtttggtgcaaattgtcttaccttttgtattttctgcgatcagtagctactaaaatggaagttaaatggtagcatgtccgaatcctcaaaattttatgagccacatacactgaagttactgatagttccaaaggttcattgatggtgatgaaggctaagatactgttcctttgcagatat

SEQ ID NO: 91231 - DNA, 350 bp, Zea mays
  Clone ID: MRT4577_183201C.1
gccactcgtccgctacgcgttcgttccacgcgttcgaccacgcgtacgcccacgcgtgcggagctacaagcaatgctggattattgcgatggttgatcttgcacaagaggagcaagttggatgggtgccagttgcaaccttggatgctattgctaaaagcgtaaaagttgcaccatatcaaggtttatgagggtgcaacctcttataccatgattaacaggactaaggttgagtaaatacgaccttctggtgtgtggaactacaacttgaatgattgggagcacacgtgaaatataagagacgttgtaagagcaccttgtagttaaacgaaatgaggcgaccagggatgg

SEQ ID NO: 91232 - DNA, 479 bp, Zea mays
  Clone ID: MRT4577_183202C.1
ttgacgtcgtcctcccactcttacgatggcttcttctgcctctgttaccaaatgcttctcggggtagggctacgtgtaggggttgatggaggggccacggggttggttgatggggttgacctggtgcttcagcaacgagcttgtctggaacaccttcaactactacgtggagaatgtcttctcctaggacatcaacatcctggactccaaggggattaccgaccgggagacgggtaggttttgctgcttgaacttcatgtccttctctttcgagaacttcatgctcgacgctctcgacaacctgaacatcaccgatctccacggccgttacattaccgttaaccaggcccagtcccgttacggtggcggtggcggcggtggctactgtggtggtcgcggccgtggcggctgttgtggcgggcgccgcgactgcggttatggttgcggaggcggctacggcggtctccgcgggggtggcg

SEQ ID NO: 91233 - DNA, 475 bp, Zea mays
  Clone ID: MRT4577_183203C.1
gttggggggacagtagtccagggtggagggaaccaccaccaacacagcccgcggccaacggccgagccaggccgggggggggggggggaacggaaaacaaaggagggggcccgggggggggggaaaaaaaaaaaaaggaactagggaagaacacccacgggcccagaaacaaccaacccgcagccgggccccacccagcaccacaacccgccccggccccgccgcaccacaataaaggaacaaccaccaccgcggacgaaggaaaaaaaaaaaaagaaaaggaaaaaaaaagaaaagggggcaagaaaaaagaaaagaagaatcaagaaaaaaaaaaaaagcaattaataacaaaaaaaacaaaaaggcaggcccggcagcctgggtcggaccagaaaaaaacggacccccgcctggaggcgtcccaaccttccggaaagggaggcggaaactaaccgggggaaaaaaaaaacaa

SEQ ID NO: 91234 - DNA, 370 bp, Zea mays
  Clone ID: MRT4577_183204C.1
taaaaaaaaaaaaaaaaaaaaaaaaaaaaaaaaaaaaaaaaaaaaaaaaaaaaaaaaataaggaaaaaggcaaaataaagaacacaggcttacaacagtcacaactcatataaaaaagtacgggggggtccttttagaggtccctggttttccaccttttttactggccttacctttttttttttggggctccttaaactaaattcacggccccgattttcccaccgtcgcaataggaaaaaccttggcatcacccaccttatccacctggtgtccaatcccctttgcgcccggtacgttttatggaaaaagcccttaaccgatcctttttccaaaattgcgcccaccttaaccggcaaatgtacccccc

SEQ ID NO: 91235 - DNA, 196 bp, Zea mays
  Clone ID: MRT4577_183205C.1
gataccatcatggggagggggggggggctataattcaaaaccatagatggacactgaaacagagtttgtcccttcatctccggcagactgttctttttattttttgaacgctactagcagcgcgaatagtctggcgggggcggttgtagcaccgtctcagtcgtgggcccgacttcaacctttaaggccatagcca

SEQ ID NO: 91236 - DNA, 600 bp, Zea mays
  Clone ID: MRT4577_183206C.1
gggcgtcgctgccggccaactacaagaagagctctccatccagctgcgcgggttcgcttccagggcaagctcgtcaaggttaaggcctcctacaagctctccgacgccgccaaggactcgcccaaggccaagcctgccgcccccgcccccaaggcagcagcgccgaagccagcgaaggacgccgccaaacccaaaaaggacgccgccgctgccaaacccaagaaggcccccgccgctggcaccaagcgcaaggcgccggagaaaaaggtggtcgccaagcccaagaagtctccggcggcgaaggcgaaggccaagcccaagaccgtccggtcgccggccgcgaaaaagacccgcaaggcacctgcagcttgagttgggagtttggttgatagctatgtaggtcccctcttggttgaaatggttggtgtttaggatctgtacaaaggctgccttggctatgtctccctatttagatagttctcttgagtaggcgaagttctatgtatcccttgatggtgtagtataaaaaatggttaggtctctggaaatgtgaggcgcttccatctaactcatgaaatgaactttgccgttttttttgtt

SEQ ID NO: 91237 - DNA, 316 bp, Zea mays
  Clone ID: MRT4577_183207C.1
aaaaaaaaaaaaaaaaaaaaaaaaaaaaaaaaaaaaaaaaaaaaaaaaaaaaaaaaaaaaggggaatttaaaaaaaaaaaaaaaaaaaaaaataaaatatataaaaataaaaaaaatattaatatggggggcgcccgttttaaaggatctaagtttatgttcccgtgtttgcgaagtaaaatttttttaatgggcgtcacctaaattaattttacggcccgcttttttacaacctttgtattggaaaaccctgggcgttcccaattttatcttctttgaaaaaaatccccttttccccggtttgcgtaataccaaa

SEQ ID NO: 91238 - DNA, 392 bp, Zea mays
  Clone ID: MRT4577_183208C.1
aaaggggcaagcccagtctttttggcaaaaaatcggttacaaaggacaacttccaaaaaaaaaatcaaaccgcacacaaatcctagggaaaaaacctaaaggggttccccccaaggggggagtttttccaggccaaaggcatttggggggtggggaggccaaacatgggaccccttaaagcaaacaacagtttccaggtggttgaacccaggggaaaagcaggcccttgatgcaaaaaaaaacctttggaccccgttaattttagcagccccaagcatgtaaaagctgaccaggggggtgttgaacaaaaaaacggagggggtggactggaataaccccaccccacccatggaagccgggagggtaaaaacggggccaacccccggggggac

SEQ ID NO: 91239 - DNA, 264 bp, Zea mays
  Clone ID: MRT4577_183209C.1
cgcgttttccctccgagctcagcttagctccactccagctccaatcacaggcgtgaccagggcgccagagctagctagagggccgcgataatgccgatcaatatgatcgccctggggagccaccatgaggtgtaccacccgggcgccctcaaggcggagatcgctgagttcatctacaccctcatcttcgtgttcggcggccagggcttcggactggcctttaacaagctgaccggccgcgtgccgaccaccccagcgggcctg

SEQ ID NO: 91240 - DNA, 206 bp, Zea mays
  unsure (1)..(206): unsure at all n locations
  Clone ID: MRT4577_18320C.1
ccacagctgagcagcagccgccccaatctgcggttcaataaccgcccacgcataacccctccgccctccgctccttctagctcgctctctacctgcaccagcctcgcccacccttcgctcgccgccgccatggggagggngaaagtcaagggaaagcccaccggccgncgcagcttctncacaccagaggagatcggtaacgacgc

SEQ ID NO: 91241 - DNA, 309 bp, Zea mays
  Clone ID: MRT4577_183210C.1
gggagagaggccggggaaactgccttttgtttaaaaatcgaaatggatgaaaagaaccgggagaaaagatacgcacccgtggcgcccgccccaaaatttttcaccagctctcaccaaacgccaaccctggcccccccccaaccctttcaaggaggagtccggacccccacccccccgcctaagagggcgcccccccaggaccccccttataagccctcccggggccccaaaccagttttccctctccgcccccaggaataccccccgcactcccaaccggggcctgccccccccccccattgccccccc

SEQ ID NO: 91242 - DNA, 375 bp, Zea mays
  Clone ID: MRT4577_183211C.1
ctcaaaaccccacttgctgtctctgtgcttgcgctacccagggcaccggcacagcgcgcctcatccggtaccggcatgactagcgcctgcgagttcttcaccgagcgccgtgccgtccgtggtgcccgcctctcacgtgctgccactagctccgcacgctacgcgctccgggactcaaagcggcacttgtagcacggcaccggctgcctgtgttgccgacctggacaccagctccacgccgacggggaacaggtggccttacctgcaaaccgatgccccctgaccttgtgagggagtgtaggccatggatcagatcggatggtacatagacgaccttatcatacaggtctgggattctcgtgctcgctacgagca

SEQ ID NO: 91243 - DNA, 784 bp, Zea mays
  Clone ID: MRT4577_183212C.1
cattgggtacctcgaggccggccggggcgttcgagttcacgctaagcatcgtcatcgccccatcggtccgtcgttagtgcccctcgctccctcggaaaaccctctcctctcccctatcctctcgtctccccccaccccgccgcgatcaaccgagacccaccgccatggcgagcgacgacgaggaggcgtgcgactacttctacgacgacgacgacgacgccgaggaagacgccgccgccggactggaggaggactcttcgcttccaacgccggagggccgcgcggactactgggctatcacacaagataccgttttcgctgcacagaaacaagatctgtctacggtgatgaacttgctcaatataaatcaacatcaagcacgagccctcctcatccaccaccgatggagtatggatggcatctatgattctctagacatggggcgagaacgcatgctcagaaattcagggatcgtgctgcaggaggtcaacagcattgcagcagctggctcaatgacaccatggagaacagtgacctgcaaagtgtgttttgaggacttctccatggatgctgtttcgaccatggactgtgggcactgcttctgcaatgactgttggacggagtatttccacgctgcggtagagagcgggaaaaagcaaattcggtgcatggaggtcaagtgctcggctttctgcgatgaggacctcgtgcggtttctccttgtccaaaagtatccagacatggccaagaacttcaatcgcttcctgcttgggtcctaccttga

SEQ ID NO: 91244 - DNA, 273 bp, Zea mays
  Clone ID: MRT4577_183213C.1
gttccttacctaaggatgaggttgtgagaatggtagaagaagccgataagtgtgggaaggatgacatagtgcagaaagatccatttgtcacaaaaaatcaggcctattctgtggtctaccagactgagaagcaactgaaggatcttggcaagtaactccccgttcctgcgaaagaaaatgtggttgtgaatcttcaggagcttaatgaggcagtatctggtggatcaacacatgagttgaaggatgccatgtctgctttgaaccaagaggtga

SEQ ID NO: 91245 - DNA, 3812 bp, Zea mays
  Clone ID: MRT4577_183214C.1
atggagcaggcgccgcagacccacggcggcggcggcttgctggcctgcggcgtcatggaggacgtcgcggtcggcgacctggatctcatggaggagctgtttatggcggcgccgggcttcgatttctccgacttctcccagcccggggccggcggcgagtccccgggggtctgcttctcgccgctgttcgacatctgcagcacaaccaccacggcaactcccccgccgccgccgccgtcaggcgacgacaacagggaccagcccaccccgccgcgccgcggctgggtgttccagccccggctggaggtcgatgccacggtgaaggagcggctgcggcgcgcgctagagcgcatcgcgtcgctgtcgcagacgcagcccggggagctgctggcgcaggtctgggtccccaccgtcatcggcgaccgccaggtgctcaccacgtgcggccagcccttctggctcgactgccggaacgagcgcctcgccaactaccggacggtgtccatgaagtaccagttctccgccgacgagaccgcgcgcaccgacctggggatgcccggccgcgtcttcgtcggccgcgtccccgagtggacccccgacgtccgctacttctccaccgaggagtaccctcgcgtacaccacgcgcagtacttcgacatccgcggcagcgtcgcgctccccatcttcgagccccgcagccgggtatgcctcggcgtcgtcgagctcgtcatgaccacggagaaagtcaactataatgccgagatccagaacatctgcagcgctctcaagctctgcaggctgttatgccgttacactcttaacctgttcgatgaaatgcccttaggaaaagacgtgataactaccgggcacgccaatccccgaagtaatcagtcttttcaccttactttgtttggtgatgttcttgtctcagtgactgatacttcataccgagcaatcataccagagatcgttgacgttctcagaactgtttgtgagacgcacaaactgccactggcccagacgtggataccctgcatctgccaggcaaagaggggaagccgccacaccgatgaaaaactcaagtattgtgtgtctaccctggacgaagcgtgttacgtccgcgacctgaatgtaaatggctttcacgaagcttgctctgagcatcatttgttcagaggtgagggtgttgttggcagggcctttgcaacgaacgagccatgtttctctgaagacattaccgcctccagcaagatccaataccctctctctcatcatgccaaacttttcagcttaagggctgcagtggccatccggttacggagtatcagcactggaagccttgactatgtcttggaattcttcctgccagtggactgcatagagattgaagagcaacgagccatgctgaattctttgtccattacaatacagcaaacatgctacacacttcgagttgtcagcttgaaagagctggtggatgaaggatcaattgaaacaagtgctctaactccaccagaatatgacaaatctatgcatgaaaacatagatgaggtttgtagtggcattggtgttcctgcaaggacagcatcactggaaacttccgaggaggtgtcctcatggatagcaagccttgtgtgcgctcaaaataagggagtgaaagaaatggatggtgacctgccatttggattcagcaagcaagaggatgaagggtttagtgttacagctggctggcatacctctccagtaatagagcctgaaggtagcatcttttcaggcttcaagcagcatgaagaatacaaggtcaaggaggtaacttgtctcagagatccaagctcatccaacttggaaaaaactgtagaaaagagacggactaagatggagaaaactgttagcctggaagaacttcggaagcattttgctggcagcctgaaagaagctgcaaagaatttaggagtgtgccccactacactgaagagaatatgcaggcagcatggaattaatcgttggccatcacggaagattaagaaagttgggcactccctgaagaaattgcaaatggtgatcgattcagtacatggtagcgaaggaacggttcagctcagctcgctctatgaaaactttaccaagaccacatggtcagaaagagagttacaaggggatgccacttatccattgtcagaggaaaaaggtcccttggaaccttctgttcctgatcggtattgcgagggcagattcacctcgcatacttctggttctaattccctctcaccctcttgtagccaaagctcaaattccagccatggttgttccagtggttcgaaatcacaacaacatgtcagtgctcctcaacttgcagtaaagaaagaagttttcatggaggagaatcagagctccacactactcaaagctgcaagccatgctgaactgcagatgcttcctgaagaaagacttgtcaccctgcctaggtctcatagccaagtgcttttaagtgaacaaaagccagtggaaaatataacaggtatgcaaatgtctaagcctgattctctcaagataaaagccatgtacggcgaagaaagatgtatattccgactgcagcctagttggggatttgaaaagctaaaagaagaaattctaaagcggtttggcattgctcgggaggtgtatgtggacctcaagtatttggatgatgaatctgagtgggttcttctaacatgcaacgcagacctgcttgagtgtattgatgtgtacaagtcatcaagtactcaaacagtaaggatcttggtacattctagtgaccactcagtttcaagtcataatcatatatgcaaaagcagcatctgtaaatacctacactcgtgttgtcatcccgtggtcaagtgcctagtaagttctgtatgttgctgtttggtggctgtgtggcagaattggagagaaagtgattgttggtgttccctgtcagctcttgggattggtttgtatgcagtaagctgcatacagtctttgatataacagaagatgggacttctgtacctctagttcagtttgttaacagtacaggtagttcgttgaatgtaacaaactagtgtacaatattgtaggccggaaggtggaatcagtaggaatttgtcgatatgaagctttggattaggttaagtaatcacgaccaagttgcatcgcgcttgtaagttcttttggattaggttttgaaattcaaaaactcgccaaaaaaaccacaagctgtggaaagtggaatcaacagaagcatgcccatgccgtcatgtgtcgttttagtgggcacaatgaaatgtcttctcaccagtggcaaaaggtgtcgagcagagagcaactggctggagcaacactacgagctcatcacctggtcaaaaatgagatttggttggttcaaggtcaatgttactttttcatgttcttgcttcaaccatgcagaaggggtggtggtttttaggtatcctgaataattccccagttagaaagcaggagatgtcttagtctcctagacgacaatgcagcatagatattttcttttgtttcgctcttattaatttttgtccatcagtgtatttctcctgtgttttttgaggtagccttgtgtgtaatctgtcctcggattcgcagcatgtgtgtctgtttcataactcatagtctgcatgtatgttgctacgactgtggccatcctgtccgattccaagaacattgctgaacctatatactgctgtaataatgagggatcaatcgagtaaaaatgtgtactctgtggcgattagttgaatgaagctgaagaatcactcgcc

SEQ ID NO: 91246 - DNA, 636 bp, Zea mays
  Clone ID: MRT4577_183215C.1
cgccaacttcaccgcctacttcacgccgggcttctgggcgtcccccgcgctctcctccgccttcgccggccgccgcgcctgctacttcaacacgggcgtcatggtgctcgacctcgcgcgctggcgccgcgcgggatacacggcgcagatcgaggagtggatggagctgcagaagcgggtgcgcatctacgagctgggctcgctgccgcccttcctgctcgtcttcgccggcaggatcgcgtccgtcgaccaccgatggaaccagcacggcctcggcggggacaactaccgcggcctctgccgcggcctgcacgccggcgccgtcagcctgctgcactggagcggcaaggggaagccctgggaccgcctggacgccggaaggccgtgcccgctcgacgccgtctgggccaagtacgacctgctccggccggccgccgacatcgagacctcgtgaacacaacgacggcgttcgatcgaccgctcgtttcactttttgttcggtttagaagcacgtgctcttcgttgttttgttgatctaggctagatattggtagatcgatcatcagggtgttcatgtgaactgtacatattgttgctaactttctcggaaaagtttagaccgcttgcacaaaaact

SEQ ID NO: 91247 - DNA, 487 bp, Zea mays
  unsure (1)..(487): unsure at all n locations
  Clone ID: MRT4577_183216C.1
gcgcgcctgcagcaagatccaataccctctctctcatcatgccaaacttttcagcttaagggctgcagtggccatccggttacggagtatcagcactggaagccttgactatgtcttggaattcttcctgccagtggactgcatagagattgaagagcaacgagccatgctgaattctttgtccattacaatacagcaaacatgctacacacttcgagttgtcagcttgaaagagctggtggatgaaggatcaattgaaacaagtgctctaactccaccagaatatgacaaatctatgcatgaaaacatagatgaggtttgtagtggcattggtgttcctgcaaggacagcatcactggaaacttccgaggaggtgtcctcatggatagcaagccttgtgtgcgctcaaaataagggagtgaaagaaatggatggtgacctgccatttggattcagcangcaagaggatgaagggtttagtgttaca

SEQ ID NO: 91248 - DNA, 1413 bp, Zea mays
  Clone ID: MRT4577_183217C.1
tgccccactacactgaagagaatatgcaggcagcatggaattaatcgttggccatcacggaagattaagaaagttgggcactccctgaagaaattgcaaatggtgatcgattcagtacatggtagcgaaggaacggttcagctcagctcgctctatgaaaactttaccaagaccacatggtcagaaagagagttacaaggggatgccacttatccattgtcagaggaaaaaggtcccttggaaccttctgttcctgatcggtattgcgagggcagattcacctcgcatacttctggttctaattccctctcaccctcttgtagccaaagctcaaattccagccatggttgttccagtggttcgaaatcacaacaacatgtcagtgctcctcaacttgcagtaaagaaagaagttttcatggaggagaatcagagctccacactactcaaagctgcaagccatgctgaactgcagatgcttcctgaagaaagacttgtcaccctgcctaggtctcatagccaagtgcttttaagtgaacaaaagccagtggaaaatataacaggtatgcaaatgtctaagcctgattctctcaagataaaagccatgtacggcgaagaaagatgtatattccgactgcagcctagttggggatttgaaaagctaaaagaagaaattctaaagcggtttggcattgctcgggaggtgtatgtggacctcaagtatttggatgatgaatctgagtgggttcttctaacatgcaacgcagacctgcttgagtgtattgatgtgtacaagtcatcaagtactcaaacagtaaggatcttggtacattctagtgaccagtaagtgcctgttcctttggtcaaactggtttgtcctgacaatggcgcaaagctcatcaggatgctgaagaaagcatacaatctctctttgaagtaaagtgcttgttgacatcgcgctcagtttcaagtcataatcatatatgcaaaagcagcatctgtaaatacctacactcgtgttgtcatcccgtggtcaagtgcctagtaagttctgtatgttgctgtttggtggctgtgtggcagaattggagagaaagtgattgttggtgttccctgtcagctcttgggattggtttgtatgcagtaagctgcatacagtctttgatataacagaagatgggacttctgtacctctagttcagtttgttaacagtacaggtagttcgttgaatgtaacaaactagtgtacaatattgtaggccggagggtggaatcagtaggaatttgtcgatatgaagctttggattaggttaagtaatcacgaccaagttgcatcgcgcttgtaagttcttttggattaggttttgaaattcaaaaactcgccaaaaaaccacaagctgtggaaagtggaatc

SEQ ID NO: 91249 - DNA, 242 bp, Zea mays
  Clone ID: MRT4577_183218C.1
ggtcaagaataccgggccgacccacgcgtccagaagcaggtaaagctctggaaaccttgaaaaattggaaaggggaaaaatccagggataaggtcccccaatccttcaatccccccaacctaccaaggacggcattaacggttgccaatgggttaaaggaccttgctggatttgtccttgaaaagctaggacctaaaaatgcaatcttcaccaaagcagccgatgccatggtggaatggaac

SEQ ID NO: 91250 - DNA, 258 bp, Zea mays
  Clone ID: MRT4577_183219C.1
attcatattattgttatttttttcgttttttctttcttttttttggccaaccatcttttttttggggccttggtccctgctcctgtctgaagacagcccaccgcaacagcgtctggaaaaacgcaacaaaaaaaaaaaggtgaacgatgtgcaaaactaagaggaattccagcccttaaaagagatcaagggggagctcgccctcaagccccagttccacgacaagtcgctcgcacgccacaagtaaataaactactg

SEQ ID NO: 91251 - DNA, 760 bp, Zea mays
  Clone ID: MRT4577_18321C.1
agttccttccttgcttctcgtctcgtcgcctctcggagatcagaaagagaacaccggacacctaccctgcgcccttgccttccctccgcgcgcgcgtgctatctatggcgatggaagacgtcgcgggtgcctcctcctcctcggtggcggccgccgcctccgaccccacgcacggctggcagacggtgtcgtaccccaagcgcaaccgcaagcaggcgcatcagccaccccgcgccttggcgcccgatctggcgctgcaggccaacggaaaaggctccggcgtctttgacgccgtcgagaagcgctcccaggagcgccaccgcgcgctgcagcagcagctcgcatccagggcggccgacctcgacgacgcgcggatcgccgcggtcacaggcagcgcttactccgacgactccgactccgacgaggccaccgccccgcgccaggtgggggaggtgaagaagcctaagaagcctaaaaagcctaaggtgacggtcgccgaggctgccgccctgatcgacgccgagaacctcgcagcgcacctcgtcgagatctcgtcatcatacgagaatcaacatgacattcaactcatgaggtttgctgattactttggccgggcatttgtagctgtaagcgcatcccaatttgcatgggcaaagatgttcaaggaatcaacagtgtctaagatggttgacatcccactgtgccatattcctgaggctgtcatcaagactgcgagtgattggatcattccaagatctta

SEQ ID NO: 91252 - DNA, 293 bp, Zea mays
  unsure (1)..(293): unsure at all n locations
  Clone ID: MRT4577_183220C.1
aacgnggcgaaatccccggcggaccacacccttccgccaacccgtccggccggcggcaaggtctctatgaaccaccgaatcgcaaaggtccgcgggcgtttatcaaccttgaagatggaccccattaccaccaacttttacccgttgataaccctaacccccggcggcctaaaaaaaaccggcaagctgaacctggcggtccgtttaacttttacggaatggcccaacaagtttgtaaaattctgaaagccttttatatcaaaaaattccacttacatcttaccttaattatc

SEQ ID NO: 91253 - DNA, 584 bp, Zea mays
  unsure (1)..(584): unsure at all n locations
  Clone ID: MRT4577_183221C.1
ccacgccgtccggttcgaatcctgacagnaactttatttatacctccacctatttatttttcacgtttgcgcctttctctctagccccatgtgagtgagggtgttgaactgtataagtggattgactaccttctcctatcagcttgagcttttgggttgaattggtttgtgtctttctctctggctgcacgggggggagtgttgaagtgtataagtggattggctaccttctcccataagcttaagcttttgggttgaattggttagtgcatccactctaacacaagtaacatcctagcttatgttttgaccaaagtggaaaatatagaaagccttattccctattttaagtaggcatatatgatcctaagacaatgaagctagttaatcccagttaacgtactacttgacatttttcttggcattggataagtctggatggtattctgacctatgagaatatcattttttaatttagtttttgaaggtacaactggtttgggttccttttgatgtgaattatttggttgtcaaaaaagaactcatccttgctgctgtgatttattttgcttccttaggttttg

SEQ ID NO: 91254 - DNA, 129 bp, Zea mays
  Clone ID: MRT4577_183222C.1
gtcgtctcctcgtatagcccttccttaagaggcggcggctttctctggggatcctgtaacaccattcttctcttcttgagccactggtgatccggcatgagggcgaattagagctgtggaaagggccca

SEQ ID NO: 91255 - DNA, 589 bp, Zea mays
  Clone ID: MRT4577_183223C.1
ggagccaggggggcgagggtaaaattgcggccgccgccgggtggccctttccctcctctattctgtgcccagaatcaattctggggtcttggcgcgctgaattggagatcctagaagcatgtgcaccaccatcggccgtctcatccgctgcacctttcctcgccatagccgggcgggttgaaggttccgccgccggggaggtcggcgaggagtacctgacgcgcgtgtttcggttcctggagctatgggcgacgggaggagcagcaattactcgtcgtagctccatcaccatcgcagatccatgggtcaccgcggacgggaattctagcgcatcattagccggtaatagatcatgcctagcgtttgcactcaccttctccttgcgtagcacctatttgattcgtgtattaagtgtttgggcaacgattcgggagtcatcggcgatggcgccgccttaggctgagtccagtgcacagcctccctctcgcccctgccacgtcagctctcgcctccactctcgcctctgctgctccagtgtacaggctgcagcaggctacagcctcaggctatagccacatcagcttttcta

SEQ ID NO: 91256 - DNA, 377 bp, Zea mays
  Clone ID: MRT4577_183224C.1
ggtggggggggggtgaagtatattttttttttttttttgtgttctattttttatttttttcttttttaaaacctctcaccatgtactcaaattactggggccttcgttttttacggcctcgtaccgcgaaatttcccagactcttgggttgggggggggggtgcctaccataaattacctacccccctttattcgtgcatcacacggggccctacatagggacgggcccccaaaagggggggggccaagaataaatccacacaaacccccaccttaaacccgggggggggcgcccattccggtgggatcaattgggctaagaaggggtgatttttttatccgggggcctcctggggggacttggggccctttttctt

SEQ ID NO: 91257 - DNA, 1042 bp, Zea mays
  Clone ID: MRT4577_183225C.1
ggccccgcaattatattcattcattgatccatcccagccgaagaacaccaagaagagacgcagcagcatatacgtacgcatccacccactggaaacagaccaaccccaccctaccctgcagcgcgcgcagtgggggggaaaggagtcccagcaaaaagtttgtccagctcctcctcctactacaccggctaggaggaatctgatcaccgagcaccatggcgcggcggccgcagcccatgccgaacctggtgcccacgctcctcctgctcctgctcgtcgtcgccgccgcggtcgtgagagccgacgacgacgagaagtgcagcaacccgtgcgggaacccctgcggcgagccgtgcgtgtacgccagcccgccgccgccgcccgtgtactcgcccccgccgccgccgccgacgccggagtactacccgccgacgaccccgaccccgaccacgccctactgcccgccgccgcctttgggcggcggcggcggctacgagccgtcgcccgggtacacgccgtcgacgccctacacgcccggctacaaccccacgccctccgggtccggctggtacgcgccgccctacacgccgccgtccgcagggacgctgtacccgcaggaccccgggttccggcccaacgccgcgccgcggcgcgccgcgaccctcttctccctcgccgcggcggtggcctgcgcctgcttcggcttgttgtgaccgaccgaccggacggatcggaggccgcgaatcgcgcacgtacggtacggtacggtaccgacgacctgcgcccgtcgtggtggtcgtcgtcaagtcgaccgcagactgcatgctgggtttagttccgcgcgctccgtgttggtgttaataataagattagaggaaggatttaagttgggtttcggtaagatttttttcttcttcttccactcacttcgtcgtgtcgttcttttttttttgtttagtataaattcatcgttcttgtgatgtacttgttaattgttactatacatgttcgttgctccaaaaaaaaaaaaaaaaaagcggcc

SEQ ID NO: 91258 - DNA, 789 bp, Zea mays
  Clone ID: MRT4577_183226C.1
ttcctgtacgccagcccgccgccgccgcccgtgtactcgcccccgcccccgccgccgacgccggagtactacccgccgacgaccccgaccccgaccacgccctactgcccgccgccgcctttgggcggcggcggcggctacgagccgtcgcccgggtacacgccgtcgacgccctacacgcccggctacaaccccacgccctccgggtccggctggtacgcgccgccctacacgccgtcgtcctacaactcgccgccgtccccgccggggacgctgtacccgcaggaccccgggttccggcccaacgccgcgcccaccgcgcccctccccctcttctcccttgccgccgcctccgccgcggcggtggcctgcgcctgcttcggcttgttgtgaccgaccgaccgaccggtcggatcggaggccgcgaatcgcgcacgtgcggtacggtaccgacgacctgcgcccgtggtggtggtcgtcgtcaagtcgaccgcagagcacagactgcatgctgggtttagttccgctccgtgttggtgttaataataagattagaggaaggattaagttgggtttgggtaagatttttttttcttcttcgtccactcactgcgtcgtgtcgttttttcttttttgtgtttagtataaattcatcgttcttgtgatgtactacttgttatacatgttcgttgctccatgtgtttttttttcgtcgtcaaaggaacaaaagttcaaccatctgtttcagctcggatcaaacagaaataacatgtatgcatgttttatgcc

SEQ ID NO: 91259 - DNA, 521 bp, Zea mays
  Clone ID: MRT4577_183227C.1
cctttacaacgcggaggccgacgtgacgtgacgtggcatctccacgccaaatcgtcgtaatgtcgacagcgatcacgccaaatcaccgtactgtcgacaggaataatgatgtgttcaatgtgatgaaattaggaagttgcaatgatgcaacacgaccaacaaatcgtactgctactacgttgcaacgtcatcaaccgagtagcttgaggaactctgatttgaaagcgtccacgtgcttccgccggagcatggacaccgacgcctgcaccccgtcgccgtccctgccgcgcaccagtgccagctgcccgtcgtggttcatcctgatgggctccgtccgcctcggcctcccccacccgaagtcggcgacctcgtacgccctgaagcccggcgaccccgacacgttcatcaaccgttcaggccgaaccgtcgggtcgccggccatcctgaagaactcccacccgggccagcaaccgagcgggtcctccaccatctcctgcaccgcgcgctgcaccgccgacgcc

SEQ ID NO: 91260 - DNA, 358 bp, Zea mays
  Clone ID: MRT4577_183228C.1
ggtaccctcgggttcggccgggagaggacgctgacgcactgaataaccttatggctcaggacctacgacgagcttgacgagaactgcactatactggagagccctacactgatatgcaggatatggagatcctgaccggacacagtctgtggatgctgcatagcatgacagggaaacgatactgtcaaaagtgccgtgaacatacgccgaggtcatgattgacgagggccttgctgagccccccttaacgatcaagatggcagagccaggccaccatggaccagctactccatgcttatttagagaacgcttcaccttacattgatcaaggaattgaacaatggcctgctcatgctac

SEQ ID NO: 91261 - DNA, 351 bp, Zea mays
  Clone ID: MRT4577_183229C.1
gccggctcttgtctgcaacttcatccactccacccccatccccctcgaccccgacaacccctaccctattgctccgcgggccaatgggaagccagcggagaagaatctctctttctatgataagcggaaaatactacctcatgtaagaagcccaagtcctagaagctcctgccggcctcgaagtcctcctgtaatgatggctgctatgaagaatgggaagaataacgccaataatagcgtggagacctacaaaatctacatcttcaagggtccttaatcatgtgcaccccgacattggcatctcctccaaggccatttccatcattaactccttcatcatcgacatcttct

SEQ ID NO: 91262 - DNA, 595 bp, Zea mays
  unsure (1)..(595): unsure at all n locations
  Clone ID: MRT4577_18322C.1
acatgcgngagagcctcggctggctccagnagnccagngaccagcccctcatccctccgctccggtccgcacagcacaagggagcagccggcagcagcacagtgctgcggcaaagctaagatggcagactacgtgtatggccccgggcggaaccacctgttcgttccggggcgggggaacatcccggaccccgtgatccgcgccatgaaccggcagaacgaggactaccgctcgccggcgatcccggcgctcaccaaggtcctcctcgaggacgtgaagaggatcttcaaaaccaccaccggcacgccgttcctgatcccgaccaccggcaccggcgcgtgggagagcgcgctgaccaacacgctgtccccgggcgaccgcatcgtctcgttcctcatcgggcagttcagcctgctgtggatcgaccagcagcagcgcctgggcttcgacgtggacgtggtggagagcgactggggccacggngccgacctcgacgcgctggagcggaagctccgcgacgacaccctccacaccatcaaggccgtcgccatcgtgcacaacgagacggncacggggcgttaccaacgacctcggc

SEQ ID NO: 91263 - DNA, 371 bp, Zea mays
  Clone ID: MRT4577_183230C.1
cggcctcctaatgggctggcggtccactgcacgcccgcgacttataccccctgttcgtcgctaactggggcaggaggaacggccgccgtgacaacagtaggcaaccatcacacgtggaatacaccaatgacgacgccgttggctacgtggaaagtgttaaaagcgatgtgacccgctaccatcacaccagtgtgttcactgttatggagcgagacagacgtctagcacattccagacgagctttgatcacaattttactgttgcatgataaaactcatgttggatctgacaataacaccaagagctggcaccaaggatatataagatgggattagctactggacaactacactaatggtgatgaaacaaag

SEQ ID NO: 91264 - DNA, 714 bp, Zea mays
  Clone ID: MRT4577_183231C.1
ccggggaggccctttctggtcgacccagcgtttctattacccatcattcttctttcgggggtgaagggaacatacatcaaaatttgaggtcaagaccttattaaccgaaatgtccttatcaaaagccaagtcaaacagaacagggaatttaactgccaaaggacaatcaccaatccaagtattcttccagaaactagttttacaaccattaccaacaacaactttacaatatttaaagaaaacttctctgagacttagaagttttttccaaaactgagagtcattctgtctttgcttaactgagataagaggttttcccttaatatatttttttgtaataatcttttgccataaatcatttgaattttcaatattccaaagccatttcgtcaacaaggcatcattcatatactccagattcaaaacccctaagccaccttgatttttaggtgtgcagacagaattccagttaaccagatgaatttttcttgcttgtgaacctccttgccataaaagtctcttcctgtacaaatccagtttcctaataatggacttacgagccggataaatcgataacatgtacagaggaacattagaaagacagctatttaataacgtcaatctccccccaggcttaaaaatcttccttgccaactagcaagccttttatccatcttttccatcataggacaccaaaacgatttactgattttc

SEQ ID NO: 91265 - DNA, 348 bp, Zea mays
  Clone ID: MRT4577_183232C.1
aaaaaaaaaaaataaaaaaaaaaaaaaaattaaacaaaaaaaaaaaaaaaaaaaacaagcaaaaatataaaaaaaaaaaaaaaaatcatcaaaactaaatataaaatacaaaaataaaaacaaataataaaatataaactgggcccccccttcttaaaaaaaaaaacttttcctccccacatttcaaaaatatatttttttttttttaccaccctaatttaattcaagtgcccgctttttatcactgccttaattataaaacccttggtgttccccaatttattacttttccaacaattccccttttcccaattttgaattattcccaatatacccccccctttcccc

SEQ ID NO: 91266 - DNA, 346 bp, Zea mays
  Clone ID: MRT4577_183233C.1
ctgggcaactgccgtgccgagacctaccgatctcacgcgatggtcgcgattggcatcggatccaccgtctgtaagaggctgccgccgtacgagctgctactgctggtcgcttacgttgttgtctcgtgcacaggggttgcatatcgcaactcggatctagctcaagtcctgtcacaccaagtgcatgtacgacaagatcaaggttaacgccattgacgtcgagcaagtaccacatcggaagccccgacccgaactttcgcgatgcccagctgcccgaatcgcaccgcatatggctcaaggtgacgataacgtactggaacagcatgcactacgcggagaacgtgca

SEQ ID NO: 91267 - DNA, 595 bp, Zea mays
  Clone ID: MRT4577_183234C.1
cagtaacaagtttgtgtaatgtttcaatgcaagcatgaagctcaaggcctaaaattaatacttaaatcaagaatcttaggacagggcaataataatgctggctgtaatatgaagccatgcttttataattgaccgtcacattcaactagatggagtacagcacaacatatcttgtcagctctcaaggaaacataactgcacttctttttacaaacttaggagctgataacaagataatattctttaatagaaaagggaaatatattattcccacctcacctttacaagaaacagaaactgtgtccatgtgtcatatccatttgtgagttagcaaataaatatagcttgcagagatcagctagtaaaggaatgttgcccattatatctaatcttttttacaacaattatctctaaattgattgagtgtcgcttgagaaaaaaaggtagaaagaatgtgaacacagaaacagttcatcagaacatagaaaagaaactttaatacacaaaactaggaaatatacaaagaaccacataaagaaaatgtcccaatacaaaagaagaagacatgcaaggaatcccaaaagcctgctactta

SEQ ID NO: 91268 - DNA, 734 bp, Zea mays
  Clone ID: MRT4577_183235C.1
gcttcacttgtagtagtagactccagactttgcagaatacaacgtcttgaggtctgacctccatttccattaaatctcatgcacacatatactactagctagtaggagtagctcccaagtctgtgaggagcagtgtccaccattgctcactcaagctaagtgagcaagccagtaggtacaagatgaaaaggggcaggaggaacgagaagggtaagaagcttgcgggcaaggccgcggcaagggctctcgtgtggcttctgcttcctgtcctcgtcttcgtggtgctcaactccgatcacatgccgcaggttcctcttcaagcaacaactctttatttggtcggccatgcaccaccaccttctcccgcatcaagcgatcagacgcccggcgaggccgtcgatgcaccaccttctcccacatcacgccatgaaactcccggcaaagtcgtcggcgcaccaccttctcccacaacaagcgaccagacacccagcgtggccgtcgatgcaccaccttccgtcgcatcacgtgacgaggcgcccggcgacgccatcggtgcgaacaaaagtcaaggcgacgtcgcccgtcgacgagatacagatgtggcagcaccaagaagcaagtcaatctgcgacttcagcagcgaacgcatggatgtctgcgccatgcaaggcgatgtccgtatgcacggcaaatccgccacccgtgtacgtggtctcagcgtccgacgacagcta

SEQ ID NO: 91269 - DNA, 186 bp, Zea mays
  Clone ID: MRT4577_183236C.1
ttcacgcgtccacccacgcgttcgggcactcgtcaaaaaacatgcttgcataactcctccagtacgatcctatggagattatcacaggtggagttgtcatacacgaagcctatctatctaataatcccctgatccaaaagtgacctttatgacatgcatatggacgggcatatatatttatataaa

SEQ ID NO: 91270 - DNA, 284 bp, Zea mays
  Clone ID: MRT4577_183237C.1
cctgcccttgtctgagatgctggtaatggccatggtacccccttctgggcatctgttctggtttttaaccattgtcttgttctgtgatgaggggaggggggtccatgctgagtctcccaaggctgcgtctggaggggcccctgcttctccagcctggatccccagctttgcccaacaccagcccctgccccagcccaagtccaaatgtttacagggagcctcctgcccagtcccccaaccccagccgctcggaggccccacaggacaaacacaagaagcgtgag

SEQ ID NO: 91271 - DNA, 1470 bp, Zea mays
  Clone ID: MRT4577_183238C.1
atgagtagtgatagtgacttatttgttgatgctcatgatctttggactaaagttaagttgaaaatttttaagtccatatgcactacttctgctccctctattgctggtagtactaacttgtccaagggagaagaacaagaacgatggacaccaaacgatggatccacctcaccaacaggttcatctcccactagttatacatgtcttgttgctaacgatgagagtggagatgaaagcgatgatgaggaggaatatgaggatgaggagtctacatcatcacaaggtacattttcctgttttgcttccactgataataatgacagggaaaatgagaccgacgatgtggaagaagaggagattcgccatttctacacccatctcaacaaagaagacaaagcgctcttggttaagttgttgagaaggatcaaggaacaaagcgagacgcttctcaggctagaagagactctcatcaaaaccaacgacagtctggagaagatgaccaaagaacatgaggagctaaagtgctctcatgatgatttggtccaacagtatgattcagttttaattgagcaaagaaataatgatgatgatttatcttgtgttgctcaacttaaaatggaaaatgccatgcttgagaggcaagtagaattgctaaatttagaaaagcttgctctaggtgaaaagtatgatatgttgtcatattctcataataaattagttgatgaccatatcatgctcgatattgctcatgaggtagtaattactagtttaaacttatgtgaacctcattcttgtacatgtgcacatttagataatatatcaccatgtgctaacccctgttgctcaaaagaaagccaatgtttgaatgagcatcaagctacaggatcaaaagaaaagttgctcatcaataaagaaaggaacaagaaagcaaagcaactaaggagaagacgtcgtgctcaagatatttacaaacatgtggtgaataagcttgaggaagaaggaaccgcagcaagggtcaaactctgcgagaaagaagctcctaagaacaaaaagagaagaggaaaaaggaggtgcttcaagtgcaatgagtcaagccacctcattgcttcttgtccatacaaagacaaggatgaggggatgaggagatgttttggatgcaacgataaggaccatatgatcacttcatgtccgctcatgaagaatcaaagacgtacaccctccaagatgaccctcactaaggaaaaagacaaacaacaagtgtcatgtcaggttgagcgacacttttgctacatgtgtggtgagcgtggtcatctatccaagtctcaaggtggaaaagggaagatgagcaagaaatggaagaatcaggacttgggtacctccataagtcaagtatttggtatcttaagctcaacaagacaaggtcaggataaaggatcaggcacaagtgtgaaggagcttcctagagattaa

SEQ ID NO: 91272 - DNA, 413 bp, Zea mays
  unsure (1)..(413): unsure at all n locations
  Clone ID: MRT4577_183239C.1
agaacaatccttctgctgtttgtctactaattctatctcacattgttgatacaaatgggtatcttagcctcattaattttcttctctctgtctttctttatatgctatcgatttgtggcttccgctaagatgcttttcttgtttggataataaaatgttgcctaggattttaatatgtgagttgtcaagttttacagttagtccagttcccgctactgacatgcttgtttcctcgccagggcttgctatggtgttcttcgttatgttatggagagtggtgccaagggttgtgangtgattgtgagtggaaagctcagggcccaaagagccaagtccatgaagttcaaggatggctacatgatctcatctggtcagccagtgaacgagtacattgactcggctgtgagacacgt

SEQ ID NO: 91273 - DNA, 260 bp, Zea mays
  Clone ID: MRT4577_18323C.1
ggaaggaaaacccccggggtggattggactttttccttcctggccaggatgggggacaaaaggaactaccccccaggggggtttcaaagcaacgacgagaacttgaaactttacatgctaaaaaaagggggggccagggcacccgggttaaactcctacccaaagtggttacaatttccacggaaaaaacggggacccttgttaacccggggccaacgggggggggggggttttccccctgccacccccaaacaatttcc

SEQ ID NO: 91274 - DNA, 522 bp, Zea mays
  Clone ID: MRT4577_183240C.1
ttctcggtttttttttttttttttttttttttttttttttttttttttttttttttttttttttttaaaaaaaaaaaaaaaaggcccctttcattttttaataaaaaagctttgcaaaacaacgcaaccataggggtcctttaaattaaaacaaaaacccactggttggccctatggtaaaccctacctttttttaggaataaaagcccccccctttttgggccccccaaattggaatttttttttaggttttccggcccaccaaaggggagaaacctggccttagcaaaaggctccaagcagaaaaagcggccttggggctttcccctgttttggaggaccccaaccccctgggggttcctccccccagccaccatgaccatgtggtcgacctaaaacttggggaagcccatgttcttgggggcccccaaaccgattttgagggggtcgtcgcccttgatgagcggctcggggtaccggagggcccccccatcggaggttttaaggagggggttgcttttt

SEQ ID NO: 91275 - DNA, 539 bp, Zea mays
  Clone ID: MRT4577_183241C.1
tatatattttatttatttattttctgttttgtgttttttttttaatttacaatttttgaattgaattctgagttgagttttaaatttaaactaaatgcacaataaaaaatatccagcatgccaatgcaaatattttatagtatttatattaattacccatttattatcgcatttaagaaaatacttttaaatatgaagttcgtacacacataaataggtatttcagggcaaaaataacttctagtgtatgataaagatatgctttcaaatttgattttttttttatatttagtagtaaatatatctgctttagaagatgaaatctttaaaagtaaaaaaaaaccttattaaaagattttaattcaaaatcattttggataattttactaaatcaccaaaatgtaattccaggtcttacaaattctaccccccttaacagaaatctcgtcctcgagatttgtacaaaagaattggtttgtaattcagcttttaatttataattggttcaaaaatccagagtctcatttttttatagtcac

SEQ ID NO: 91276 - DNA, 173 bp, Zea mays
  Clone ID: MRT4577_183242C.1
tgttgccctaacttattataaccctcccaagaaaaaccccccagcgatttttttaaaactgggcgggtactgccccagagcatacaaactggacacatgcacatctagccagaacgccaatacacaccaaccatccatccctgaacataattctagaaaagccacccaagcat

SEQ ID NO: 91277 - DNA, 339 bp, Zea mays
  unsure (1)..(339): unsure at all n locations
  Clone ID: MRT4577_183243C.1
gtctccaccacggcaccactatcactccatcaccaccgcctccctctccggagtcttcctcccaacgactcaaaccgccaccgtggcggctccctgaaccaccagcccagagcccagcccaccactaacgctgctgatgctgctggagagaggggcgcgggtggacgggagcgatgggcaactgccaggcggcggaggcggcggcggtcatcatccagcacccaggcgggatgggggggggcctctactggnccaccagcgccgccgaggtcatgcggaacaacccgggacactacggtgccctggtcatactccaggggnnctgcanataacaagccc

SEQ ID NO: 91278 - DNA, 345 bp, Zea mays
  Clone ID: MRT4577_183244C.1
aaaaagggggtcaaaattttcaagttttctggaaaaggggctcatgtttgaatcatttttgggccccgaagttttttaaaaaaaggggggttaaaagttttggcaaacctgggattcacccaatttacaaacggtgggggcaccctttattgccccttaggcgggggggggaaaaaagggtaacccccttaaaaggggtttccccttttttttgaaaacttcggtgcctgtaacccgggggttccctgtcccccggggggaagttttaagcccggtaatgcgggtcgcacccccctttcctggttttgggggggggtaatttgggttcatttgctccctgggggg

SEQ ID NO: 91279 - DNA, 386 bp, Zea mays
  Clone ID: MRT4577_183245C.1
tgggaccctcgggccggccggaatgaaatcggccgatcgacggcccgcatctgtttacgcagtctgggctgcactaccgagacgcctaacgccgcaggcagctcgacctgctggcaccgcaaccagaagaaaccggtatgcaagaagccgtagggcatgactcgcctgtcgcgaatgcccccgagggacagaatcccagccgtacgcgcagcgcctcccgagggggcacggccagccgcgtacagggaccccttaccctaaggcccaggaagaacgcgactaagacagtagcgacctacaatgatcacacgttcaaggagctgaagcaggcgcaccccgacatcggcctgacgctccaggccatgtacatcatgaatcgccgtgat

SEQ ID NO: 91280 - DNA, 745 bp, Zea mays
  Clone ID: MRT4577_183246C.1
cctcgaggccggccgggccgggactcttattgcgcctcacttggcctgcgcggctgctgtaccaaaccaacccaagccacccaataaaccaaccaacgacgtagctgttgagcagtacgttgagctagctctagctataggtacagtcacggagtctcggctcggccatgggcaactgcgtccagatcagcagcggcggcgtcggcgtcggcggcagtagaagctgcgcggccgccgtagaagcagggtgccagcagccgcaacggaggagaagcactgccggcggtgatgaggaggaggcaataattgatcaagcgatgacaccgtcgtcaatcttgaaggtgaagatggtgctgaccaagggcgagctggggtggctcgtggcgcagctcaaggccggcgaccgccgcctcgcggacgtgctccgggagatggcgcgcaagcgtgagggccgggcggctgccgacgggtggcggcccagccttgagagcatcgtcgagtgccctgccgagacggcgccggcgccggacgccacctccgataatagtgattagctagctataggagtacttgtagaggatctggaactcgtagatgtgttgcccgttgggcgtttcgattttttttttcctccctctctccctctcttgttgcttaaaattatttctacttttaacttgctgatccggtcccagttaaatgaaggtcgtttcttctgacaaaaaaaaaaaaaaaaaggccccta

SEQ ID NO: 91281 - DNA, 925 bp, Zea mays
  Clone ID: MRT4577_183247C.1
gcagcctgaaaacggtgactgaattcgctgtggtaaactgaatatatataaacaaacaaacatatctgagtgtgtggctaactactcgctcaatgctcaatgctcatcccaggaccgactggaccccattctgcctaagcccaaatgcaaggtcaagcatatcattttgaaacattacagacaacattcttttccttctttctattccagatggatgctgagaaattaattaagttcgattgccatggtcgacagcatcatacacgcgctgacgcacgacattctagtatatatgctgatgggaaggacagagaggggtcggaggtgggaaagacgtgtatggtatggtgtagtatatatagtaacacagatgcacgagatgaaaaagaaagaagccaagcagaccgatcgatcaggaaattaatcgacagagacgtgtgatcgatcgagctagtcgccggtggtgatgtgcactccgatgacgatgacgaagagggtgatgagcgcgaagtagatgatggagtggacgacgatggagacggcgctggtcttcaggttgccgaactccaccaagtggtggcggccggggagctggacgagcagccccggcgagagcagcacgaacagcaccagcccgatcaccacggggccccagtccgacatcttgctcgatcgacgatgaactgcctgcctacctactggtctctttggcttgtacggggagtggctggggcctggggatcggaggaagacgaaggccggccgggtggagaaggtggtctgcttgtttggtttgctggtgctcgccggggggtgtctggtacctctctccctgaggaagacgaaggccggccaggccagccgggtggagaaggtggcctgatgtctcgctttccatggtcgttccccacatcggacgcgtgtt

SEQ ID NO: 91282 - DNA, 347 bp, Zea mays
  Clone ID: MRT4577_183248C.1
gaaagcacggcacgcctgcaggagccgggccggaatatattggcgggacgacgatgtctttctactcggcggacgccctaatggtttgagccccaatgatcaggacaaggatacggatcctattttactgcataaaagacaacctaagggaaattacctaactccaggcgtacacaggttggtgtgtgcaacgactatcaatcgccgatgcatacataggtcgtagcaactatgcaccagaatgcctgctatgatccggaacaaggtgaacgcacaaaacctctatcagccttacactgctgaatgaatgaatgatacgaatgctacaaacacatgctctgggctag

SEQ ID NO: 91283 - DNA, 378 bp, Zea mays
  Clone ID: MRT4577_183249C.1
aagaaataaatacacctattatacctcatatctgcatacatgacacacacaggtatgtccacgaaagcaagcagccaccctacaatctacatgcatgttccttgtatatctccaaagatcggatgccctgtttgtctgctctcactagccgaccctccttggctcccataccgcatcatgacatctttgtccgcatttatttatgggtactcttgttgccatctcggccgacgaagaaaagcgcaggaataacggccacacgaacaaaccgggattccggtcagtgcgcaggctctctggtccagtaaacttggcagcggtttcaggaagctgctgctagctcagtctcagtctcacagtctcatacatacatacata

SEQ ID NO: 91284 - DNA, 148 bp, Zea mays
  Clone ID: MRT4577_18324C.1
tcggggaaccatggggccgtaccaggtcctgaatggggttaatttttctgggcttttacggttcggccaagggcttgaaggtttcgaacccaaagttaacctttgcctcccttggaacggccttcatggttaactaccggattccgga

SEQ ID NO: 91285 - DNA, 224 bp, Zea mays
  unsure (1)..(224): unsure at all n locations
  Clone ID: MRT4577_183250C.1
cccgtactcaaacaacgaaaaaaaaacacgccggtcgccattaaaagtctatcgggccccacaaaacaccccnnncaaaccaaaaaaccgcacaaacatncccccaccccnncctcaacgnctccttccgcactacttcttacgatcccttcccaccctcccaacgaaacttaaagctcttagacatctacattcctctccaccacacgactgaacaaccacca

SEQ ID NO: 91286 - DNA, 834 bp, Zea mays
  unsure (1)..(834): unsure at all n locations
  Clone ID: MRT4577_183251C.1
aattcggccgggagcacaccatcttctgtctccataaacaagacctgcagcgatgcgctccactgcagtgctgctagttcgcacatgcgttgtgcttgtgtgtttggccgccttggcgcgagcgccggccaaggtccatgctgccgccggcaccggggatgggctccttgctatccctaccaacgcctccctgtcgcactgcccctcttggtgcggggatgtccaaatctcctacccgttcgggatagggccgggctgcttccgtcaaggcttcgagctcagctgcgatcaaacagctccttctcccaggctcttcttcgtgtcggggaacagctcgatccaggtgacttctctagatgtcggcaacagtctggtttgggtttcagctgttgggttcaacgtcaccatgagcgcaggcgtggacacgtacacgtcctggaaggcccctccaggtgtcatttcttatggaagtaataatctgtacactgttggttgtgggtgtcgacgtgtancttgttcggtgataatatgatagatcccattggttattgcacgagtatttgcacagataacagagagaccatggagagggcaaacacgccttatagtgcctgtgaagggataggctgctgcagcattccaatgcgtggcgaccaaggcttcactctcaaactaggtcgcctcaatagaccatccccacgnntcggtgaagcgctctccagtgtcaagattatcgtttcgcaaggctataaatcgtttactgatgatgtttacccaaagttgggtgattaaaagcaacgntcatgacatgctattttacattgcaatcatgga

SEQ ID NO: 91287 - DNA, 384 bp, Zea mays
  Clone ID: MRT4577_183252C.1
cgcctgcaggtaccggtccggaattaattcccgggtcgacgagctcactagtcggcggccgccctttttttttttttttttttttttttaaaccaaaaatggtttatgggattcgccaaggaaacatagaaaaagtagaggttccgtggccatataaccagctccagacataccatgaattacataaattcatactctagaacaagctgatgggcgctaaggaccaagccataataggatatcacttaagccaccagagagctctccgtggttgactcgtacttccaggagggtgggagcttttcgaaacgcttgttgtaccgggaaagggcttggattctgctttgaacaagaatgagattgagttcggagtggttgcacttc

SEQ ID NO: 91288 - DNA, 185 bp, Zea mays
  Clone ID: MRT4577_183253C.1
gttgttcatgatattgttttcgcacgcaaaagaatgaatgggtcaactataggtgcttggaattcttgttctaggccctcacaaaagcgtcagtacatggccatttcctactttctaaggcacaccatcggaacctttttattggccgtcaaagtgacaccccggtttaaggcatgtggaatccc

SEQ ID NO: 91289 - DNA, 448 bp, Zea mays
  Clone ID: MRT4577_183254C.1
gttagtaaataatctgttacgctccagtcttattgtcctctggtgacgtagatgtcgtctcgccgttgaggggcagccgcacgaatacatggcctcctttgagtttggatgtaccgatgtcggtctcattttacacgcatgatagacatgcccatctccgtactaaagatcacgactgtcgtggaatagtcaatcctcaccgggctagtcatgatgactcgatctattccctatgattctggagaaacgctacatggggaatctcctagtctgcgcgttgacgggtgaaggatctattccgggtagctatcgtgcaacctagctgagagatgcctgctcatgatgatgttccctgacgtcaacagaagatcgaagagctcaagagtgatcttggtgacgatatgatgattatccactgctccatggatgatagcctctcactcatcca

SEQ ID NO: 91290 - DNA, 472 bp, Zea mays
  Clone ID: MRT4577_183255C.1
gccggccgggccgatcaaaaaaaaagaaaaaaaaacaactggcatcactgaactctcctgcttatttacagaagaaacaactactactgggcagccttgtattctgccgggtaattcagaggactactaactacaaccatttatgccagctagttggggggaccctgggtccattcttgacacacccacagtagtggccgttttaccgccattctgcccctaaggttggacacccccttacaatggaaacaatggtggcattttagccagctggctttgacaaacccactagggtgttaccaacaacccataatggggggggcccgacgtttaaattcttccatgagttacggttcaacattaaggtttttggccggaagaaaggggattcccaaaaataaaaaggcccttttctaaatgcagaaaaaaaaaaaaaaaaggcccttagggccggggccgttcaaaaagtagg

SEQ ID NO: 91291 - DNA, 143 bp, Zea mays
  Clone ID: MRT4577_183256C.1
ccagctcgctcctcgccccgcccccttctctcaccggcgcgcctcgggcgttcctaccctgcaccctctcgggactcccacgccgtcggcaaagcagccgggcaagagtccgatccagaccccgcgatgaatccttgatatac

SEQ ID NO: 91292 - DNA, 220 bp, Zea mays
  Clone ID: MRT4577_183257C.1
gtcgtctccgacccactcagtcgagggccggacccccatcaactcgccgtggcccaccaccgttctactatcaccctacgtggccgcaccccaaccctccaacgccttccgcctcctgctcctactcaccgaggccgtctccgccggtactgccttcgtcctgcttcgcccgcccatcaccgtctggaccgtgattcctgcaccgtgcgtacgatcttca

SEQ ID NO: 91293 - DNA, 338 bp, Zea mays
  Clone ID: MRT4577_183258C.1
ctccaaaattcccaaccaaataacctcctttatatactaaattatatttttttcacaaccaaaaaaaaccccttgggtctaatttccaattttaaccacaaaaatccaacgaccccaaaatttaaaaaacataacaaaacgaaaacccctcaactaattgttgtgaaaatggcccttttaacggtaactccacggacccaatgcccaaaagcaaagatctgtggaccctttaaaccgctaatgcttactaaaactgattaagccccccccaaagtgcaggtaattgcacttctcttccacaaattgcaccacctgtaatatgagtttcccaacctccc

SEQ ID NO: 91294 - DNA, 343 bp, Zea mays
  Clone ID: MRT4577_183259C.1
gtgtgtcttgcgcgtcgcgtcacagccccgatccgaatcgactcctcgaagcctcgccgagcccggctcccctcccctcgctgcaagcgcacatctggtgaagaccctcacggcgagactatcaccctcgagggggtcttctgacaccattgacaatgtcaggctagatccaggacaaggagggcatcctcctgaccagcagcggtttatcttggcggcagcagctcgggacggacgacacttgctgactacaacatccagaacgagtcaaccctccatttggtgctgcgccttaggggaggcatgcagatctatgacaagaccttgactggcaagacaatca

SEQ ID NO: 91295 - DNA, 196 bp, Zea mays
  unsure (1)..(196): unsure at all n locations
  Clone ID: MRT4577_183260C.1
cgctcgccgctcacgccgcctcgctccctgctctccggtcacgccgctccctggtggctgctgacgccaccccgctccctgctcgcggcatcgctcgctgctcatgccgncccgctccctgctcgtcgntcacgccgacccgctccctgctcgtgggatgggtctgctccaatacgacgntccactccaagttaca

SEQ ID NO: 91296 - DNA, 205 bp, Zea mays
  Clone ID: MRT4577_183261C.1
gacccacgcgtaacgctcagatccaacgaaaaacgaacgccattttttttatatgtcatcacaggtgacaacctctcagggtgtcctattataaaaagcatgatgcacacactctaagttctattatgtagaaaagcgggaacaatatcctacatcatgttatccctccataatactttcctataggtcaacaaccaacatcttt

SEQ ID NO: 91297 - DNA, 378 bp, Zea mays
  Clone ID: MRT4577_183262C.1
aactttatttttattccattttaaatcaattctttcttctttcccccctctaacaagattgttttcttataacccaaatcaaaatacctatcaaatgtttccacaatatctcaatactttttgccaaaatatcccttcataacttccacctctaactcctctcctttaaccaccccttcattaacacctattacattacctacattttcaaatattacacttttcaccctccatataaacaacatttatttcatttttattccctcaaaacacctttttttttttaaaaaaaattctatatttttcttttttaacccttaaaaataccaatagttttcttttttcccttaaatatttattaaattaactattttttta

SEQ ID NO: 91298 - DNA, 290 bp, Zea mays
  Clone ID: MRT4577_183263C.1
taaaaaaaaaaaaaaaaaaaaaaaaaaaaaaaaaaaaaaaaaaaaaaaaaaaaaaaaaaaaaaacctaaaagactcttggcccgtttcccccctttgcgggttccctggggggggtccctcccctgcgggtcccgtgtccccctttccgtggtgtgggggccggcctttcccctttccgctggttgggttccttatcaactggctggccgggtgaaacccccccgtcttggaaaacctcttggcctcgcccccctttcccccttttggccggctggccccctttttcccc

SEQ ID NO: 91299 - DNA, 2215 bp, Zea mays
  Clone ID: MRT4577_183264C.1
ggatggtggctctgtctcgagagtggaacgagagaggacttaactaatcctaaatcccctaggtcgtcaccaccgatcttatgcttccacctctgaggctgccgccagccaccggccagcgtcgttcgctctgtagcagtccagctctgcgcccggcgccgcggcccggcatagcgcacagggacaactcctacggtcctgccgctgatcgcggcctcttcagccccccttggtgatcggtcctcccccggcagactcgcctcctcggtcttgcgctcctgcgcggctgcgcgcccagcgccgtgcccggtggcagcggcgaccttggacgacggtcagcccccgacagtccggacttccgactccggacctccccctcagccccctctgtccgtcccagtcccagctcgagcttgaaggttgaaacaacaagcaagatattttgaaatagcccccgccacgaaattcttcagccatcgtggaggggttcagttcaggggaggactcgactcaggaaacaggagcacgagcggagcagaaggcagtcatggcggatgaggtggagcttgctgcggaccagcacgtccgctacatcgtcacggtggagaagaagaaggactcctttgagtcgctggtgatggagcacatccgcctcaacggcgcctactggggcctcaccacgctcgacctcctccacaagctccatgccgtagatgccgccgaggtcgtcgactggatcatgtcctgctaccaccccgaatctggtggatttggagggaacgttgggcatgacccgcatgtcctctacacgcttagcgccgtgcaggtcctctgccttttcgatcggctcgatgtccttgacgtcgacaaggttgctgattgtatccttttttcccagattttgaattgggtttgtgctgttggtgtatgtaaaattgatatttaccaatctcctggtgagcaaagccagttctgcaactttggttttgttgttaagctcactgaacttggaatccagttcctcttccttatctaaatcacgccagatgtcgccggactgcaaaacaaggatggatcattttctggcgatatttggggtgaagttgacactaggttctcgtatattgccttatgtaccttatcattactgcaccgtctgcataagattgatgtgcaaaaagctgtggatttcgttgttagctgtaagaacttggatggcggatttggagctatgccaggaggggagtctcatgctggacaaatattttgttgtgtcggcgcgctcgcaatcaccgggtccctgcatcacattgatagagacctcctcggatggtggctctgtgagcgccagtgtaaagacggaggacttaatgggcggctgagaactagctgatgtgaggtttactctgtcacaagtcatgcgtggtctgcattcttcagtacatgtttccacgagcccgctatggatttaattgaaccctaccaaattctcaaggtttgctactcgtggtgggtgctatcgagcctagtcatgattgacagagtgcattggattgataaggaaaagctaacgaaattcatactgaactgtcaggacaaagagaacggcggcatttcagatagaccagataatgcagtcgatatctatcacacgtactttggaattgcagggctttcattaatggagtaccccggggtgaagcctttggatcctgcctatgcactaccattgcacgttgtcaatcggattttcttgaaaaaatagaacattccattcgatctgcggcgcagagatatgctgagatggcgctgtcagatgtggacgctacttcacagaaccacgattcgacggagaaatagctgagggggaatcaattacaggaacatgttgggataccataatcttggacttgtattctcgcattggctgtggccgcttagtcgatgtttttttgtcatttggcacttgccctgttgaatgcttggtgcatgctgtgttttgctagttgatctgattctcttgtttaagtcgtaacattgtgtgtcctgatgacgacgacattagtcaggagctatctataaacagtatgtcttttttgtttgctttttttacaaatgataaacaaacttagccaaaaaaaaaaaaaaaaatctcgaccgcgggcccggtaaaaaaaaaaaaaaaaagggcggcagctcgcgatctagaactagt

SEQ ID NO: 91300 - DNA, 239 bp, Zea mays
  Clone ID: MRT4577_183265C.1
gtcatatataatgataccccaatggctcttatactccttacctacaataataaaacaacagggcgggcgatttatattatacacacttaccatcacgatcctacccatgtacatacactttatcttgtcaggtactttatattaaatggacatatttttgcaacgtcaaataatgaaaaaacatgccattacctaactttaattattattaacacatacacatgttttcatttattgta

SEQ ID NO: 91301 - DNA, 602 bp, Zea mays
  Clone ID: MRT4577_183266C.1
gggtacctcgaggccggccgggccgggatcacgaacatgctctgcgcaattctgagacagtgaagctcgttgctttgatgcctagctaagcacactctgcttcctccgagcttgtcttcctctacagacccacctcatccctgcaagtctgctgctaggcttgatctatggctcatggagacatggcccacatagactcaccgccatgttctggtgctgcgcttacagactacacgaacaggtaagctcttctgagaggctcatgctagaccatcttccattcacaagcgacaacatgcaagatctcctcatagcacaagcgcctgcgacttccatgtaccgtaccatgaccacgtacaggacaaaggactcctgtccatatttccaaatggatggtgctgcccatccagatgagggtgggcatctgatcatcacatgctattggatgcctgacgtgacgcgatatatatttggtcaatagccatccacggtacgtcgtatgtcagaaacctccagctggaggttatgctcactgagcacattcgttcttcgatcatatagagtgcctctagctaggtgctgacgagatcttcgctaaacct

SEQ ID NO: 91302 - DNA, 1114 bp, Zea mays
  Clone ID: MRT4577_183267C.1
cccacgcgtccgccccgaatctggtggatttggagggaacgttgggcatgacccgcatgtcctctacacgcttagcgccgtgcaggtcctctgccttttcgatcggctcgatgtccttgacgtcgacaaggttgctgattatgtcgccggactgcaaaacaaggatggatcattttctggcgatatttggggtgaagttgacactaggttctcgtatattgccttatgtaccttatcattactgcaccgtctgcataagattgatgtgcaaaaagctgtggatttcgttgttagctgtaagaacttggatggcggatttggagctatgccaggaggggagtctcatgctggacaaatattttgttgtgtcggcgcgctcgcaatcaccgggtccctgcatcacattgatagagacctcctcggatggtggctctgtgagcgccagtgtaaagacggaggacttaatgggcggcctgagaaactagctgatgtttgctactcgtggtgggtgctatcgagcctagtcatgattgacagagtgcattggattgacaaggaaaagctaacgaaattcatactgaactgtcaggacaaagagaacggcggcatttcagatagaccagataatgcagtcgatatctatcacacgtactttggaattgcagggctttcattaatggagtaccccggggtgaagcctttggatcctgcctatgcactgccattggacgttgtcaatcggattttcttgaaaaaatagaacattccattcgatctgcggcgcagagatatgctgagatggcgatgtcagatgtggacgctacttcacagaaccacacaagttagattcgacggagaaatagctgagggggatcatttttacatggaaacaggaacatgttgggataccataatcttggacttgtattctagcattggctgtggccgcttaggcgatgtttgtttagcatgtgtttcgctagttgatctgattttcctgtttaagtcgtaacattgtgtgtcctgatgacgacgacattagtcaggagctatctataaacagtatgtcacttttttttgtttgtttttttacaaatgataaacaaacttagcc

SEQ ID NO: 91303 - DNA, 850 bp, Zea mays
  Clone ID: MRT4577_183268C.1
ccattgcgggtacctcgaggccggccgggcgccgggaaatcctaaatcctaggtcgtcaccaccgatcttatgcttccatctctgaggctgccgccagccaccggccagcgtcgttcgctctgtagcagtccagctctgcgcccggcgccgcagccccgcatcgcgcacaggcacaacttctacggtcctgccgctgatcgccgcacgtggccgcgccgccgcctccctcacccgagctcgaccgcgcttctccagctcgccgcctcgacggtcgctgcctcgacacctcccccgcgtgggcatcagccgggagcagagagccctggtccctggaggcgcgtcgcgttacggcgggggcgcggcctccccagccccccttggtgatcggtcctcccccggcagactcgcctcctcggtcttgcgctcctgcgcggctgcgcgcccagcgccgtgcccggtggcggcggcgaccggcgacggtcagcccccgacagtcaggacttccgactccggacctccccctcagccccctctgtccgttccagtcccagctcgagcttgaaggttgaaacaacaagcaagatattttgaaatagcccccgccacgaaattcttcagccatcgtggaggggttcagttcaggggaggactcgactcaggaaacaggagcacgagcggagcagaaggcagtcatggcggatgaggtggagctcgctgcggaccagcacgtccgctacatcgtcacggtggagaagaagaaggactcctttgagtcgctggtgatggagcacatccgcctcaatggcgcctactggggcctcaccacgctcgacctcctcacaagctcca

SEQ ID NO: 91304 - DNA, 547 bp, Zea mays
  Clone ID: MRT4577_183269C.1
catactgactgtcaggtaactgttctattattcccaccactgccatttgcgtaacccgtatgtcccttgacttataacaggtactggttcgaactcttctcattcatgttgatcggcaggacaaagagaacggcggcatttcagatagaccagataatgcagtcgatatctatcacacgtactttggaattgcagggctttcattaatggagtaccccggggtgaagcctttggatcctgcctatgcactgctattggacgttgtcaatcggattttcttgaaaaaatagaacattccattcgatctgcggcgcagagatatgctgagatggcgctgtcagatgtggacgctacttcacagaaccacacaagttagattcgacggagaaatagctgagagggatcaattttacatggaaacaggaacatgttgggataccataatcttggacttgaattctagcattggctgtggccgcttatgcgatgtttttttagcatttgtcatttggcacttgccctgttgaatgcttggtgcatgctgtgt

SEQ ID NO: 91305 - DNA, 156 bp, Zea mays
  Clone ID: MRT4577_18326C.1
ctatatcagacgcgcaaggagctaactctaactatttcttcacggctaacacctacacatggggtgcatccaccagggggggtggcgctaccgaacaagtacatgggcaagctcaataccaccatcagagacagtacactctcgcggacagagctc

SEQ ID NO: 91306 - DNA, 268 bp, Zea mays
  Clone ID: MRT4577_183270C.1
tccgttacgaggaaacccaccatcccctcgggtgggttcctattcctacttacgtcaccaacctgcaaagatgacttgggtgcgtacacttcgttttcgtctgctccctcctccaaatatatcaacgcttcctggtgggttaatcacattgttacgctcgcgaggctgatcagaatttctgccgaaggcccccgcgtgaacgtctaatcctcagcagtttcttcagccccaactgcagatgttgctgaatcacacgccccagctgctg

SEQ ID NO: 91307 - DNA, 515 bp, Zea mays
  Clone ID: MRT4577_183271C.1
tgataaaaaaaaaaaaaaaaaaaaaaaaaaaaaaaaaaaaaaaaacaccattaaaaaaaaaaagcgtcgaacaaacggaaaggacccaccctaacataacaagtttttgcaccgagaaaacaaaaaataaaagcgtcgcctaaaagaaatccaaaagaccaaatttttaaaacccctgttactagcaaaatcgatgggggaaacccttttttttccccttctaaaacatccccctttaccaaccggttttaacagctggaggatccccaaaagatcgcccttccgaacggttttccaaactgaccgggaaacggaacgctcactgcaacgcccctttaagcgcggcgtaaggggaggttaccctcagggttacccctaccgtggccagctccctagcccccgccttatggcctgttccttttgcttttttccccacgtttgccgcttttccccgggattctctaagtggggggctaaatcgagggctccctttaagggcctaattgagcgtttac

SEQ ID NO: 91308 - DNA, 587 bp, Zea mays
  unsure (1)..(587): unsure at all n locations
  Clone ID: MRT4577_183272C.1
ctcttggcttgaacaatcttacttacagagctacatggcaagctccacatacaggattatagacgagctggctttattctatttccctagaagttaccttcttacttccagcagtagggggtacatcctaacgcacactcataaatggcgacttactttcaaacatacgcggtggcataacctggaaccagtacacactgagacgggcggcgtgagatataagattatctcgaacctttgactccacccgtcattaaatttctggccgctctgcnacttcgcaagacagacgctgggggttattcactacggccattgggcgnntcggctggggngngggcgggnggggctggccgccctnnnntnncgnccnggggggtnnnccccgggggggggggggggnggggggggggggggcggggcgggngggggggggggggggggggggngnnggggngggggggggggggnggggggggggggggggggggggggggggggggnnggcgggggnngggggggggggggggcgggggggggcgggggggnggcgggggggggggggggggcgggggcgcggggggcgg

SEQ ID NO: 91309 - DNA, 872 bp, Zea mays
  Clone ID: MRT4577_183273C.1
tcaagaccagaatgatttcacgccaatcgagagcacagatacaccaacctccagcctcttgccacggagggtacacgctactctcgccatctctccactcccattgtgtggtggcctttctggtattggtccgaccgaggcaaagtttacccatgacgaggcatgtggccagttaaatgatcctcgatcatcaagcctacattggctcggtccttaaccgaatcagatagagacactacaccgagacttccttctcgtgcaagtcacccgcccggtctcatcttataatttataacccaaagcttggtacctgtcagaggtactctttccagatgttgaatccatcacgaccatgatggattcatcatcataagtttttctttgtaaaaaatcccccttccagtgtgaagcaccacctttttaaaacaaaacattttgtttgtttctacgcaaggctaagcatcattaaaacttgttttgagtaaatcaggtgttagcgaatggtactcaatttctcaaggaaggaaatgcatcaatagtttatcacacaatccttattacctaatgcaacattcaaagatgataaaactttaaaatacaaggaaaggtaaatgcactggggctttccttgtgtcgtaggagtagctgcttcttcaccatagatgtcgaagtaaaagttgttctccacgggaggattctcagtcagaggaacaacttcttctactgtagactcttcttcatgttcggagatgacatgtccacgataaggcttctcacgacgacgatggtgaccggtttcaaggaaatctgatgaacttgagctatggtggtcgagaggggctggctgaggttgtgttgggtgcgtaacagag

SEQ ID NO: 91310 - DNA, 237 bp, Zea mays
  Clone ID: MRT4577_183274C.1
ctccctacccgttgtctgacggctggcttctctcatagcccacgagctctgtgtgcgacgggggactactcgggcgaccagggggtcgtctcctgccggggcttggtggtcgagggagactgtggccgatgtgaccgtctcgaaccgtggcataggccacgcgctcgccgcccgcctggccgagcacggtctcaccgtggtgctcaccgtgctgcactgcgagcgcatggaggccat

SEQ ID NO: 91311 - DNA, 496 bp, Zea mays
  unsure (1)..(496): unsure at all n locations
  Clone ID: MRT4577_183275C.1
agcagtccggcgtcaagttatacagacagagcttcgagccacacgtgctggcgtctgtacagaactaggatgcactagtcgagcaggtaggagcagtcggtagaccaggttctaggtgagtagggatgagaggcngatacatcgagactgatcgaccaagaggtccgggagaaagaaagatagatgaggtaggctagtcccgagggatgagggatgcatagatgcaaagtcgttcgtttctgcgagggcccttcatatcttcttcttccaagatatgccaggcagccagcccgctttagtttttatgttcctatctagccgtagaccaaaaccttcttagtgaaatttctttaatttagcctttttagctaagaaagttcttaattttcatagtagtaaattttagtaccaattggccgtgggttaagaaaaatcacaatntttccaaactcagtcctatagcttactgagaagttcgtgatcttgatagctgatc

SEQ ID NO: 91312 - DNA, 174 bp, Zea mays
  Clone ID: MRT4577_183276C.1
tcgtctggcagcatagaatgctctttattttaccaacaatggcagccaaaattgtgagtctcctaatgctccttgagctcctccgcacgatgctgctacaggtgacacattttcccgcatttgcatcgcaagcttcccatatgctattctatcttccttccgacctttttactc

SEQ ID NO: 91313 - DNA, 582 bp, Zea mays
  unsure (1)..(582): unsure at all n locations
  Clone ID: MRT4577_183277C.1
agctgatggaatcccggctgcattttttggtttatgtcgcctactgcctgctttgacgcaccctctctctctctcttctctctctctcctctctctctctctctgactctgagaaaaacgattattgtaaatctttattagtacccagaccgaattctgttctaaagtgatatatgtgcttcttccagcatcaggctgcttaaggctttaccggccagtcaattcaagcagagagtgctatcaaaaagggaaaggtgatcgtctatatatggatccatgccgaggaaggagttcgtcaaggaggggctccattgctgctggagctggacatggtcactttgatgcagacgacgatgcagcagcactagttcctcctccttaccgcctgttcccggagccggaggagacggccgcccgcgacatccagctccgtcagttcttctccgtggatcggcgccagccgccgcagctggaggtacttcttcgttaattctcaataattttggatcctcaaggccggggcaccgncgccgatcccttctctcaactggcaacaatgggggacaggatgcaactgccctg

SEQ ID NO: 91314 - DNA, 438 bp, Zea mays
  Clone ID: MRT4577_183278C.1
tcgagcggccgcccgggcaggtaccattcaccagcttatggtggcacgtaggatggcattgtcatgcactcatgctaaaacgatgaagactgtttaatgtagacctagatgatctttgcggatgggagaaaagtgccagtttgcaaacttatagcccaggaaaggagaagtggtttaagaaatcgtttggattcaacatattggatttatggtgagaccgtcacatgatttttaaaaaaaaaaaaaaaaaaaaaaaaaaaaaaaaaaaaaaaaaaaaaaaaaaataaaaaaaaaaaaaataaaaaaaaaaaaaattaaaaataaaaactttacccctcttaagggaaaattctgagggggtcttttgcactggcgcccgcctctgcgggccttttgagggcccatttggggggccaaattggccctttacaggggcct

SEQ ID NO: 91315 - DNA, 621 bp, Zea mays
  unsure (1)..(621): unsure at all n locations
  Clone ID: MRT4577_183279C.1
ttctcctngaanatacggtaccgggatcggtctgagccgccgaggcccgcgcaggcgcttccttatatatcgtttcttggcgtggctaaggtggtggtgaccatccggtgaatatgaacattgtgtgtgaagtatgtggagatattggttacagacaacttctgctatgttgcggagactgtaagcgttatgctgtgcaccagtactgtttggacaaagttgttttcgatgcaacgttgctagaatggttctgttatgaatgcctacaaaggcgtggtgaagttacttgcgtcgcatctctagaacaggtgtcaagtgaaagcccactaagtcatgctcattttggtcctctagtacatcagcgtactactaagagggtggagtcagtaacagggccatattcacccagtgatgactgtgaggaattattttcctaccctggcatagaaagcatcccaagtgttcaagaaataagtgtagatcccattaagacttcaagtatttctgaacatgataccatagaagcagctgcaagcagtgaaagattcacggagtgtcaaaaggctagctcctgtcgcgaggngataactgtgaagatggctatggcgccctcatcatatg

SEQ ID NO: 91316 - DNA, 297 bp, Zea mays
  unsure (1)..(297): unsure at all n locations
  Clone ID: MRT4577_18327C.1
tnattattttttttttttttttttttttttttgtggtttttttttttttttttttttttttttctagaggaaaaagggtcgcccgcagttaacccccctttttagcattattcccggtccccagcaacttttaacatgggttgttccccaaagctagaaacagaaaaactggtggtggtgatagcacaaccaagggacgggggaacctaacccccccttggggattgcacttctttggcggcgacctcgcttgagacacaaggggagcacattattcctgacgcgaattaggcagga

SEQ ID NO: 91317 - DNA, 833 bp, Zea mays
  Clone ID: MRT4577_183280C.1
catgaaggcccagcatcctcggctccgtttcctcttctctcccgatccgcggttggccggggcttcgcttccttccctgatctttgcttcccagacggccagatcaggcgaaaggcgtgacgggggccaccgctgcggcgccgcccctcgaccctccgctgctccgcctgcgctggagaccatccatctggaagagatctctgatttacgggatggacggagccaagccagtggcggccgggaagcaggacctggaagaggcgctgctccgtatcgtgcagcagcaccaccaccagtccctctgccaacgacaacaaaccgagcgtgcaaagaaggacgccttgaagagcgcggtgcgggtcgccgatctcctcgtggacacggtcgacggcggggtgcgggagctcttcgtcaacgagaagcgcatcgagctcgaggcccgcgcgctgctcggtacgatcgcgcggtacaggaggcagactgatgagtggctggcggccaccagcgagatcaactcggccctgaaggaaatcggagacatcgagaactggatgaagatcatggacttcgattgtaaaagtatcaatgcagccatacgcaatattcaccagtcatgactctgcccgcgattacaatttcacgatttttaggaagtatccgtgtcattacgttctctgattagaattattgggtctggaaaccctctttttatggaaccgtgtctcctgattttcccatgcagctatgagtgtatgtacccttcaatttcaaagtgatgatatatataggatcaaaatacaccaaaaaaaaaaaaaaaagggcggccatctgcg

SEQ ID NO: 91318 - DNA, 541 bp, Zea mays
  Clone ID: MRT4577_183281C.1
gtcgacccagcgttttcggacgcgtgggtttgcttcccagacggccagatcaggcgaaaggcgtgacgggggccaccgctgcggcgccgcccctcgaccctccgctgctccgcctgcgctggagaccatccatctggaagagatctctgatttacgggatggacggagccaagccagtggcggccgggaagcaggacctggaagaggcgctgctccgtatcgtgcagcagcaccaccaccagtccctctgccaacgacaacaaaccggaaatcggagacatcgagaactggatgaagatcatggacttcgattgtaaaagtatcaatgcagccatacgcaatattcaccagtcatgactctgcccgcgattacaatttcacgatttttaggaagtatccgtgtcattacgttctctgattagaattattgggtctggaaaccctctttttatggaaccgtgtctcctgattttcccatgcaagcacctgtgctatgagtgtatgtacccttcaatttcaaagtgatgatatatataggatc

SEQ ID NO: 91319 - DNA, 560 bp, Zea mays
  unsure (1)..(560): unsure at all n locations
  Clone ID: MRT4577_183282C.1
gtgtttgttttttgacagagacaatctcacaggaatatgaatacaaaaatgatacacatacaagttgtagtagcaatgggcgtcacgtggcaggtacagatcggagacatcggcaacatcgacgacctcgtcaacatggagaagacgcgcgggaggcgcgggcanagcggtggacggtagaactaagcaaacgtgaaagacgacctaaagtcgccatctcagccgagcgagcggcgaggaccggcgctgcgaagctttgggatctcgggcgtacggagagatgaatctgctagggatgaaagagttgctcagcttcagggccgagttgatctcgctggtggccgccagccactcatcagtctgcctcctgtaccgcgcgatcgtaccgagcagcgcgcgggcctcgagctcgatgcgcttctcgttgacgaagagctcccgcaccccgccgtcgaccgtgtccacgaggagaacggcgacccgcaccgcgctcttcaaggcgtccttctttgcacgctcggtttgttgtcgttggcagagggactggtgggggtgctgct

SEQ ID NO: 91320 - DNA, 527 bp, Zea mays
  unsure (1)..(527): unsure at all n locations
  Clone ID: MRT4577_183283C.1
aacgaaagcaaaccctttttcagcaacaanaagaggggggggggggggaggccagcaaacacngcancagaggggaacagcggncgcngcnaaaccagcccccacggcagaagggcacaaacnnggacnaanccggcaaagggncnnaanaaaccacaanacaacgaagcancnnnggnaggtaagacgtgcacggagggcgacccttttttttttacnncggcgncnngggcacccngaacccaccccaacttttgcanggncacgcgcggagggccccaacgncaccngcnccgcgggcnngaacgganccgccnngagcaacaccacaaccgcngcaaacacggccgcagcaggcaggggggagncgangcagnnagccnnganggaaangacaaagnggccaccgnncnncaagaagnangaagcannaagggcnaagagccnagccggcaggaganaacacanncacgcaagggnnaaaagccgnaaaacacgggcagggcaannnccaccaaacccaaagg

SEQ ID NO: 91321 - DNA, 904 bp, Zea mays
  Clone ID: MRT4577_183284C.1
ccccgcgtccgctttgcttcccagcggccaggagcaggcgaaggcgtgacgggggccaccgctgcggcgccgcccctcgaccctccgctgctccgcctgcgctggagaccatccatctggaagagatctctgatttacgggatggacggagccaagccagtggcggccgggaagcaggacctggaagaggcgctgctccgtatcgtgcagcagcaccaccaccagtccctctgccaacgacaacaaaccgagcgtgcaaagaaggacgccttgaagagcgcggtgcgggtcgccgatctcctcgtggacacggtcgacggcggggtgcgggagctcttcgtcaacgagaagcgcatcgagctcgaggcccgcgcgctgctcggtacgatcgcgcggtacaggaggcagactgatgagtggctggcggccaccagcgagatcaactcggccctgaagctgatcaactctttcatccctagcagattcatctctccggttccaaatacagttgaatttgctgactggattggtcgaacaaagcagaagaaaattcgtgtgacttcgaaatcggagacatcgagaactggatgaagatcatggacttcgattgtaaaagtatcaatgcagccatacgcaatattcaccagtcatgactctgcccgcgattacaatttcacgatttttaggaagtatccgtgtcattacgttctctgattagaattattgggtctggaaaccctctttttatggaaccgtgtctcctgattttcccatgctatgagtgtatgtacccttcaatttcaaagtgatgatatatataggatcaaaatacacctgtctgaggatgtgttacgcccgagatcccaaagcttcgcagcgccggtcctcgccgctcgctcggctg

SEQ ID NO: 91322 - DNA, 124 bp, Zea mays
  Clone ID: MRT4577_183285C.1
ggcattctctgatgccctgttcattatccaacactacgtgttgttacctgtacagtgcgtcgagtacggtaacgcaagcacatctgaaagggtacgcccccttatcaggccttcggacaagact

SEQ ID NO: 91323 - DNA, 454 bp, Zea mays
  Clone ID: MRT4577_183286C.1
gtccgcggcctggatttcttcctgacccgcgtcccgcacgaggactacgtcttccccgggtggcagataatggagtgccgcggcggttgccttctcctcctcaactggagaaccaagcagctcgccgcctacaaccccctcacgggggccttggatctcgttctcaaactgcctgacgacatctgcaaagggcaccgcgataagttcatctgcggttattctttcctggtagttttgtgaccacgaggctcctgacaggcaatcgttccgcgtggtcttcttcagccacgacaagtaccgtttgcgctgttcctttttcttgaaagccatctggtatttgcatattttccctgtggtccgatcctttttttacataaacctgtaggttcatttttttcttgacttgtaaaatttccatttttttttttaggggacccttcttttttgttttttt

SEQ ID NO: 91324 - DNA, 540 bp, Zea mays
  Clone ID: MRT4577_183287C.1
ttttttttttttttttttttttttttttttttttttttttttttttttttttttttttttttttttttttttttttttttttttgggccgggggttttttaattgggaaggcaaaagggtccccttaaggggaagcaaagggcatgttaaaaaaggcccattacaaagctgctctaacccaaaagcaaggaaacttctttgggccccccccccacatttgaaaacaaaatcaggatttaaggataaaacttatttttcttgaaaaaaaaccacatgtccaaggggccatctcaaaagttcccatcccagggaaggcaaaaagggaacattcttttagtcccccaccccccagttaaggaaaggggaaaaattcacccaacgaagttcattacaacaaggggcaggatggggctggcaaacaaaaaacagcaaaggccccctctggggagaacccctggaaaactgctttgttctggggggtgaactggatcccgaggcaaaccgctaggatgaagccccccacccaaaaaatgaaccccc

SEQ ID NO: 91325 - DNA, 177 bp, Zea mays
  unsure (1)..(177): unsure at all n locations
  Clone ID: MRT4577_183288C.1
ggccggaaaanaacgcctccgacccacgcgtcccgctgaccaactaggatcagcggcagcagcaatggggatggcaggcacaagcggactgaggagctgcagagcccagggcgtacccagtctgctggctgcgtcgacccaggccggacgaactggcaacagaatgagaaaacgcca

SEQ ID NO: 91326 - DNA, 325 bp, Zea mays
  unsure (1)..(325): unsure at all n locations
  Clone ID: MRT4577_183289C.1
atggcccatcctttagaaataaggacgcacaaatgttcgggtttgaattgacattatttgctatcttattaagcctatctctgaaccaaagggaatgagatcgcaatttctacgggaattccaatttcacatttttaagaaataatgaggcaacnatgttcatatatgcaatggaattatttgttttcttattaggcctatcctgcagccaaacgaaatgtgatcggacttcctagcggaatcccaattgcacattttcaacaaatgaacgagcaactgtgggcatatgttaacagacattatagtgttgcttattatgcctatc

SEQ ID NO: 91327 - DNA, 490 bp, Zea mays
  Clone ID: MRT4577_18328C.1
gagtcttctagtcggcggccgccgtcgacggcgagctgccgcagcgtctggacgacggagaaggcggcggcgctgtcgaggccgctggtgggctcgtccaggaagaggaggcgcgggcgggtgaggatctccagcgcgatgctcagccgcttcttctcgccgccgctgatgccgcggaggtgccacgtcccgatgtggcggtcggcgcactcccggaggcccatctcgtccagcgtctcgtccactatgcgccgcacctccgccttgcgcgtgctcgacggcagccggaggagcgccgagtaggtcaccgtctcgcgcaccgtcagcgtgcccagcagcacgttctcttgggtcacgtatgccacgatgccgttatccagccgcctctttttgccgttgagcagcacctttccggtgaggaccacgttcctttgccagcctccggagagggagtccaggagtgtggacttgcctgagccggaaggcccca

SEQ ID NO: 91328 - DNA, 142 bp, Zea mays
  Clone ID: MRT4577_183290C.1
ggggggcattgtaattgttgtaatatatgagctgaaacattttttcaaaggctcgtgcttgggggggctccccccccgggaatattaatgttgcacccacaagttcacggagcggggaatttggggagccacgaacccacag

SEQ ID NO: 91329 - DNA, 309 bp, Zea mays
  unsure (1)..(309): unsure at all n locations
  Clone ID: MRT4577_183291C.1
gcgaacnacccattatctctctattcctccgcccttatttcagcaccctcccacgtcctcgcgtgcctgttctcccaacggcgggtgcgccccctaactcccccncncccactctggctaccgcgctggtctcctgcgctgctctgccgccgccggccacgcagacttcttcactcacctcgttcgcctcataaaagataatgccaatagcgacgtggagaatctcttctccggcttctccaagacccgcgagaacctctctgtcgtcgacgagctccttacttactgtaacctttccgacaccgaccg

SEQ ID NO: 91330 - DNA, 2414 bp, Zea mays
  unsure (1)..(2414): unsure at all n locations
  Clone ID: MRT4577_183292C.1
aagactgatccatagacccgtatatatgggcatacaaaacaatatcgtacactacatactgcactatttatacaataaagtttgaatttggagattatatagggaaaactgctggagattaaggatcggaacacaagtctttttcttaactcaattcaatcaatcttgcagctcattggctgaagcaatttacattttttttaccaacaatgtgtcagacacaacgaaattgtcatcacaggtcctttttttcatccaaatcaccattcatgtttctgctagccaaaaatgcaaacctttgaaataaaaaggacgagagaaagaagaatacgaaggactgattttgaggagtatcgcagcaagatcttgtatctctaactaaagaactaatatgtattgacgattaagtgaattatagatcagcaggctatatttagtttggcccgtagccacgcggatgcgacttttgccacctccatgcgactgataggctctctttgagatcggtatattgagctgtccagttgagctccttgtttatctttgttgggtcgctgtatacttctgcataatctcctggccttctgttgaggtactcaattttgatgttaaccccagttgccttcttgcaggcatcaacaaactcattaactgagcgacctcttcctgttccaacattgtaaatgccgacttttctaggctctgccttgttgagtgctttcacatgagcatcaactaaatctgtgacatcaatataatctcttatgcaggttccatcagttgtgggataatctgttcctttaatctacaggaaagtcatgcataaacatgagctcaatcttatagcgcgctttgacaacaaagtgctctatatttgactccgttgctctaggaaccctttgtgcccacatcaccatatgacaataatagctacaagttaannnnnnnnnnnnnnnnnnnnnnnnnnagctnnnnncaagatcttgctgcgatggtattagtgttatggtgatattttaccatggattttgcatatcatattgatgtttgtcgtttcgtatctatgttttgtactaatttataactttcgtggcaattggaatgcatttgctacaggttgtccaccaattggatctactgcaacaagtgctcctccactcgcgtgcatgtataaaatggcaggggttctaccaacaatcaacacacctgtgaagtgaagctgggacgtgtaggttgatccacgacgtgtgcatttgtaggaaccctgattttgttagcttgaagacctgtattttcaaattcctcctcgtccggcgccgcctcacggcagctgcggcggcggcatgatgaacgagaagagcaggtagagggagaggagtgcccggactgcggtgggactagcctctgtggccgctgcaaaggagagggcttcgtcttcaagtagctctcgaaggatatgaccaccagggaacacaaggtcgccaagaacatggccaccaaatacactttaggctgtccaccattggacctactgcaacaagtgctcctccacccgcgtgcatgtataaaatggcaggggttctaccaacaatcaacacacctgtgaagcgaagctgggacgtgtaggtggatccacgacgcgtgcatctgtaggaaccctgattttggattttgtatggaactgcaaagcctgttttaagaagaatttctagcaaaattttggatgcacaatcaacacctcaaaactctctcagctttgtaaccttcagaaagtgttgagagaggtggcatctagaggacgtcatgtcgaacgtgtnnnnnnnnnnnnnnnnnnnnnnnnnnntgtgaagcnnnnnagaaacttgactccattttattttctatgtccctctcacatgagccaactaaatgtgacatcaatatactcttatgaggttatcctgtgggaatctgttcctttaacctttaatcctgtaatgactcctaatgctgcatcgaagcatgccccagatatccgaccatgctctcggagttctggcctaggagcctcacctaatctcccctcagggtcagatccaataacattgaaatatcttaaaatcatgacagccatgtcagctcccttcgattttgagaaatctattatgatatcctctgccattttcttagcttttccatatggattgatagggaactgaggtgtggcttctgtaataggcatcttatctggttctccgtaggtagcacatgtactggagtaaataagggtttggactccatgagatgccatagcctccaaaatcagtagtgtgttcgatgttatattgtgatagtacctaaggggttccaatgtgctctctccaacataagcaacagctgcaaagtgcatcacagcatcaaacccacgcgtaaga

SEQ ID NO: 91331 - DNA, 466 bp, Zea mays
  unsure (1)..(466): unsure at all n locations
  Clone ID: MRT4577_183293C.1
ctgacattccaacgccatccctttccgctaacgccagatcactgtcgccatggaggttgcgcctcggcctagccatagccatggcagtaccaatggttacgtccgccgctgcagggatcccttcctacagttcgagcttgggctagtcaaccgcgtacgattccgcaaccagtttctcgctaagcgtattctcgacctcgctctcgatcccttgaccacaatccaaagggagcatgtaggggccgtcaacaccatcgatatcgaagaggcggaaggcagatatcttatatctggaggcggcgatggcaacgtccatgtgtacgatcttgacgactctgaacgggaagagcgccgcgtcatcaagagcatggtgaccacacaaggctctcaaggtcataaaggangaatctcgcgtgtgcgatggtaccctttcgacaacggaatgtttacgacatcctcgttcgac

SEQ ID NO: 91332 - DNA, 687 bp, Zea mays
  Clone ID: MRT4577_183294C.1
gccggccgggttcggctcgccgctgcgcggctcacattatcctcacttttctcaagcatcactgcatcattggccgccgctcgcgcgcacaaaacccacaaccgccccgctcgcgacagactcgcggcgcaggcgaggggagagagctcgcggccaaagtccaccgagagcgaaagcagccgcagaggtagtctccatggccgccgaggcgcccgtgcgggccactgccgcggcgcggtccgcgcgccggccggccgccgccgccgccgtcgtctccgcctcgcgcctcctcctcggctacggccctttcctcgcgccgcgcttcgctgcggagcgcgccgcggtggcaggccccgcggccggactctgcgcgcgcccgcgtaagccacgcctttcggtcgtcgccatggccggcagcgatcgccaagtgcctttacatgattaccgcaatattggtattatggcccatatagatgcaggaaagacaacaactactgagcgcgttctgtattacactggaaggaactacaagattggcgaagttcatgagggaacagctacaatggactggatggaacaagacctagagagaggaataaccattacctctgcagcaacgactgccttctggaactaccccgaatccacattattgatactcctggccaccgtcgacttcactcttga

SEQ ID NO: 91333 - DNA, 187 bp, Zea mays
  Clone ID: MRT4577_183295C.1
ctaattggtttgggggtattgtttatagttaaaagttcacccaccgaagatggaaattggggtgtttcatacattttgttcatgacacagaaaatattctaaggctaagctaatatgcaaagaatgtagtggggggggttaaatggccacacctgaaggaaattgacacttggggggatgggttatt

SEQ ID NO: 91334 - DNA, 460 bp, Zea mays
  Clone ID: MRT4577_183296C.1
attcggctcgagctccggccagttggttccgctgggctaccaccaggcggcggagcgacttcgaggggacgctgcgcgctttaccttccccgacaactcgtagtcgagggcgcctgtcgaccccggcgtggacgccaagctgtaggccatctgcgccaccatcgccggcgggtggcagtcatgcaagaattcgaagggcacaagcacggggatgccatgcaacgcgtgcactatggagggggcaccggcgtctacgagacacaggtcctctgacgaaggctccagctgcaggttcgtgtcgaactactagatggcctcgtcctccccgactccggtggtggcccccccggtgggggccatgggacagttagctttcacaccggcttcgtgcgacaagaccaaatgcttcctgctccgcatgtccacgtcctacaagatcgactgggacgcgctgctctcc

SEQ ID NO: 91335 - DNA, 623 bp, Zea mays
  Clone ID: MRT4577_183297C.1
aaaaattaaaaaaaaaaaaaaaaaaaaaaaaaaaaaaaaaaaaaaaaaaaaaaaaaaaaaaaaaaaaaaaaattggggtggtagtcctagtaaccgggttggtttcccgagtccgcaaccatggttggattgtaagccaccgccgggctcctcctcctggtcctttccttcctggccgtcgcgcattggggggccctcgaagtcgaagaaaagcacgacaccgagcccaattaaaccgccgccggggccgtaagcgacaacaacgtgttttccgaccccacggtccacgttgaggggggcaccgccagcgccactgaaaaggaggccttcccgggggagcagcagcagcatgggttcaaactcctccgcttgccgtttaacgggttccaccaccaccaccacttttgggggaagcgccaccacgggatctaccgggacgcgttgcacaagttcctttgttttggccacggcgcgaggcgcaagcaggcagtgagccaccttgcctttttgcccgcttccgaaaaggtggccagggaggcgggggaggaaatccccgtggccgacccggacccggatcgttccctcccggcaagcgacggaaaagggggaagggggctttttac

SEQ ID NO: 91336 - DNA, 866 bp, Zea mays
  Clone ID: MRT4577_183298C.1
gagtcacagagcaaatacaataaagcataaaaccatacatgtcacaatgttaaattattacatcaccatcatcatcatcggagtttttttttgcaaaagtagccatcattgttcgaagtgcagcggaataaaactaacggtaatcaaacagagagatggggaagcctgtcccatcactcctcatgctcctcctcagccgaggcagggtcccactcaacagtccaacccggtggttatgcataaaaccggggcttgccttccaaagcagtggcaggcaggtcctctggtgcaggctcgggtgctggatctggggctacctccggagcagctccttgctccggcacgaggatgtactctccgtcagcaagattacagtctatcgaaatgcaatgaacattaaccgcgggaaagaaaagggcggcgcggcttaccggcggcgagggaggtccggcgaagggtggggtcggctcggggagactctggcggtcacgtcgaggtacggctcggcgtcggaggtggccggaatcgcccggtccacgcgtgcaggcgggtgtcctcgtcggcggcgagtataccggccaaaccacggcgaactggttcaatccgagggtatggtgagcttcacggggtatcgtagcgaccgtgtgcgcaaggaatcgaaggatggtggattggtttacccggtccacgcactccggcggggggttttggaaggtagggcttttgagaggtctagggttcttctccccctattatccaaggtaaaaaagacctaccggatatttagttgtgattttctaaagtttaatgccaaaaaggctaaaaatgatttaaatggcaaaccctaccttaatttggtgtactga

SEQ ID NO: 91337 - DNA, 598 bp, Zea mays
  Clone ID: MRT4577_183299C.1
tgggtacctcgaggccggccgggaactcatgccacacgagagtgctccacaggactctctgcgagatgcatggccttcgttttgatccttgagaggatccgctgcttcctatccaccggctcctaggtcaaagacactcgctggcttagctcaaactggcgcttcgcgcgtcatgggagcgctgatggcttgaatctgccagatgagtccatgatcaggcctgacagttccgggaccctccggctctagtcccagtaccccagcgtgaccttcatttcctaatagaatacatacgtggacatcttcaagacactcctcctccgctgaggcgtgagacgacgctgtgaagaccggagggggcgcggttgatgctgccgacgcggggacaactgcccgagccgagctaaccaccactcaaggaaacgatcatcgggacgtcgcttgtcttctccccactctacgactataagatctgtatgctgacactcgaatagtgagcgctctctcccgactgctggttcgtgataatccatgaggtgcaaaccgtcgctccttgcactcctgcatcctgctaccgcattgacgtctgattcacgtg

SEQ ID NO: 91338 - DNA, 258 bp, Zea mays
  Clone ID: MRT4577_18329C.1
ctggatgcactggctattatgtgtgtatgtgagagtagtggggaggtttccctaaacatttttatgaggtgaacgttagcggtgtcagaaaagctggagtcggtggagctcaaacagtatatagtacgtaggagatggagctacctaatacgtaggcggagaggagtgtttatatttaacaatatgtaatatgttgtaatatctaggtggagaagagagttatataaacagtatataggaggagtttattataagatc

SEQ ID NO: 91339 - DNA, 511 bp, Zea mays
  unsure (1)..(511): unsure at all n locations
  Clone ID: MRT4577_1832C.1
actcaatatatatttctttcttgctcttatttgcccttttattgagcgcaaaaaaagccgacaaaaaaaccagaggggcgcacaaagaacccacccgccaggaggggacaccccctgccaacagccacggggggggcccccgaagagggaaacgggcaaaaaaaaaaaaaacaaggggggcgggcggcgagcgcctaaaaagaaccaattgcccaatagggagggcaaaacaagaaacagggagcccgacaaaccaacgcagcgaggagaaaaaacagggggcggccccactgaagcccctaggcaaagaagaaccctgtcgcctacggggaacagcagaagagggcacccaacccacttgctctggcgaacgtagctgcataccaggaacaacaacacccgcaacagttgatgccaacgctcaggcgagaggcgtggtgaaccctgccgtctacctacaactgcgttcatctagcccgcccgctgtgggcantgcacctacgtacctgcc

SEQ ID NO: 91340 - DNA, 1455 bp, Zea mays
  Clone ID: MRT4577_183300C.1
atggggaagcctgtcccatcactcctcatgctcctcctcagccgaggcagggtcccactcgacagtccaacccggtggcagggtggtcggccaagttatcccagcaaccatctcctccagagaacctgtaaaaattatgccacaagcaaggctgagtatactaatactcagctagacttacccggggcactccgtccccacacacatcaaccgtccccatcgattccctgtcagcagagaggggctcaccgccttggcgtacaatgcctcactgaccccgactggccgtcgtgcagtgaccgcacttgtacccaccataaccggaatgggagacctcgtctcaggtcgcgtgaggagggcaatctgctgccaggttcaatcaggttatgcataaaaccggggcttgccttccaaagcagtggcaggcaggtcctctggtgcaggctcgggtgctggatctggggctacctcctgagcagctccttgctccggcacgaggatgtactctccgtcagcaagattacagtctatcgaaatgcaatgaacattaaccgcgggaaagaaaagggcggcgcggcttaccggcggcgagggaggtccggcgaagggtggggtcggcttggggagactctggcggtcacgtcgaggtacggctcggcgtcggaggtggccggaatcgcccggtccatgcgtgcaggcgggtgtcctcgtcggcggcgagtataccggccaaactacggcgaactggcgcaatccgagggcacggttagcatcacggggtcacgcaacgactgtgtgcacaaggaatcgaaggatggtggagtggcttacccggtccacgtgctccggcggggctattcagggaggcagacctttacatcaccaccgacgaacgggcttaggacctcatcgggggaacgaagcctgctccatctgcaccatggtgtgacacaaaccagtagaccgataggtgttgggagaagaggcctcgtgaagaggtccatgccgctggaccaccagtctctcgcgcccgaggggcaccccgcgaaggcgaacaaacattggatgacaagggatcatcaccatgcgcgcttcgactgcggatacaatgtcatcatcgacataccaggattggcaaaattcatggccattccgcactattcatacatgatattgaagatgtcgggaccacaagggatcatcaccatgcgcgctgacttccaaggcgccgcagaatgttttcgagtggccattcaggcggccctcaccaccaaaccaccgacgacttcttccgtgcatgcaaactcaaagcctgaggaagaccttacgatacctgcgaataaagctcaagtcgtgacctctatgcggccgactgaggagacgaagagaatcaaccttgggttcaccgatgaacgcaagactgccatcatcagctctagcctggacgataaatag

SEQ ID NO: 91341 - DNA, 411 bp, Zea mays
  Clone ID: MRT4577_183301C.1
ggaaactctagggaagatggaccaccatgtgaaaaaggctactataccagatagccttacagtgaagaaacaaactgaagcttccagcaaagctctctctcattgtggaaatgatagaaagattggcaggtacagcagcaggaaatatgatgactggagaagtaagcggacacctgatcacgaagagagcttcccacctgaaaagcaagtggaagttgcatatgaggagacaaaagttattattccaagcaaaaagattactcataacgaacaaagcggtgcttgccgtgaaaatagaaagaattcttgtgtggaggaaaccaagaacgtggagtacaactatgagcagcagactgcagcagggatgaggttcagagagggagaggattctgacatgagtatctcaccccc

SEQ ID NO: 91342 - DNA, 201 bp, Zea mays
  Clone ID: MRT4577_183302C.1
ataaggtaaaaaagggggacttatcaataaacaatttagcacgttaacacaacgcacaaaaaatggtacggaataaaactattatacggcggaaagagttgacgctttatatgcacgacataactaccacccaaaactggaacaatggtaacagcataaattaacccgagcagtgcgcaaataagaataccttgcttacat

SEQ ID NO: 91343 - DNA, 362 bp, Zea mays
  Clone ID: MRT4577_183303C.1
atccaagctatggtctatctgtagtcaaatttcactcatcgctggacctagtcaacattgcgccttatgcaaccaaatgggtgaaagcttactctaagtagacatctacagaagatgacactaccaatataaactcataggaagcttactatgataaaccttactagtcctataaaagcccaaaaatctatgcacagactctagacattcaattctactaatagaaatttagttcatgtatctgattaacgatatatgagataacactatatagtcaacgtttcatctaacaattgctattatttactaatcatatattttgaccatttagtttaacattacttgttcactatttcatttta

SEQ ID NO: 91344 - DNA, 372 bp, Zea mays
  Clone ID: MRT4577_183304C.1
actccttaaaaataaaccggggccttgtggtttttcataacaacaaccataccacaaccagaaccgcaaccctgacacaacagctccccaatcaaaaacaacacctaccacctagaacctaacaacccacaccaccaaattttcacacaaacaaggccaaacacccccccaaagaactaacatacccctgccacgcactgaagaaaatgacttaagcctcttcctcaacttcctcctcctcctcaaactactcatccaaagcgaattcatcctgccactgatcatacgcgggcacgagatcattacacgttcctctcctcctcggtgacctccaactcatccataccctcacctgtccaccagggcaagaaa

SEQ ID NO: 91345 - DNA, 1491 bp, Zea mays
  Clone ID: MRT4577_183305C.1
atggagcaggatgcacttgagaccaaagcaaggtctgacccagagaaggagaggatggaggaacaaattaaccttgctgaggatgcgaagccagtgcctagacatttaactttcacccccccttcctcaccagaattgtatgaggccagtgacaatgactcctacgactcggacaggtccactagaatggcagacaacaacacaaacacaccttttcgaccacctgctgctagcccaaatacaggtaaccaaattttccccccacccatgtgggatcctcagatgtggcaggcccaagggttcgacccaacacagggttcaacatttagtaatccttcattttcccatatgatcaatcctacctggtcccagggacctaatgacccatctgcatgtacctttcgtactccatggaacccatattttggtatgacaaatcctgggggtcctcctacacaaacatctttcggtcaaccacaattggtaccacccattccatgtccaccggtgtccacccatgttcccaaccagactgaccctataacttttgaatccaaagcagaacacagcgtccaggaagttaacagccctaccaagccttcagatacaccagggacatttaggaggacgaaggaacagaacttcaaacctgatgaagacttgttgctttgcaaaacatggttagagattagtagtgacccagtgattagcacagggcagaggaaggagggtttgtgggctagaatagagaaaaggtacaacgaacttagaggtgagtttccattgagacttaatagggctctcagcagcaggtgggacaaaataagagctgaaacaggcaaatttgctggattctacgcaagagtcctctgggaaaaccaaagtggcctcacagataacgacaagacttcgaaagcagcaactttgtatgcaacatcacagaaaaagccattccatttcatgcactgctggacgcgcctgaaaaacgaacccaaatgggatgccatggttcatggcagcccctggagaggcaatgcggggaccgagccagtacgtagtcttacacctactggttctgttaatgaagtacacactgatgaaggtggttcaaaaggcaagagaccattaggacgtgactcaacgaaagcatcaaggaagaagtcaatgtccagtgcatcccaatctactgactacctgtcaagaatccatgacattcagatagcaagattgaagcaaagtgaagaaaaaacagagctgaaacaacagaacattgagttcatgaaggaagttgaacttaagaagttggaggttaagtccaaggaaatagaagtgcaggaaaaaaaattgatgatggaagataggaagcaaaaggttgaagagctcaacaaactttttgccatggatatggatgctttaccagaagagttgagagttgtatacatggcgatgagaaaaggtttaattgattttttcatcaacaatcctatctga

SEQ ID NO: 91346 - DNA, 163 bp, Zea mays
  Clone ID: MRT4577_183306C.1
taaaagtctattttattatgagctttctttgcacttaaaaattagcatgctgctttttgtacttggaagtgtttcaaaaaattatatgaccatatgtactctttctaactttctttactccatcatggcgggttgattttgtagagaaattagaccccatacc

SEQ ID NO: 91347 - DNA, 762 bp, Zea mays
  unsure (1)..(762): unsure at all n locations
  Clone ID: MRT4577_183307C.1
cggccgctcgaggcggcaggccgggaaggagcttgaactgtgaccagcgccggtggcgatggccgagatcacgccggtggccacctgtgctttcctcctcgtcttctgcgtttgctgccacctgcctcctcccgccgcttccctgttcttcaactactccactttcagctctcaagaccagaaggacttcagaatcgaaggggacgcctccttcagcgtcgggtggatcgacgtcagcgccaacaagttcgccggcatcggcaacagcgcgggccgggtgtcctacaacgcccagccgatgctgctctgggacaaggccacgggccaggtggcgagcttcaccacgcgtttctccttcgccatcggcatccccaacatcaacaacaaggggaaaggcatgaccttcttcctcgccggctacccatcggttctgccgtacgattcctacggcttcgacctcggcctcaccaaccagagcaccagcgcctcggcgacaggggacaaccggttcgtcgccgtcgagttcgacaccttcaacgatacccaggtatccgatcccgacgccacctatgaccaccncgggcatcgacgncaactccgtccgatccgtagtaaccaagtccctgccgagcttcagcctcatggggaacatgaccgctctcatacggtacgacaacgttttccagccttctgtccttgacgctatgggctcggcgatgggcgaggccggaattacagccttaggctccaggttgacctcag

SEQ ID NO: 91348 - DNA, 167 bp, Zea mays
  Clone ID: MRT4577_183308C.1
gggccggggtaccagatccttgcctccgatccccaatttctccttgcggatctcgcacttccccccagcgcaggtgagaacgaaggagaacgcggatgaccatgggactcgcgttcgggcagcgcttcagcccactcttcgccaggagggagatggggatcgtcatg

SEQ ID NO: 91349 - DNA, 348 bp, Zea mays
  Clone ID: MRT4577_183309C.1
gtcaagtacatggcctgctgcctcatttactttggtgatgcggcccccaaggatgggaatgcggctgtgtccaccatcaagaccaaacgcaccatccagttcgtggattggtgcccgactggcttcaagtgcggcatcaactaccagcctactagcgttgtgcctggtggcgacctggccaaagtgcaacgcgccgcgcgcatgatcttcaactacaccaacgttgtggaagtgttcttccgcatataccacaagttctacctcatgtacgccaagcgtgccttcgtacactgatacgtcagtgatggtatggaagaaggtgagttctcttttgcccgtgaggacctg

SEQ ID NO: 91350 - DNA, 248 bp, Zea mays
  Clone ID: MRT4577_18330C.1
atattgggagtggttttctaattcttttgtttcttttacgattagctaactttttattttgtgtatctgttttttttttttttggtgacatggggaccacccaccgtgatttccaataaattcggtgggaaatgaaatgggaaaggggggaacctcctcaaaaataatttattcgcccacaagacacctatatgaatgatagcccttagaaaaggggggaggggtaccatttttttgggtgagccccc

SEQ ID NO: 91351 - DNA, 177 bp, Zea mays
  Clone ID: MRT4577_183310C.1
gtcccagctgccagcaggcagatcatgatccaacagctcctgtggggcaggctataggacagacgacaaaactcaactcacagaagaaccagtgtaccaggaacaatgggacagtgtcggtcagccaatgctgaggatgcccaagaactcagtgatgtagagagggccattgagacc

SEQ ID NO: 91352 - DNA, 414 bp, Zea mays
  Clone ID: MRT4577_183311C.1
tttatatttttgacctggtttttgcagcaaacgaatcaagcactctgttacggttttattatttccttttcttcctttcctttcaatggatactgttatccatgccatgcgcgcgttcgctttgtattcatcttatagttttgtgcagcctgtacgctacgccgtcgtggtacagtttactggtcgtcgtcgtcgtcctaatccagctgcttgagcaacgcgtcgcatacggggagcggcacgttcttgaagtaaccgatcgggttggcggggcgcatgctgacagagatgcccaccttcctggtgagcatgacccctgcgcggtccctgaactcctgtaccctcattcaattctttgccgggctggccaccaacaccacctggcaaatatccttctccgggctgaccttaact

SEQ ID NO: 91353 - DNA, 437 bp, Zea mays
  Clone ID: MRT4577_183312C.1
ggcccttcaagctactgaagaggatatctccctccttctccaagctcattctcatatcggaactaagaatgtcgagaagaagaggacgccctacgtctggaagcgtcgccaagacggtgtcaacgttatcaacgttggaaagacctgggagaagatcgtcttcgccgcccgtgtcatcgctgccatcgagaaccccaacgatgtttgcgtcatctcggctcgtccttacggtcaccgtgccgtcctcaagttcgctgccaacactggagctcaagccatcgctggacgtttcacttccggtaacttcaccaactacatcaccaagtcgttcaaggagccccgtttcgatcgtcgtcaccgacccccgtgtcgaccaccaaaccatccgtgaagcttcgtacgtcaacattcccgttatcgccatttgcgataccgac

SEQ ID NO: 91354 - DNA, 462 bp, Zea mays
  Clone ID: MRT4577_183313C.1
ggccgcttttttttttttttttttcttttttttttttttttttttttttttttttttttttttttttttttttttttttttttttttttttttttttttaaaaaaaaaaaaaaccattacgttcggcctggaaacaaggaggggggaggggcaaattatcacgggcccggggggcaattttaagccaggaaaaaacaaaaacacgtttttgaaaatggggaggccgtttcctgaccccgggaaaaaccaatttacgggggaccatatgggggggggccggcaaaaaaaaaaaaacaggccggaaccagctaacacagtaaaaacttccctggaaaaacaagaggggggccatttttatttttgggggcagaaaatgggtctcaggggaaaagcaaatccccggaaccacccttatacctttttaaagcacgccccacctccggagggggggctaaaaagggc

SEQ ID NO: 91355 - DNA, 392 bp, Zea mays
  Clone ID: MRT4577_183314C.1
ggtagccagccgtgtcatcgcgtcgtcgtgtgccacgacgccgggccatagtggaagaaagctgattgccgctgtaacgttctcatcccaaattcatgaagcatacaagtgaatactataaattgagtgccctccctgctccgctatctcgttacgaacccaatgcaccactcctcgctcccgatcgtccaccatagctcgcaaattcccgttttcccccaaatcagccaacaacaccgccgtgaggcatctcactgtggccagccgatctcagaacacgaggaagaaaccatggtagaaaaagaagttgtctcccaagctgaaaattctccagccgagaacaacttttacttcgacatctacagagtggaccctgaacctcctgcaacaca

SEQ ID NO: 91356 - DNA, 284 bp, Zea mays
  Clone ID: MRT4577_183315C.1
acggccagagtagccatcatgaagcagccaggaaagcaagcgagaggtcatcgcgctactctgggctgcgtatatactccgcctccgcctacggagagcggttggatggtccctataccatcgccagataggctgagcttcctgctttacagacgggtcaccgtgcgccgcagatcctgccgtccaaaggggacccaagcatagcatcagatccgtgctgcactttgccaggggcaactgcagaatcgaccagccatggcggatggcttcgatgctgacagcga

SEQ ID NO: 91357 - DNA, 506 bp, Zea mays
  unsure (1)..(506): unsure at all n locations
  Clone ID: MRT4577_183316C.1
cccacgcgtcacgaaaaaantaaaaaaaaaaaaaaaaaaaaaaaaaaaaaaaaaaaaaaaaaaaaaaaaaaaaagggagaaaaaataaaaaaaaaaaagggcggaccgatgggggggatgccaaggctgatatcccccttttattagcgacagcgaaaggctcattttataggcgccgcctaaattacaaccctatggcacgggaattcccaagcggtttcacagcgtaaaaccctgggaaaaccctgcctattccccttgcaggccatttcccttaaagcccctttccgaataccgaaaaaaacaggaaagaacccccttcgcaaaatttgaccaaccttgttgcagaatattaagccccctggacccgccctttaaccccacattaagcggtggatttgccaaggttaaacccaccatttccctaacctttttcccccccttttttgcctttttttcctttttttcccgtcaatttctaaagatttgcccccctttttcttaac

SEQ ID NO: 91358 - DNA, 2852 bp, Zea mays
  unsure (1)..(2852): unsure at all n locations
  Clone ID: MRT4577_183317C.1
ccctaatgtttgagagtggtgaagaattnggagcaggctgaaaagtgtctttgggtcagatactgagtcccatgggatcagatccgggttgatcttgaaggacgacaaggatattttcgaggattggatggaggaagcatttgtgcgacggatgaaggacatcgtgcattcagagtttgatatattgggttctagtgttaacgtgaaggaatcaattcatgctatcggtgccaatgctgatccaaaggatgctggagatttccttgcatacctgcggaaatcttcaaagggtggtggtttctggttctcagagtctaagatcaagaaaggtggagttttggcacacttgaaaccaattgctgatgaaaatgatttccgtagctgcctaacatcgtattttgggccagaagttagtcggatcaggagtgcaattgacagtaaatgcaagaatatcctggaggatctgctaagctttgtggagtcacataattcaaccacaaggctgaaggaattggtgccataccttcaggagaaatgctacaggaccatctcgggagtactgaaagaattagaagctgagctcagaaagctctctgctctgttgggaaccaaaaaggagggtaacgacatacctgcagcttctattatagcggagaggtctctcttcattggtcgactcttgtttgcgctgagatactattcaagtcatgtacccctgatactaggttccccaagggagtgggtagaggaggctggtggtgcagcatttgccaggctatcatcacctacaccaagacattcaagggcatctttcgattctttagtaccttttacatcgagaaggcgcacatttgacagtcccaagagtcctggaaggcaattctcggatagccccagaagacaaactattgctgctgcagtatctttgtttggagctgatgatagatccaatcctagacttgatgaactcaataagaccatgcagtcactttgcatcatggctcataatgtatggataacatgggtgtccaccgaattatctcacattctttcatatgatatcagcaaagatgattcactatcctcttcaactcctttgaggggctgggaagtcactgtaattaaacaagatgaaacaactgagggtcccttggagatgcaaatagctcttccatcgatgccttcattgtacatcatatcctttctttatcaagcatgtttggagattcataaggttggagggcacatcctggacaggattattttgcacaattttgcatgggagctactgcagaaggttgtcaacatttatgaaaaatttctttcatgtgttgaatctgggaattctacggtttcagagaaaggaattctgcaaatactgctagacttgcgtttcgttggtgatgtcctatcaggaggtaaaagttcttccaccaacagtcctgaaatgcagacaaaacaggattttttgccaagcgccgtcaccaagacttccttcaggagaaaacagtcacaattacaggcagactcagctgtcatagagcctataaacaagttagtcaacaggctctcacagagattggatcctatagactgggccacgtatgaaccttacctgtgggagaatgagaagcaatcttacaagcgttatgttgttctttttggttttttggtccaattgaatcacaagtacactagtactgtacaaaaattaccaacaaaatcaaatacagattcaaatatcatgaggtgctctcaggttccaagattcaagtacctaccaatcagtgccccagctatatcatcaagatcacacaaatcgtcactacagtcgctgtctagtgagtccacatctaaaaatccttggaaatcctattcaaatggagatggatctactacaccagattttgatgataatgcaagtcttgttggtgctgctccgttgcttaagtcatttgttacccaggtggggagcaaatttggggagaacacatcgagatgggggtccatgctctctgacgggcaggttggtaagctaagtgacatccttcctggaccagcagctgggtttttctcttctttcacatctggagctcgatatgattcatagtaattgcaccatgacccttgatctttaacccttactatgcgtcgtatggaaacccacatgtgtcatcaagagaacagaagaactgttggcaggtgtagtatgcctttggaaatctgttgctcacagaatgattccacaatgctggtcccgtgttgcttggcatatcctgccgcgcctcttcgcatcttattgtgactagacagtgtcatggagaagttcaggaaattatgatggaaaagatgagatttattctgtatcggctgcccacaggttgaatgagtggttagggaaatcaaaagtttggtttcaccgtatttcctgcttgcaatttaacttggtacataggacagagaagtgcaactcgccgcggatgcctgcctcacttttttggggggaatcatgttgtggatacacggcacttgaagttgtgaaaagaattttgaggttccattctttctttcttatctttggctcggcgagttgactgattttctcatcggaacattgccggaactgtgaggttgcggttttaccatgtagggaaatttgcagaatgtgtacactggaaatataggaataataaaagtctgtatcatgcattcagaaaacctgcgttcatgtccattcagcacaatgcagcgctcaagggcctgtttggttggcatgctgcttgccatggcctttctgtatttgtttacatgtgtgggtttaagttgttacagcaggtatagttgctgatttg

SEQ ID NO: 91359 - DNA, 779 bp, Zea mays
  Clone ID: MRT4577_183318C.1
ctttcccctcgtccgcaccaccgccaccaccacgtcggccgtgtcttcgccgccggcggtgctgagcgtaggccacgcgctgcgcgagcgccggcgcttcacggaagacgatgtggcggcgtacgcggcggtcagcggcgaccgcaacccggtgcacctcgacgacgccgttgcccgcgagctgagcgggttccagcgaggccgcgtggtgcacggcatgctcgtggcatctctcttcccttccgtcatcgccgcaagcttccctggcgcggtgtacgcgagtcagacgctcaagtttgccgcgccggtgtatgtcggggatgaggtggttgctcgagtcaaggcactcaacatcaggatgataggtgcgacgaactgcagcacgacaagccgatatctcgtcaagttcgcaaccaaatgcttcatggacaaagaggagggcttggttgcaatcgaaggcgaagcaatggctgtcctgcctacactggagctcagctctcagtcgactagcaactaatagtggcctggaaccgggtgactaatcaaatgtttctgctgcttaatagtaatttgagtagcacaatgcttaagctagtcagaaaatcttatgttgtccgtcaggaacttatcatacccaacctggtaatccgtctcctaggaacactgtaggatgtgtgtaaactaaacttatgtaaccttcacattataagcgatgagtgaagtaaacctgttgtttatgcctatgaatctctgtgattaagtgcaacgtacaattactc

SEQ ID NO: 91360 - DNA, 1193 bp, Zea mays
  unsure (1)..(1193): unsure at all n locations
  Clone ID: MRT4577_183319C.1
ggaggatctgctaagctttgtggagtcacataattcaaccacaaggctgaaggaattggtgccataccttcaggnagaaatgctacaagaccatctcgggagtactgaaagaattagaagctgagctcagaaagctctctgctttgttgggaaccaaaaaggagggtaacgacatacctgcagcttctattatagcggagaggtctctcttcattggtcgtctcttgtttgcgctgagataccattcaagtcatgtacccctgatactaggttccccaagggagtgggtaaaggaggttggtggtgcagcatttgccaggttatcatcacctacagcaagacatttaagggcatcttttacacccagaaggcacacatttgacagtcccaagagtcctggaaggcaattctccgatagccccagaagacaaactattgctgctgcagtatctttgtttggagctaatgatagatctaatcctagacttgatgaactcaataagaccctgcagtcactttgcatcatggctcataatgtatggataacatgggtgtccactgaattatctcacattctttcatatgatctcaataaagatgattcactatcctctgcaactcctttgaggatacagaattctaatcgctatagttgtgtggtttggttgcattgttagggctgggaagtcacagtaattaaacaagaggaaacaactgagggttccttggaaatgcaaatagctcttccatcgatgccttcattgtacatcatatcctttctttatcaagcatgtttggagattcataaggttggagggcacatcctggacaggattattttgcataattttgcttgggagctactgcagaaggtcatcaatatttatgaaaattttctttcatctgttgaatctgggaattctccggtttcagagaaaggaattctgcaaatactgctagacttgcgtntttattggtgatgtcctatcaggaggtacaagttcttccacaaacaccactgaaatgcagataaaacaggattctttgccaagcaccatcaccaagacttccttcaggagaaaacagtcacaattacatggcagactcagctgtcatagagcctataaacaagttagtcaacaggctctcgcaaatactggatcctatagactggggcacgtatgaacccttac

SEQ ID NO: 91361 - DNA, 589 bp, Zea mays
  Clone ID: MRT4577_18331C.1
attctttaagctagagatagattcatgataggtagacagctcaaagcatagcatttcatttctcttaatttatagagcaagagatttttgaacactaatgaatttatcatgttcctcatagaaaatatcttcttgcttttctagcaatctatccttttcattaagagcatcaattaattcatttattttgtctaccttagttctatctaatcccttaaacaaattagtgtagtctacttcatcatcagatgattcttcacactagaagaagtatatttgggagtgtcccgaatacataccttctttttcttagccataaggcatgtatggcgttcgttggggaagaacgaagatttgtcgaaggccaaggcggccagtccttcatcgtcggagttggatgagtaacagtcggagtcccattcctttccaaggtgcgcctcgcccttcgccttcctatagttcttcttttctccttcccatgcttttcttgtgcctggtcattctcattatcgggacattgagctataaaatgaccagtcttactgcatttgaagcaggagtgttttccccttgacttgttcttgttggg

SEQ ID NO: 91362 - DNA, 832 bp, Zea mays
  Clone ID: MRT4577_183320C.1
cgcaggcgaggcggcacgcggagctggccgagcaggagctggcgagcgccaagcggatgcggcggcaggcgcaggtggagctgagccgagcccacgcgctccgggagcacgccgtgcgccaggtgaacgcgacgcttctccagatcacatgcctcggctgccgccacaagttccgcgcgcgtccgcagctcctggatgcggccctgggcgcccccgaggtgacctgcagctacatgtcctccgtcgtgacagaaggcggcgacgccgaggccgacgatgagccgcccctcgacggcagggacggcatgctgcagcggcgccgacacgccatggcaatggacgtcatcctctagctaacctgaaatgagatgatggtcttcgtttcaaatagtttcttgtgtttttgccggcaagacgccggggttgcatttgcattggcccctgctgtatgaggtgtatcagatgccgatgcctgatggtgcgtagacagtggaagaccccgctagctcgatcgggccagtgctgcctagacttcgagtcctgtgatgagaaggaaggaccggagaggtagccattaggcaagtccaaggagagacgaagacgagggctagctgctactagcttactgtgacgtacgtgcatggaatctttcggtgtttgcttcctattggatcttgttggaaagaaacattcattatattgctcatggaaagcaagttgatgatgccctttgtaaaggtcttcagtagccaacagggaaatcaagaatatttgtcacacctaaattcagcgactgcaatataacaccaaattacattaatttggtttctct

SEQ ID NO: 91363 - DNA, 302 bp, Zea mays
  Clone ID: MRT4577_183321C.1
acccactcatccgaaggtctccaaacttctcccccccctctctccaattcctcttctcctcaacctcactggtcactttaaacacttgcgacgcctcctaatcatcaacactacctctacttctattacttacttcccttcaccaccatcaactaatctctcaacaatgccttcacctcctacatccatatcctctactccaaccacatcacacaccagcacacacatacctctatccacttcaactttcatacctactacttccagaactacattctcaacactatctagaacactaacta

SEQ ID NO: 91364 - DNA, 285 bp, Zea mays
  Clone ID: MRT4577_183322C.1
gacaacggacgtgaggggcaatgccaggctggtgcgacccaccctccacgagatctgcgcagacgaccagcacacgggtaacctccactgaacggccatcggtggtctggcccgcaggttccccaacaaggccttcgacgccgaggagccgccagccacccgcagacggaggcgtaaggtcccagggacgcgcgagacgacccagaaggaggagggccacaagaacccggagcaggaagcgcgggcccagaaagacagcgacgcccccgctaccgctccagccgg

SEQ ID NO: 91365 - DNA, 404 bp, Zea mays
  unsure (1)..(404): unsure at all n locations
  Clone ID: MRT4577_183323C.1
gaggcgcncgcgcggccgcctagggaggnggncgacgcccgcacccagcgccncgagcgcgccgcggcaccgcgccatgaagcaccagcacctcccggcaggaccnccaggcacagcagggggggagggagagattttttttttcccngccggcgccggngaagaaggagggcgccgagcggcagcccctcccccgcccttccactataccagaggacacttccctggggcgctggatagacttggccgcacgtattctacctctttaccgcagctcagaacgcgtcatgtccggtgccggggctgtccctgtttcccctggtggggtgggcgggcgcgttggtcggggccgcgcggtgggggggccgtttggtggntcctggtttaggtcggcgccgtgcggg

SEQ ID NO: 91366 - DNA, 640 bp, Zea mays
  Clone ID: MRT4577_183324C.1
aattcggcacgagggtcgtatcttatctctctcactgccatagtgccatcgtgcgagcggcgagaaagtagaaggaagtgtgtcgtactcgtactcataccgggttggttggtttttgagacgtgtgcggtcgggagaggggatggagagaaagggagggtgctgcctcgcgccgaggtacgccgccaccgcggccgcgcagcaggcaggcgcggcctggcagatggggaggatcatgctcaagttccgcccgattgcgcctaagccggcggccatggcgcccgcgccggcaccggcatcggcaccggtgaccggatcagccgccggtgccgggagagggaagcgaaaggccgcgtgcggaggcggcgggaggaggggccggaagcccaagaaggcggccaaagttgcgatggtgactgcagcgcctgcggcgacggcggcggcgcaagatgtgggcgactgccgggagcactgcgacaaggagaagtcgtcttcgtcgccgtcctcgtcctcgtcggggacgtcatccgtggactcgtcgccgccaccccggccgcagcagcgccagctcgcaacgctgccgctcatgcccgtgacggcggcgggaggataaggccgctgcttgtcctgcgacagtggg

SEQ ID NO: 91367 - DNA, 324 bp, Zea mays
  Clone ID: MRT4577_183325C.1
agtacaggaaccattaacctgataagaattaattaaacgattgaacatttataggatcattttgcaaagaggtaaatgacttgtaacaggatgcggacaataacttaaggcaaaaacagattttatgacatgtgttacacacaccctgcataaaaatatgctaaaacacactgctgaaaacatcagtggggaagatatatcagtgcaacaggtgaataacaaacttgtcttgctactgaagctcatggctccagtacttatgctgataaatgtaaccatggccagtcgtcactgaagataaaatcagctggaaaggctcctata

SEQ ID NO: 91368 - DNA, 474 bp, Zea mays
  Clone ID: MRT4577_183326C.1
ggcaaaaaacaaggaaagggcccggggggcccaaaaaaacccgcccaaagggggggggggacaaaaacatggggggccccccccaaacaagacccaaccaaaccgccccaaggcaaaggggaaaatgggtcaaaaacagggaaacccccccccccctttggggggaccggggggccctttggggccccttggcccccttttcggccccctttttgggggggaacccaagggggatgtgggggaggaccccccccggggcaaaggggacccccgccaaaaacttgcccagccccccttctttggggaggggaaggaaccccgggcccggaaagaaccccccctttttggggccccttggggggttgccggggagcccaaacaccccggccgggagggaccccaaaacggggggaaggaaaacgggggcaccccggccaacaccctgggcggaccggccctttttgagggaccccc

SEQ ID NO: 91369 - DNA, 246 bp, Zea mays
  unsure (1)..(246): unsure at all n locations
  Clone ID: MRT4577_183327C.1
acaaaaaaacaaaantataatcattctttctcctattatattctacccttctccaccatattataactacaaaaccatttatatattctattttttcaaatctacaatttatacttcctccttttacttcatccacttactttaatttctcaccaccatctcatacattactattccctttattcttaaccatacacatcctctattacataaaaaccacctactatatacaacatctatattcta

SEQ ID NO: 91370 - DNA, 886 bp, Zea mays
  unsure (1)..(886): unsure at all n locations
  Clone ID: MRT4577_183328C.1
cgcccatcctcgtccgtgcgtgctctgctcccctcgatttttttccctcccccttctgagttccaacctcatcggtcgtcgccccgctgctccagctctccctattcgttcccactccctcgcgccgaagcaactcccgaatcctcctgcgcgccaaaaccctagccgcagatcccgcgcctcgccgcccggagcccaggcggcggcgtcgacgtccgcgcacgcaccggccattgccgctcgccgcattggggcgcttacggcgtcgcctccactcctggggcagagatctgggtcgaggagacctggttgcgcgtgggctgcgtaggtgatgtggcagggggcggtgtgccccggggatcagcgtggcggcgctggccctgctcgccgtcgcggctgctgcaggagccgccgcgggggatcccgatcccgacgacctcgagcgcgcgtttccaatagtggagccagaccacagacacactaaacttcgtctctcagagcaaggtctagaagcaattcgaaggatcgaaactcctattgctgttgttggtgtcattggtccctatcgatctggaaaatcatttctcctcaaccagcttctctccttatcttgtgataaaggttttggagttggtcatatgcgagatactaaaactaaaggtatttggatttggggtactcctgttgagatggatgttgatggttccaaagtttctgtcctttatctagacactgaagggtttgaaagtgttgngaaatcaaatgtgtatgatgataggatatttgctttggcgactgtcttaagctcggtccttatctacaaccttcctgagacgntacgtgaagctgatatatctaggctttcatttgccgttgaaattgctga

SEQ ID NO: 91371 - DNA, 351 bp, Zea mays
  Clone ID: MRT4577_183329C.1
tttcccacgcgtccgcagatgcggccttgattatgtaagcgggacacccgagcgggctcgctgcttctactgcaagggcccagtccggctatgaaggataccgtggtgtcgaagacttgagaatcggacatggatgcagaccaagaggctccacaatgctccatgaaagaagctgctgacgtcacagaagtcggacaatgcacaaaggacgcggcaccgagaaagcaggacctgctctgcgaggcgtactacatctagatgatcttggtggcagtcacagaactcaccgagaggacggtgcacgccatctattcgattgcgcagatcgcgtaggccaagctcagggccatg

SEQ ID NO: 91372 - DNA, 566 bp, Zea mays
  unsure (1)..(566): unsure at all n locations
  Clone ID: MRT4577_18332C.1
aattcggcacgagggtccactctccagtctccacggtgccagtacacagcacttcgcctccatacagcacttgagcactggcatcctgctctgccagagagaactcagacgcgcccggtgtcctctgcagctctgccacccccaagaaagcgaggacgacggctcgccctcgcgcggcgccttcatcatgctcccgccgttcggcaacccgctctgggtaccggaggacatggacgaccagcagcagcacgcgcctccgccgacgcccatggagttgctgacggtgccggcgcaggggcacgaggagcagaacctcctagccctggcctcggccgccgccgctgccggggccggatgtgttttcagctcaccggcgatgctcgatgacgactggtacttcgaccccgtggctgcggccgccgccaccggcgcgcaggggcacctgctcctggcgccgcncgnggccggtgcccggccccggcgccggctcgcagatgttctccctcttcaacgttggcggcgccgcgacgttcgacgtccatgggttcgacattggcctcggcacg

SEQ ID NO: 91373 - DNA, 256 bp, Zea mays
  unsure (1)..(256): unsure at all n locations
  Clone ID: MRT4577_183330C.1
acgtaagctcggaacccggagagcggacgacccaaacccnaggttttgaaacacaaacaaggaccggaaaggcacgaggagcccggacgaggccagcgcagggccggggcggcacgaccccaggaacaggancggacacacacaggggacccgcgcgcaccgcaggagagggccacaacgacgggcgcgacaggcaggcgcccaccccgaagcagcagcaagaaacgggccacgcgacaaccgncgcagacccgac

SEQ ID NO: 91374 - DNA, 1916 bp, Zea mays
  Clone ID: MRT4577_183331C.1
gcacgaggtacagtctacacagctgaccagagaggcagagagtgcaagcgatctagcaagttttaatcttggaagaagccagctaggcgcgtgaatggatcgcctcactgtgatggcgccgccgctgctcgtcctcctcctgctgctcctctcgcggtgctcggcggcggcgccacggcgcggcgggggctggtgggaggagggcgagggggagtggaggccgagcgaggaggaagagaagggcaaaggcaaagggagggggctgttcctgctgcaccgggtggagaaggtggtggagtcggagggcggaggtggtggccggccagccgtggccgccggcgtccttcgcctgccgcgaggggctcatgcacatcggcttcatcaccatggagcccaagacgctgttcgtgccgcagtacctcgactccagcatcactctcttcgtgcagcggggggaagcgaaggttgggtatattcacaaggacgagctcgtggagaggaagctcaagatgggcgacgtcctccacatcgacgccggctccaccttctacatggtcaaccccggcaaaggccagaggctgcagatcatatgcagcgtggacgcctccgatagccttggctttggacctccttatcaggccttcttcctcggcggcgcaggggacccggcgtcggtcattgccggttttgggccgaagacgcttacccgtgccttcaacgccacctacgacgagttggcgcgtatcctgttgccacgaaccggcggccccatcgtgtactacaccgcggacgcggagccagagagcggtgccgccgaagaggagcgcgggcaggtcgacgggcacgacggtgtgctggacaggggagcgcgacgcgagggcgctggcgcgtgggtgccgggtggcaggggagacggaggcgacgagtgcggcggcagcgatgacgcgcgtgtggcgacgtggtggtggacgaagctggttaacagggtcgtcggaggggcggctggcggcggcgtcgccgcggaggcgaacaggaagggcaagaagaagggcggcgcgccggagccgtacaacctctacgacagcgagcccgggttccggaacgcgtacggctggaccgtctccgtcgacaagcaccagtacgagcccctcaagcaccccgacatcggcgtctacctcgtgaacctcaccgcggggtcgatgctggcgccgcacgtgaaccctcgggcgacggagtacggcgtggtgctgggcggggaaggcacggtccaggtggtgttcccgaacgggtccctggcgatgagcgaggtggtgcgccccggcgacgtgttctggatcccgcgctacttccccttctgccaggtggcggcgcgggccgggcccttcgagttcttcggcttcaccacctcggcgcgccgcaaccggccgcagttcctggtcggcgcctcctcggtgctccgtaccatgctagggccggagatcgccgccgcgttcggcgctcgcgagaaggagttcagtaagctggtgcgtgcgcaacgggaggccctgattatgccgtcctctcctgggaaggaggaggaggagcatgggaagaaagggagggagaaagaggagtcactgccgatggttgtcgagcaggcggcggcggagtgagctgcttgatctttcagtcttggactcttggcttcctcagaagcgcgcgcgccaccggaaagtgtttctactcttgttactgcgccttgtcagtgatcgtgttgttggttttttttttcgtggcgccgtctataaataaaagtgctttgtgcgtttacagctatgaaataaagaaaaaaatccgtaactcgtaagctggacgccaatgctcccgcccggataatagaagcagagatgatttacgtagaagcagaaatgatttac

SEQ ID NO: 91375 - DNA, 305 bp, Zea mays
  Clone ID: MRT4577_183332C.1
cgtccgcaacatggtcaccacggcggccacggcttcgtggtacgaaagaccacggtccaagaggacatcaacacctgcaccggctacgtccaccagcgcatggagagcttcctcgccagggcgtggtgatccgccctgcggccggcatctaggggggttcgtgcttgcctgcttgccttatgtatgtctgtggttgactggttgttcacggtcatcctacttggctatcttacctgcacgcactcatctcctgtacgaattacgaccataagctcgttacctgaataaaacttcttcgtactact

SEQ ID NO: 91376 - DNA, 314 bp, Zea mays
  Clone ID: MRT4577_183333C.1
gggggttgggtgataacatcaagggatgcttcgtgcgactcaaattttttatcagcgctaaattatacagtcatgatgaaaacagcagggttccagcgttgaagtaattactgtctgacgctgcccttcacttgaggagcacaggtctcctctgtgtttctgaatgacgtattgtgacctttgacgcttaccaagtcaccattgttgagctcccgggtctgactcatgtgccacctcctcagattcgacggatgccccctagggcttcattttgtaataaaaccggtgcaacgcggcggccggcacacttgacc

SEQ ID NO: 91377 - DNA, 381 bp, Zea mays
  Clone ID: MRT4577_183334C.1
gtataaatacattgctttattcaataaagaaacagaggttctcatttcattctcgcacagtttctactttacaacctcaacacaaacgacgcgcaacgcgatgacaacccagctcccagcactaacaagccagctccagtaaagtttattttcagcagggcacgttggctgaggcgacggatagactctattatatggatttgcgaccacattatgtccctcttaggtccaatcttaggttagagaaggagatattgacgactactggcggtttcattacgggggcaggtcatgatcaaagactctagaatgaacaggtcgcaagcagaggagctgcacgttcagcgtcgtctcgtctcgttgaggacgcacacccacgac

SEQ ID NO: 91378 - DNA, 507 bp, Zea mays
  Clone ID: MRT4577_183335C.1
attacgctctccggaacgaaccacgctccctccccgttcgacacgaccagcgggccacccatggcttcggtggcgtggatattcgatctcctcctgtctggaggggcgcggcgccccgctgaggcttcgcatgtgctcctcctgccacgactacgcctatgagaaggacaagcgggaaaataccacctactgcgacatctcgacctgccccctcctggaggaaggcaacctagccagggaccccccacttcaatgccggacggagcacccctatctgcactccgtctcaggagccccttagcgacatgctgggttgattgagatttttgatcaccactgtctgctgattattgctgctttcggagctgacgcgtgcttaatagaggtagacggctggaacatggatgatcttcttcccttgaagagctatttgcttgcatcaggactgatgagtgaacaaacgcttgcatggacctggctgccgactatgaggctcttgatgcgggc

SEQ ID NO: 91379 - DNA, 428 bp, Zea mays
  Clone ID: MRT4577_183336C.1
taatgaatcagctccttgacacgaacccggagaccaggatcacggtggctcagataatgtgagagcaggtggtttaagaaagggttccggccggtcaggttctacgtcgaggatgaccaagtgcacagcttggcagacagtgaggctgaggcgctggaagaactggggcccagtgacagtgagccttcacccccacctccccctcccccgccaccaccaccaccacagaaagaggacgacggcgatgattctggctgggagtcagactcctccgtagcgtcctgcccagccacattgtcatcagaggagaggagacggcctgtcggatctcttccacggccggtaagtctaaacgcgttcgatatcatctcgttctcaaggggattcaatctgtcggggttgttcgaggagcgaggcaatgaagtgag

SEQ ID NO: 91380 - DNA, 742 bp, Zea mays
  unsure (1)..(742): unsure at all n locations
  Clone ID: MRT4577_183337C.1
ggtaccggcnccccccnctcggttttttttttttttttttttttttttttttttttttttttttttttttttttttttttttttttttttttttttttttttttttttttggccaacccaaggacggaacaacaggggggttgtcccaaaaaggaccttcaaagggggcccctaggttttggccccaaaaaaatgggggtcccccccaaatcccacgggccctaaaagaaattttaaaacaacaaacaaaatggaaaacggattttaccgtttacaggggtaacacccccccgggggaggcaacgatgaaattgcccccccggcttccggggctaaattggggcccccaaaatggttctttaaaaaccaattaaggcccccgggcggcccatagggggggtaaatttttttttaaaaaaaaggccggcccaaacttttccacaatggaatggggaaccccccccctcagctaaaagggggcggaatcacccttgttttgggccaaggggaacctaaaaaacgggtccgggaaatcgaacccctttccgatgtttttaaaaggggggaaaacccgaaacattgaaggccccccccccacccgggggggggggcaaaaaaaactttttttaaaaaaccccggaatttttgcccaagggccctttcccccaggggtttataaaaaacatccctgattcccccaaaacccttgggctggtaaacccaacccaccaagggccccttg

SEQ ID NO: 91381 - DNA, 433 bp, Zea mays
  Clone ID: MRT4577_183338C.1
gggaaaaaaaaacctggggaatttttttttcggttgggttaaaagggggggcaaaaaaagggaacaacggggggcccaacacccaatccaaagggggaacgggccctaacccggggacaaaagccaacgggacccccaacctttaaaaggaaaaaaaaacccggccaaaaccaggaggggcccaaaaataaatcctttaaacccccgcccccgccggggtaaccgcaaaaaaaacctttgggccaaacggggaaaccgcaaccgttttggtaggggggggaaccacccttgggccaaacggggtaaaccccaccgggggattaaccgccggaagggggcccgcaaaaataaccgccgcccccggaaccgccggggtaaccaccgggggaaccggaacacgaaaggaactgggcctggttaaaggggattttac

SEQ ID NO: 91382 - DNA, 236 bp, Zea mays
  Clone ID: MRT4577_183339C.1
atgatggattacttattcaaacgacgaacaacatcgtctcaacaccttggttggcgggaagaagaaatagaaagtgtttttttttttttgcctttcccttacttcatttcatttttcccactgtaatgatcttcgtctgctaaggctgaacctaagaaaaatattgttctgtgctgatcatggcatatagatgtacactttgagcaccccattgttttataatttcattgtttttc

SEQ ID NO: 91383 - DNA, 351 bp, Zea mays
  Clone ID: MRT4577_18333C.1
caggtcattgcagcttaacgcctctgatggcttacgcaccttgaccgagcagatcaactgctactacctaacaaacggatccaactggtactgggtcacctactcttactaacgatggcctgccaagaacttaaactgtgcgtgactggttctattaatgcatagtgtaaattgtctggaccactaccaatatgttacccaagccttcacgttcgcttatacagcgtcaatctggatctccatgaccagtactagctagggagtgtgtgacatgtgcatgtgctctgtagactgttatggcctcttcctgttttcattgcatgcgctctttgtaccatgtaaagcctctga

SEQ ID NO: 91384 - DNA, 298 bp, Zea mays
  Clone ID: MRT4577_183340C.1
ctcttttttttccaaaataaaaatattgacacccggcgacatacctccgagcgcatggctccaccatcctcttgctatcccctacacccacaccagcacccacctcctaagaatattcaccaccaattccaatccctaccagcttctattcctgcacctccctcgtaaacagcactttcaaaatcgctcgaccttcaggttacagtcactttccgcaaccacttttaaaatccaaacttacgccttcgcaaccttcgagcctacatagcaacctacttaaacctttccagccaatcca

SEQ ID NO: 91385 - DNA, 956 bp, Zea mays
  Clone ID: MRT4577_183341C.1
gactaaactaaactaaaccaaaaccaagccattgagcgccctttttcttccgttgctccatgtccatggcttcccgtccgcctcttcgtcgtcgacgtcgtcttcccctcgtcccgctcctcgttctgctctgcctctccccggcatgcgccgccgggagagtcccggtttcggtctactacgaagcgctgtgcccgttctgctccgcgtttgtcgtgaacgacctctccagggtcttccgcgacgggatctcctccatcgctgagctgcggctcgtccctttcggcaatgggcgtgtctcggccgacggaaccgtcacttgccagcatggagaggacgagtgccaactcaacgctatagaagcttgcgtgatcagaatatggcctgacgcggagcagcattttcctttcattcaatgcgttgagcatttagcactgactcggaaatgggacgcctggccgtcttgctttcatgaaactggtctcgcttatcaacctgctattgactgctacatctcagggtatggaaggcagctcgtactccagtatgctgccgagacaaatgctctgcagcctcctcatcggtttgtaccttgggtggtcgtcaacggcaaaccgctcggtgatgattacatgaactttgaggcatacatctgcagcgcttatgacggcaatcttccaaaggcatgcaaggggaagcacctagcaattgctcaggagacgaaagccagccgaggagacaaggtgtgcccagctagcaaaactatcagctaactcgcgtgcgaaaatttattttttttggaatttggataaaactgagtactactttgagtttggttctaagaggttctgcgtttctgctgtcttgttgggtctccgtctattttgaagttagttgaaataacagtgctgtcaaacctttgacagaaaaacatcaaatgcaaacatttcatgttg

SEQ ID NO: 91386 - DNA, 1857 bp, Zea mays
  Clone ID: MRT4577_183342C.1
ttttttttttttttttttgataaaatcttcttcgcttcatgttttgcaactttggtagcgaactagagtagttattctctctgccaaactgagccgaaccgagcaacaatggtaatggtatgtacatcccacaaaagtacaaaacggtgtgaaacaaaagcggcagcggcggtggggggaactctctctcagctacaaaattgctggccgtgtaagcacagccgtactagacggaacaccatcagcgccaatatttacacagccacagcacagaaacacaggctggcgctggcctctacagatagaagcgtctactggtcagactcgagccatctcctcagcttgcagagtgcctctggcgacaagctcttgcggcacctgatccttccagccggcacctgctccgagggcgtagccgagcccccggcgaggtcggggacaaagcagacaacgatcacggtgaggttgtcgaaggtctcgagcctcttcgcctccatggcgagctcctgggcactccgcccggggtcatcgtgcctccggaggcccttgcggaccgtgctcaccgcgtgctggctgctcatcacatcccatatcccatcgcagccgatgatgaggaactcgtcgtcttccgtcagggtggtccagtggatctctggctctgcgataaggggcgacggagagccttggggcagcttcatgtcccagtcccctaaagcccgggtcacagagagtacgccgttgaggtacccatcttcgatgtatccaccgcactcgataaccctttgacgctctgcgtcgtatgtcggcctgtgatcctttgacacctccaccgctgtccctttcctacacaggacggcgcggcagtccccagcgtttgctaccaacagttgcctcccaaggaccaatgctgtcagcgctgtggtgccagaagaacggttgatgactgaatcatcagcaagtgcaaggtcagcccgcaagaaagctctgcggaccgaatcctcaacagattcagcaaatattttatcctcttgtgatgcttgagggaagtcagcatcttcaaagaacaacctcattgcatgtgttttcatgtaggctgctgcatctgaacccccatgaccgtcaaacaccccgtagaacgcgctaggcgcagagaccatcaacagtgagccaagatgaccagaaagatcatcaattctaatatgctcatcttccatgaaccgcctaggtccaatatcagcaaagctaccagatcgaatgatagggacaaactgcagttgttctgcagatacactactcccagcattagaagatctcttcaactccagatcgggcacctctacggcaacctccaacagcgccttcggcgacgtcgctggctgcacctgcccaggcgccacggcaaccacctcctccatgacatcgacgctcttaacgacgcaccggtggagcggcggctccagcagcggcacgacctgatgcatgacctcagccccggctcccatctccgcctctaatccgctgaacaaccgattttttcccaacaagaaatcctcccaaaaatcactcgcttttttcgcaccctgtgaccacaagaactcccgatccgattccaactctcttcttggcctcaaaattcctccaccgcaaacagatcgatccgagcaccggcggctaatctcgacgagaagcgcgcaaatctcctaaaggagcggcctttcgacaatcaaagaaaaagaggacccgaaagaaactctcccctctttttttttcgtgttcttaagaaaacgcaacacggagcactgacctgacccgatccgaacaagaaagaagtcccggccggcctcgaggtacccaatg

SEQ ID NO: 91387 - DNA, 674 bp, Zea mays
  Clone ID: MRT4577_183343C.1
aagccgctgagccaccccgcgcccgacgcctcgcgcctgagccgccccacgctcgtccgctcgtctccaaccggaaacccccccgtttcctctcctcttccccccgttctctctctccattgatgccatgggaagaaaccgccgccattaatggcccttgaaggaccgccgacgcctctccctatcccctcggcgcctctcctctcccttccctctctctataaatgtcagtcgcgccatggagctctctcttccctacccgagctcgccccctctctctcactctccttgctcgcccatgccatcgccggagctcgcccacgccatcgccggagcttcgtagaccacgcaacccccgctggagccgcccgacgccatgcccctgcccttctccactcggccgaccccccgtcgaactctcccccttcacacgagcaagctcaagaagtggactgtgaggtagatgagccaaacatggtcgaggacgacccacaagaaacgttcgagcaagagggtgatgcagaagacattgatggagatttcgacgaatactgaggctaacaatgcaccagtcatcttcctgtggatgattacccatggtatttccactttactttgatgatacattttaagatactattatctgggcattgtgataaagactattctacacc

SEQ ID NO: 91388 - DNA, 565 bp, Zea mays
  Clone ID: MRT4577_183344C.1
acgcctgcaggatccggtccggaattcccgggtcgacccacgcgtccgggagactagaaggaggactccggatccggctcggcgctcgccctcgctcgccatggagaagaccgagctgatccagaaggccaagctggccgagcaggccgagcgctacgacgacatggccacctgcatgaaagccgtgacggagcagggcgccgagctgtccaacgaggagcgcaacctgctgtcggtggcctacaaaaacgtggtagggggccgcaggtccgcctggagggtcatctcgagcattgagcagaagaccgacacctctgacaagaagttgcagctgatcaaggactatcgggagaaagtggagtcggagctgaggtccatctgcaccacggtcctggaattggtggataagtgtttaatagccaatgcaactaatccagagagtaaggtcttctatctgaaaatgaagggagattatttgcggtatcttgctgaaggagcttgtggcgatgatcgaaaacgtacaatggaaaattggcgaggggcctaccaagaggcgtttggtgtg

SEQ ID NO: 91389 - DNA, 304 bp, Zea mays
  Clone ID: MRT4577_183345C.1
attattcccatttcatccttggatcgtaaaggatcccgaacttataaaaatatatcctaaaaaagatcactatcccttttaacttctcttataacaaacaacaacaaaactgggacagaacgattttattttacttggatcttaaaccaaacacttccttatcttacaactaaaccaaaattttttccaaaaaagaaatcaattttttctgcccctacccacaatttttattaaagaaacataattttagacccgtcactaccccttttgccctttttaatattgaaagactccatttaacctt

SEQ ID NO: 91390 - DNA, 654 bp, Zea mays
  Clone ID: MRT4577_183346C.1
ggccgcttttttttttttttttttcttttttttttttttttttttttttttttttttttttttttttttttttttttttttttttttttttttttttttggaccaacaacatttattttcattacgggtttggccggccattacaaaacgggaacaattttaaaaagggaacacaacaactcagctcccaaacaattttgggtcaaaaaaacaaaccctaagggttcatttcccccccaatccaaaaaagagaaggggggggctaaaaaaaaggggggggaggggttaacaaaatctacgggggacattggaagctcccccaactttggggggaaaaaatttccatgccaggcccaaacaacgtccttaagcccgggccggaggcccttttccaacagttttggggcccaaaaaaaacccccccgggtttgtttcatttgaacaaaagggcaggagggggggacccaaaaaatcgggggggaaaacggaaggaccccattgcccccaggcttccccccttgaaagaaaacagggggggggccctttttccttatccggaaattaagggctttcgggaaattttaaagctttgaaaagagggccaaggggggcttatttgaagggaaccttggccccttccacactccttgaaaa

SEQ ID NO: 91391 - DNA, 1752 bp, Zea mays
  Clone ID: MRT4577_183347C.1
gaagaaatgatgctgcttgggttcatatctctgcttctggctgcgacgtcaagtttcatttcggggatctgcatcgactccaagtactacaacagcagattctccccgtgcaccaaagaagaggtccaagaatcgataaatgcagagcatgccattgctcacgcgcgcaagcatctactggaggtcatcctgcaccattcaccgaggagaaatctgaaaactagttaccataaccatgaaggctgccgtgagggatatgagtcatttgtttcgcatgaaggtttggagcagctgcaccggtttatatttgtaatggctgtgactcatgtgacttatagctgcctgacgatgttactagcaatactcaagatccataaatggagaaaatgggaggatgaagcattcagggataatcatgaatcattttctcagatcgcatatgagtcagcaactagaaggcaaccagcacttaccaaatcctattcattccgctcttggagccaaaataatgtggtcatgtggcttgtttgctttattgcgcaatttggtcagtctgttgttcgagcagactatcttatcctccgcaagggttttataatgacccacaatcttccgccaacatatgatttccacaattacatgatacgctcaatggaagaggagtttgagaagattgtcggagtgagtggactgttgtggggcttcgttgttgcttttatgttatttaatgtagacggatccaacctgtacttttggatagcaattcttcctgtaactcttgttcttctggtgggtgcaaagctgcagcatgtgattgcgactctaacagcagagggcgcaaagatgagcacctacgggccaaggatacagccaagggatgatctcttttggttcaagaaaccagagtttctcctttggttgatacacttcgttctctttcagaatgccttcgagttggcttcgttcttctggttctggtggcaatttggttatgattcatgcttcatcaaaaaccaccttttggtatattgccgccttatactggggtttgctggacagttcctgtgcagttacagtacattacctgtatatgctctggtcactcagatggggtccaagtacaaggctgcgctgatcccgcggaggatcagggagaccatacatgggtggggaaaggcgacgaggaagaagcgccggcgccgccgcggcgacgactcgacggtccgcacggagacgagcacggtgtgctcgctcacggacgacgacgaagacttcgaagacgaccaccaccaccaccaccacggaccgtcgtacgagaccccgagagccgggggccgcccgccgtacctgaagatcgagacgcatcgtcagtcgggcagcgggcacgacggccccaggcccggcggcaccccgtgcttccaccccagcggcagcggcagcgggcacgccatgctcctgcggcaggcctccgtctccgcgccgtcgtcgccgtcgtaccgcggaggcaataacgtgacaaggtcggcgtccatgcccgggatcgccgcgctgaggacaacgggctccggcacgccgacgcgcgtgagccatgaggagcccacttgatgcgcgcccgtgcatgccatggatggcttgctagtgcagacgtactgaggactgagctgctagtgtagcaccggatttgaaggtatatcgatatatatatacacacgaaaagatttggggtgacaaaaaaaaaaaaaaaaaaaaaaa

SEQ ID NO: 91392 - DNA, 133 bp, Zea mays
  Clone ID: MRT4577_183349C.1
taatcttagactatatattagcctgctgccattgtaatctatatgtatagatgggtcttacagtattggatgctggtgtagctgaacgttagcttgtgtgttgatcattgtataatccgaatcgacatggatg

SEQ ID NO: 91393 - DNA, 278 bp, Zea mays
  Clone ID: MRT4577_18334C.1
aaaaaaaaaaaaaaaaaaaaaaaaaaaaaaaaaaaaaaaaaaaaaaaaaggaggaagctcaaaaggataaaaaacttaggtacccgttcatgcgacttcatacttcgttaatagtgtaagcaagcattcaattcattgtacggtggcttcacaagtttacttcatgggataatctctttggtaagccatcttaggcgccttcacagagatccccctttcgcaagctgatgtaataacttttatgttcgcaccattgggacttcccaacatttgcccaa

SEQ ID NO: 91394 - DNA, 518 bp, Zea mays
  Clone ID: MRT4577_183350C.1
acccagtttctcgcgtctcgccggccctccacaaaaaaaactgctcggatgctgcttctgctctgccgcgtcgatgtcatgtgtggcatcttagtcgggctcggctgctcccactgggctcaggcaaagagggctcgcatcctcgtctggtccggaagggtcaaacacaggggccccgactggtggtgcctttaccatgacgacggcaacttcctggcgcagcagcggctcgccgactgctccccgctgtccggtgaccagctgctgttcaacgaggaccgcaccgacgtggtggtggtcaatggagagatctacaaccacaagaacgtccggaagcagttcgccggcacacacgattacaggaggtgtagtgactgcggggtcataatgccgctgcacgacaattacagcgagaactttgagaacatgatggacaggccgttcgtgttcgtgctctaccacatccgtgataggaccaacggggtggagagcgacgccatcgtggacgaaccgctcta

SEQ ID NO: 91395 - DNA, 174 bp, Zea mays
  Clone ID: MRT4577_183351C.1
gtaacctgaagctttaagaaaacaaattgctcccgcaagactccaagcggcaggtgaccatccttattgtccaccactccaattacccattactgcatcaatgcatacgaaaacgcatcactaaggatttatccttagtcaaagcaaacttataaatgtacctatcacttttaa

SEQ ID NO: 91396 - DNA, 1524 bp, Zea mays
  Clone ID: MRT4577_183352C.1
atgaaggggctactgttaggggtcttcttgtctaccgaaggtcctcaagacgaagaaatcacctatgagcaactagcatgtgtgccgaagctgcagcaagcacatgaaaagcaccaaagaattacaacttcggctcatggtggttacgaagacttgttcttcataaccttcgtccgagaattatcaagcccaaaaggatttgatacttcggaggacgaagggcctagaggtgctttgcctcttgctattaggcctcaggaggagagaccacatggtggtcgtgtccggcggggtgctgggcatgtgccatatggccaaggaccccatggcaatggctttgattcttacttctccagcggacaacaatttccttcttgtggtgatcgcttcccttctagatcggggatgagtggattacccaagttaaaatttgagaaggatcttgtctgccacccttgtcgtcacagcaagatggttgctgcttcccattccccggtcaccaaggcaaaggatgagacttttactcatgctcgagacttgattcttaggttgcaaaatgagtttcccaaaaatgcaataagagcgattcacagtgacaatgccacagaatttaaaaatactcattttgagaccttttgtgttgctttgggactcgagcatcagttttcctctttgtacgtgcctcagcagaatggcattattgaacgcaagaattcgacccttgttgagatggccaggacaatgcttgatgagcatagggctcctagatgctttgtgctgaaacaggaaaacttggacaaatttgattctcggtcttctgatggggttttccagggttatgcattacattctcgtgcttatcgtgttcttaacctagagactaaccgcattatggagacttgtgtggttacattcgatgagactgcaccttgtacatcccctgtctttgagcctataggtccagaccagatgggacataccatctttgtggaggaggagcacgacgacgacgattggggttttaaaatgggcttagcggacaaaactctttttcttctcaagcatgatagtgatacccttttagtcgagatatatgtggatgatattatctttagtggctcttctcatgctcttgtttccaagtttttagatcttatgagcagggaatttgagatgagcatgataggcgatctaaacttctttcttgggctacaaattaagcagacccaagatgtgacctttttgcatcaaggcaagtatacaaaggacatcctgaagaagttcgacatgggcgaggccaagcctctttcaacacccatgtccaccacgatggcgcttgatgctgatgaggacggcaagctcgtggaccagaaggagtacatgagcatgattggctccctcctatacttgattgcgacgaggccagttatacactttgcagacttggagagtttggaagctttgaatgtgtcttggaatggattgctagctcttgtattgagtgtgaatgagtggactgtttga

SEQ ID NO: 91397 - DNA, 158 bp, Zea mays
  Clone ID: MRT4577_183353C.1
ccgagcaagcactaacagggcaccgccctaggattaaggcagcagggccatgccccgtggcaggacgtgctgcagcttgagctgatgatttattacttcctttcactgcaaggccttttgctcgccaaactatgaccataagtgccggagccggagcc

SEQ ID NO: 91398 - DNA, 485 bp, Zea mays
  Clone ID: MRT4577_183354C.1
gagacacacctcgagccgttcttatccccagaagcttccgatcgtctcccacacccgaccgcctgtcaaacccgacagactcgtcgcgtcgcggagcttctctcctcgcctcttcatgcgccatcgtcgccgcctccacctctgcgacgtccacagataggcaggaggaggagggggcgatgccttcgatctcctgccacaatctcctcgacctcgccgcggtcgacgaggtggctctgccgtcgcccacgccgctccgcctcccgcgcgacatgtccgtcgcgagcccgggcgtcgccacgtcggcggcaggggccgatccgccgcggcgggttatcgtctcccatcgactgccggtccgggcgtgcgctgatggggggcgggaagcgcgtgcgccccgcgctgtgcctggccgcgtgcgccgtgatgagcttccctcagtcctgaccgacgccgcgcgcgtcctccacatcggaaaccctccc

SEQ ID NO: 91399 - DNA, 259 bp, Zea mays
  Clone ID: MRT4577_183355C.1
gctgacagtaaaaacaaaacattgtcagctagtggtggcagtgcagcccgtgaaggtctaaaccctgaggaactctcatcattaccaagatcgcttctgtgatcaacttcagttggtgttcatgaaacattccctggacagcaagcctaaagggaaaaaatagtgtgatcatgttactggcatgcaggagccctctaccccacatccttcgtaattgccagcacagagatagaccaaaggtctgttaacgtgtcgacac

SEQ ID NO: 91400 - DNA, 586 bp, Zea mays
  unsure (1)..(586): unsure at all n locations
  Clone ID: MRT4577_183356C.1
taacggccgccgtgtgctggcaaacgccctttcgagcggccgcccgggcaggtacaagcttttttttttttttttttttttttttttttttatgaaaacccccgactaccaaacaaaagccagttcaatcgtaaaggggcaaaaaggaacggagggacacccaccaccatggggggcagggagaccaacgaccccaatgaaccattgaaagggaaaggaaaatatagagggaaaaggaggtccggaaaaaaaaaaaaaaaaaagccccgggcccgcaccccgcccagggggaaaaatgggaaaaaaaaagacaaaggggggggcttgggagcacacataaaggggccccaattccccaaaaagggagggaaaaaaaaatacaggggggggttttaaaaaaaagggaaaaggaaaaaactggggaaaaaaaaaaaaaaggggaagaaaaaaaaaaccccttttgccggggtggaaaaaaagaaaagagccntacacggggggcttttcaaaaaaggttcacacccaaaaggaaaaggggaccccccgtaaaagaaaaaaaaaaccgcggggggggagggggaaacgc

SEQ ID NO: 91401 - DNA, 196 bp, Zea mays
  Clone ID: MRT4577_183357C.1
ttttggtttgattagcggcaggtgcccattttatgggatgcggaggaccacaaaaacggtgccaggaagaacgcgagcgttcgatccaaatgtggtgcaacttgatgcataactgggctacagcccatgttgcacacagaactgaaaagggtctctgcacgaaggcataatctaagagacaaatgtgcaacatcaa

SEQ ID NO: 91402 - DNA, 303 bp, Zea mays
  Clone ID: MRT4577_183358C.1
tatcgcgtgcgttcgtacagcacatggtcgtcaccgtgtgcaagccggaccttgtgctgatgtagcgctactacctactctggagcatcatgctgacaataatggaggttgcactatgcacgtgggcattcatacgtagcttcttacacagccgcatgtgcgggttcacgcgcatttccacactatcttcttacccataggcaacttcgccaccggcttcttagtcctcttgtccctcatagcgggcgtcgtcgggatcgcctgcgccatggtgggctataaccaccttcgcttctggaacta

SEQ ID NO: 91403 - DNA, 284 bp, Zea mays
  Clone ID: MRT4577_183359C.1
cccacacctactggcacttttccagttttctagacgaacagcacaatgaggggacggtcataactctcaaggcgaagccgaataagtacactgccaacgacatcgcactgaagatccactcttcttccactaacctgtactgcttgtacgctcctcacgccgacctgactgacgcaatacaacgccggtcatgcgaagccttcgtgccacttcttacgcacccctgatcccgacatcaagtccatgcagatccaccacgacgcgcgccaccccaaactcccctt

SEQ ID NO: 91404 - DNA, 314 bp, Zea mays
  Clone ID: MRT4577_18335C.1
attcgttcccgcccgccgatggcgatatccatcagccatagacacgacaacatggctcgcgcgaatcacaccgtccgcacctccacccaatgcaacgcaccctacaagcaggtcgccaccaacgcgcagaggaagtctgcgccgactacctgcgacgataagaagccccacacgtacaggcccagcaccgtcgcgcttcgcgagatccgcaagtaccagaagagcacggagctgctcatcctgaagctgcccttccagcgcctggaccatgagatcgctcacgacttcaagacggatctgcaggtccagagtca

SEQ ID NO: 91405 - DNA, 6078 bp, Zea mays
  Clone ID: MRT4577_183360C.1
tcgttgagctgatcaacagcgcccgtgaccagaagcgcgtcctctcttccaaagcatcgggcgagcctccgcttctcctagcttcctctgtgcactgcgcaatgagggaggccatcagggccgccaggaaggaattctcggtctgcactggtccagcgaactccgccatcacgttccagatggacgtgcccgcaacgatgcctgtcgtcaaggagctctgcggcctggatgtcgtggagaggtacctggagagcgtgtcggctgccagcccaacaaacaccgctaaagcatagatccagtaggcgctctacccatggtgtgagggcttaatcaatctgtaaaacactaagcggcgtgacatgccgagctttcagtgttagctatgatgtacagaagaagaggtaccaatggcgagttgtggccatgcgaatcaggattcaggaatcatgaacaataggggggaaataaagcaaataagtgttgcgcaggctttttcgtggggacgaaatcatgtgatacaacttgaattagtcagcccaactaacaccgctgcatagtaggcgctctacgccgggcgcgcagcaccagcacctttttttttttttaccgtttctgtctgttttctttgtcgttctttatgaggctggcagaacctgtatgccgctcaacacgcagcattacatcaagcccgataacggtaggcggcggcggtggtgctggcggtgaacggcaagcggtacgaggccgccggcgtggacccgtcgacgacgctgctggagttcctgcgcacccacacgcccgtcagggggcccaagctcggctgcggcgaaggtggctgcggtgcatgcgttgtgcttgtctcgaagtacgacccagccaccgacgaggtgaccgagttctcagcgagctctgccttgctcggtgaccaccagcgagggcattggcaacaccaaggatggctaccaccctgtgcagcagcgcctctccggcttccacgcctcccagtgcggtttctgcacgcccggcatgtgcatgtccatcttctctgcgcttgtcaaagccgacaaggcggccaaccggccagccccaccggccggcttctccaagctcacttcctcggaggctgagaaggctgtctctggcaacctgtgccgctgcacagggtacaggcccatcgtcgacgcctgtaagagcttcgcagccgatgttgatcttgaggacctgggcctcaactgcttctggaaggtgatgagcctgcagtgtcagcaagactgggtctggagtgtacaaggatcaggacctttatgacaagtacattgacatcaaaggaatcccagagctttcagtcatcaacagaagcggcaaaggaattgagcttggatcagttgtgtccatctctaaagctattgaggtgctgtcagatggaaatctcgtcttcaaaaagattgctggtcacctgaacaaagtggcctcaccgtttgttcggaacactgcaaccataggtggaaacatagtcatggcacaaagattgccattcgcatcggacattgcaaccatactactagctgcaggttcaacagtcaggcttccaaaaggctgtgcttcactctggacatgcgattctaggaccctgctgctgagcatatatcccggaatggggctcaatgatgtcacctttgagactttccgagcagcacctcgtccacttggcaatgctgtctcatatgtcaattcagctttcttggcaaggacttcattggatgcagcatcaaaggaccatctcatcgaggatatatgtctggcgttcggtgcttatggagctgatcatgctattagagctagaaaggttgaggattacctgaagggcaaaacagtgagctcgtctgtcatacttgaagctgttcggttgcttaaagggtctattaaaccatcagaaggctcaacacatcctgagtatagaattagcttggctgtcagtttcttgtttaccttcctatcctcccttgccaacagcttgaatgaatctgcaaaggttgttctggcaatggtaccaatgagcactcaccagagaagcatcttaagttggacagcaatgatttgccaatacggtcaagacaagaaatatttttcactgatgaatacaagccagttggcaaaccaattaagaaagcaggggcagagatccaagcttcaggggaagctgtgtacgttgatgatatccctgctcccaaagattgcctctatggagcatttatctacagcacacaccctcatgcccatgtaaaggctatcaactttaaatcatctttggcttcgcagaaggtcatcacagttatcaccgcaaaggatattcccagtggtggacaaaatattggttccaccttcccgatgatgggagacgaagcactttttgcagatccagttactgaatttgctggtcagaatattggtgttgtgattgctgaaacacagaagtatgcctacatggctgcaaagcaagccattattgagtatagcacagaaaatctgcagccaccaattctgacgatagaagatgcgatccaacgaaacagctacttccaagtccccccatttgtagctcctaagccagttggtgattacaacaaagggatggctgaagctgatcaaaagattctatcagcagaggtaaaacttgaatcccaatactatttctacatggagacacaagtggcgctagctattcctgatgaagataactgcataaccatctattcttcgacacaaattcccgaggtcacacaaaatgtggttgcaaagtgccttggcattccatttcacaatgtccgcctcatcaccagaagagtcggaggaggctttggtggaaaggcaatgaaagcaatacatgttgcatgtgcatgtgcggttgctgcattcaagctgcggcgtccagttcggatgtacctcgatcgcaagacagacatgataatggcaggcggtcggcatcctatgaaggtgaagtactctgttgggttcaagtcagatggcaagatcacagccttgcacattgatcttgggatcaatgctggaatatcaccggatgtgagcccaatgttgccacctgctatcataggtgctctcaaaaagtacaactggggcaatcttgcatttgacaccaaggtctgcaagacaaatgtctcatcaaaatcagcaatgaggggtcctggagatgttcagggctctttcatcgctgaagccatcattgagcatgttgcctcagcactttcagtcgacactaacaccataaggaggaagaaccttcatgactttgagagccttgtggtgttcttcgaagatgctgcaggtgaagcttctacctacagcctagttacgatgttcgataagctggcctcctctccagaataccagcgccgagctgcaatggtggagcacttcaacagaagcaacaagtggaagaagcgtggcatttcttgtgtgccagttacatatgaggtcaatcttcggccaactccaggcaaggtgtctatcatgaatgatggttccatcgctgttgaggttggaggggttgagataggccaagggttgtggacaaaagtgaagcagatgacggcattcggactgggacagctgtgtcctgacggcggcgaaagccttctggacaaggttcgggtcatccaggccgacacattgagcatgatccaaggagggatcactggtgggagcaccacttctgaaactagctgtgaagcagttcggcagtcgtgtgttgcacttgttgagaggctgaagcctatcaaggagaatctggaagctaagtctggcacagtggaatggagtgccttgattgctcaggcaagtatggcgagtgtgaacttatcggcacatgcatactggaccccagatccaactttcacaagctatttaaactacggagctggcattagtgaggtggaaattgatgtgctgacaggagcaacaacaattctaaggagtgaccttgtctacgattgcgggcaaagcttgaaccctgctgtcgacttgggccaggtggaaggcgcattcatccaaggagtaggcttctttacaaacgaggagtacacaacaaactctgaggggttggtcatccacgatggcacatggacgtacaagatccccacggtcgacaccatcccaaagcagttgaacgttgagctgatcaacagcgcccgtgaccagaagcgtgtcctctcttccaaagcatccggcgagcctccgcttcttctagctgcctcggtgcactgcgcaatgagggaggccatcagagccgccaggaaggaattctcggtctgcactggtccagcaaactctgccatcacgttcgagatggacgtgccggcgacgatgcccatcgtcaaggagctctgcggcctggatgttgtggagaggtacctggagagcatgtccactgccggaccaacaaccactgccaaagcatagatccagcaggtgcaccgcccatggtgagagagcttaataggtctgtgtaaaacactgaacagcatgacatgccaagcttacatgtgttagctctgatgtacagaagacgaggtagcaatgggagctgtggtcttgtgaatcaggatccatgaacattagaggaaaaaaataaagtaaataagtgtcgggcaggcaaatgtgtggatgaaatcatgtggttttgattggattttgaagaaatttttgcaatgaatctccgttcatcgctaaaaaaaaaaaaaaaaaaaaaaaaatccccgaaggagttcaatgttgagatgtttaacagcgcccctgacaagaagcgtgtcctatcttccaaagcgtcgggcgagcccccgctggttctcgcagcctcggtgcactgcgcgatgagggaggccatcagggcggcgaggaaggagttttcggtcagcaccagccccgcgaaatccgccgtcacattccaaatggacgtgccggcgacgatgcccgtcgtcaaggagctttgcggcctcgacgtcgtggagaggtacctcgagaacgtgtctgccgccagtgccggcccaaacacagcgaaagcatagatccagcaggcctcagggtgcagtcggcgcactgccaaagatgatgtgtgctgccctgatgtacagacagtccagtacagaggagagagaattgggggaactcaggaactgcgaggagcgatgaacagtatatagagtgaaaaataaaagtgcttcgtactaataaaaaaaaaaaaaaaaaaaaaaaaaaaaaaaaaaaaaaaaaaaaaaaatgttgaatattgtgtaaaatcaaaaaaaaaaaaaaaaaatgagcctgcacccgagaaaacgtcctgatggaatgaatggccggtcaacgggtcgccacttctcgtgattgctactggagatcagtttgttccaaaaggacttatggagattggaggacggccgaaatgtcaggaagctgcatggaagaacagaagagagccgcaggagctggaattcctggacattactattcagttccctctgtaaagtagcaacgctgttttgcaagcctcccatgctaatttcgcgctgccaaattttaacgtgatcgcgaagctagccagtcctggcgcgtctactttgcctggttatctgacaacaaaagttaatatgaatatgaaagggccttccttaatgttttttttccacttggtgctgtataaaggttcagtgtatattccattcaggagaatgagaaaaacttcaacacttcagtgtgggtggatcaggatttaggcaacacaatggaactcgatgtgtaattcaaaacagacagacttttaattttgacccggtaagttttagagtttatagttttgaaagtttcagtagtcagttcaacactccagtgtgggtgaattcaaaacaggcgacttttaattttgaaagtttcagtagatttgttagtttatagtttatattttgaaagtttcagtagtgtccaatggcactccatgtgtaattccccacaggcagacttttaatttaaaaaaaaaaaaaaagggcgaccgctcgcgatctaaac

SEQ ID NO: 91406 - DNA, 871 bp, Zea mays
  unsure (1)..(871): unsure at all n locations
  Clone ID: MRT4577_183361C.1
gnagtgcagcttcggccaactccagnaaggtgtctatcatgaatgatggttccattgctgttgaggttggaggggttgagctaggccaagggttgtggacaaaagtgaagcagatgacggcattcggactgggacagctgtctacgaggagtacgcaaccaactctgatgggttggtcatccacgatggcacatggacgtacaagatccccacggtcgacaccatcccaaagcagttcaacgttgagctgatcaacagcgcccgtgaccagaagcgcgtcctctcttccaaaggtgagcctggacccgagaaaacgtcctgatggaatgaatggccggtcaacgggtcgccacttctcgtgattgctactggagatcagtttgttccaaaaggacttatggagattggaggacggccgaaatgtcaggaagctgcatggaagaacagaaaagagccgcaggagctggaattcctggacattactattcagttccctgtaaagtagcaacgctgttttgcaagcctcccatgctaatttcgcgctgccaaattttaacgtgatcgcgaagctagccagtcctggggcgtttactttgcctggttatttgccaacaaaagttaatatgaatatgaaagggccttccttaatgtttttttccccttggtgctgtataaaggttcagtgtatattccattcaggagaatgagaaaaacttcaacacttcagtgtgggtggatcaggatttaggcaacccaaaggaactcgatgtgtattcaaaacagacagacttttaattttgacccggttcatagaaagccaaaaaaaaaaaaaaaaaaggggggggagggggggaaaaaactcgaggagggg

SEQ ID NO: 91407 - DNA, 772 bp, Zea mays
  unsure (1)..(772): unsure at all n locations
  Clone ID: MRT4577_183362C.1
tactgatgaaagtcgtttttatgaagaagcgttgaaataagaaaaaaatggtggtcaaatagaaaaaagaaaaaaagattgagggcttttgctgcctatagggcaggtactcattgttttacttcgctcttcttttctcgccaaaaagtagagcaaggaaagaaaatgaacacccaagaaaagagctaaggtcatccagagaaccgtcaattttgtatgcccaggaacgtggctatgtgacttgactcttgaaagatatgaagtccgggagaagaaggtttccaagaagcgccccaggggattgaaagctatgcacgacatggacagtgactcggaataaataaaagaggatcactgaacatgagaagctgaatattagaaagaaggccaggacagatcctgcagatggaggccgacgagaaaacgtcctgatggaatgaatggccgtatcaacgattcgccacttctcgtgattgctactggagatcagtttgttccaaaaggacttatggagatcggaggacggccgaaatgtcaggaagctgcatggaagaacagaagagagccgcaggagctggaattcctggacattactattcagttccctctgtaaagcagcaacgctgttttgcaagcctcccatgctaatttcgcgctgccaanatattagcgtgatcgcgaagctagccagtcctggcgcgtctagtttgccgggttgtctgacaacaaaagttagtatgaatatgaaagggccttccttaatgttttttcc

SEQ ID NO: 91408 - DNA, 567 bp, Zea mays
  Clone ID: MRT4577_183363C.1
ctctgacgggttggtcatccacgatggcacatggacgtacaagatccccacggtcgacaccatcccaaagcagttcaacgttgagctgatcaacagcgcccgtgaccagaagcgcgtcctctcttccaaagcatcgggcgagcctccgcttctcctagcttcctctgtgcactgcgcaatgagggaggccatcagggccgccaggaaggaattctcggtctgcactggtccagcgaactccgccatcacgttccagatggacgtgccggcaacgatgcctgtcgtcaaggagctctgcggcctggatgtcgttgagaggtacctggagagcgtgtcggctgccagcccaacaaacaccgctaaagcatagatccagtaggcgctctatccatggtgtgatggcttaatcaatctgtaaaacactaatggtgtgtttggtttgtggagtcactctatgcttcatgaggtgatgcatcataagttcattccatcaattttggtggaatcaacccactcctcatgtatatactaattattagattatgaggaatgggatggtgatagatc

SEQ ID NO: 91409 - DNA, 395 bp, Zea mays
  Clone ID: MRT4577_183364C.1
aggaaaaacctggttttttattggaaaaaattcttgggttttaataaaaaacaccaaactttttttgcaaaaaccttgggggggtgctcctccttttttggggcctgttttttaatttcaggtggcctcgcaaaaaagggaacaattggggggggggccttccaaaaaattgggggggggggtttaaaaaaattttggggttggggcaaaaggaaatcctgggaattcaaccctcatttttttttcaggggaaaattttgaaaaaaaatggtgttgtgctccctggaaaaaaattttttctggacaggtgggggaacacataccaagttaagtttataaaaactcttttacctcccccgtaaaaaaaaccttttttgggggggtttataacactt

SEQ ID NO: 91410 - DNA, 588 bp, Zea mays
  Clone ID: MRT4577_183365C.1
gtcctgcggcggtgaagccttctagcaggtgcgggtcatccaggccgacacattgagcatgatccaaggaggggtcactggtgggagcaccacttctgaactagctgtgaagcagttcgtaagtcgtgtgttgcactcgtcgagaggctgaagccaatcaaggagaatctggaggctaaaactggcacagttgaatggagtgccttgattgcacaggtgaggataagctttgtaaattccaattttctcattgccatgccaagaataacatctcattgtttaaaactttgcctccttcctttgagtcattaacaaatgacaagcaatagcagtagtaattaagggaggagatcctacagttctgaggaacacagtatttgttagtacttcaattggccatgtcattttgctgatcacttgcaggcaagtatggcgagcgttaacttatcggcacatgcatactggacccctgatccaactttcacaagctatttgaactacggagccggcactagcgaggtggaaattgatgtcctgacaggagcaacaacaattctaaggagtgaccttgtctaagattgcgggcaa

SEQ ID NO: 91411 - DNA, 474 bp, Zea mays
  Clone ID: MRT4577_183366C.1
taatctgataacagatgggagtgatttttcagttacaccagcaaacaatcaatgtgtggtgttgacatggtgtggaaacaaagagctgcatcttatgttatctttacaaccgatcaacacatggcacaaatctggatattaatattttcagtataataccacttgtctaattaacatgaaatatacaacttacatcactgcaggtgttagggtcagctccagcttctagtaggagtctgattacttcaatacttctactaggagtctgattacttcaatacttgcgctccctacggcaacatgtaatggggttgctccaccagctctcatatttgggtttgcacctgcctggattagaatcttcaagcatggaaaggaagaacctacaatgacggcaaacaacaatggcgtgatatcatcattggtttcagtaattggctcagactatgttgagctgatctttggggccctttg

SEQ ID NO: 91412 - DNA, 1021 bp, Zea mays
  unsure (1)..(1021): unsure at all n locations
  Clone ID: MRT4577_183367C.1
gctggtcacctgaacaaagtggcttcaccgtttgttcggaacactgcaaccataggtggaaacatagtcatggcacaaagattgccattcgcatcggacattgcaaccatactactagctgcaggttcaacagtcacaatccaggtggcttccaaaaggctgtgcttcactctggaggagttcttgcagcagcctccatgcgattctaggaccctgctgctgagcatatttatcccggaatagggctcaaatgatgtcacctttgagactttccgagcagcacctcgtccacttggcaatgctgtctcatatgtcaattcagctttcttggcaaggacttcattggatgcagcatcaaaggaccatctcatcgaggatatatgtctggcgttcggtgcttatggagctgatcatgctattagagctagaaaggttgaggattacctgaagggcaaaacagtgagctcgtctgtcatacttgaagctgttcggttgcttaaagggtctattaaaccatcagaaggctcaacacatcctgagtatagaattagcttggctgtcagtttcttgtttaccttcctatcctcccttgccaacaatgagtcaacaaaggttaatggtcccaacgggtcatgtagtaatggagccacaaacggtgcccttgagcactcaccagagaagcatcttaagtttgacagcaacgatttgccgatacagtcaagacaagaaatatttttaactgatgaatacaagccagttggaaaaccaattaagaaagcaggtgcagagatccaagcttcaggggaagctgtgtacgttgatgatatccccgctcccaaagattgcctctatggagcatttatctacagcacccaccctcatgcccatgtaaaggctatcaactntaaatcatctttggcttcgcangaggtcatcacagttatcaccgcaaagatattcccagtggtggacaaaatattggttccaccttcccgatgatgggagacgaagcactttttgc

SEQ ID NO: 91413 - DNA, 254 bp, Zea mays
  Clone ID: MRT4577_183368C.1
aagcagctctttgtgcttttgaagaagctcgctgcctccggctagtttacgagggtgaagagctcctggaagctgctggccaccgactccaagcccaaggccgccaagcccaaggcacccaaggccgcgcccaagcccaagctctcagcgaaggcgaaggccaagaccgctgctaatcccaaggcggtgttacccaaacccaaggccaatgccaatgtcaagcctgtcgcttctgccgacttgtttcccaagcc

SEQ ID NO: 91414 - DNA, 2210 bp, Zea mays
  Clone ID: MRT4577_183369C.1
gttttgtccacttgctctacctttgggccctaggtatttaagtcctagtagtggctccaatgccctagtttcagaaggtgaagatgatgtaatggtattgaaaggaagaagcaaagatgaccaggcccaagttgtatacagtgatccaggcactaatggagcgacaaacacagtagctcagtcgttacgagtcactttgcctttgtaaactcttgcactttgctttaaccatgtaaactattacgtggatttgccgaaagaaatgtagaaccactctctcatagaagtggctctattaatgctctcggatctaacaggcactgttggtgtgagggttctaggaaaactcactttttttagtggagctggaagaaggacaactagtggagccctggcaggaaggaaaactagtggagctattgaaggagatattaccctgtcgggataccccaaaaaacaagaaacttttgcccggatcagtggttattgtgaacaaactgatatccattctccaaatgttactgtatttgaatccatcacctactctgcctggctgcgtctttcctcagatattgatgatggtacaaaaaagatgtttggtggaggaagtgatgacccttgtagagcttgatgtgttgcgcgacgctcttgtgggtctccctggagttagtgggttatcaactgagcaaagaaaaaggctgacaattgcccgtggagctggtagcgaacccttcaatcacacgcatggatgagctcggaattcggcttgatgctcgagctgcggcaattgtcatgcgtacagtaagaaatacggttaacactgggcgtactgtggtctgcacaatccatcagcccagcatcgacatatttgagtcttttgatgagcttctgcttttgaaacgtggaggtcaggttatttatgctggtgaacttggtcgccactctcacaaactagttgaatattttgaggcgattccaggtgttccaaagatcacagaaggatataatcctgcaacatgggtgctggaagttagttctcctctatctgaggctcgattgaacatgaattttgctgaaatttatgcaagctctgtgctttataggaaaaatcaagaggttatcaaggagttgagtattccccgatcagacaaccaggacctgtcatttcctacaaaatattcacagaatttctacggtcaatgtgccgcaaacttttggaagcaataccgttcgtactggaagaatccaccctacaatgctatgcgctatctgatgacatgtctctttggccttgtatttggtacagtattttggcaaaaaggaaagaacatagattcacaacaagatttatataatctgcttggagccacttacgctgctacattctttcttggggcttcaaattgcatcacggttcagcctgttgtatcgattgagcgagcagttttctaccgtgagaaggcagcggggatgtactctccgttatcctatgcatttgctcagacatgtgtggaggtcatctacaccatcttacaggggatactgtacacagtcatcatatatgcgatgatcggatacgactggaaagcggataaattcttctatttcctgtttttcatcactgcaagcttcaactacttcacattgttcggcatgatgttggtagcatgcactccctccgcattgctcgcgaacattctcatcacgtttgctctacctctgtggaacctctttgctggattcctcatcgttagaccggcaataccaatttggtggaggtggtactactgggcgaaccctgtgtcgtggaccatctatggcgttgttgcgtctcagtttggcgagaacgaaggtgagctttcagttcccggtgggacgcccgtggtggtgaagcagttcttgaaggataatctcggcatccagcatgacttactcggctatgttgtgctcgtccatttcgcctacgtcattgtgttcttcttcgtattcggttattccatcaagttcttcaacttccagaaacgttagcgggatcatttgtatgtaattaatcggtcgccgtaagttctagttctagttctagtccaaagcaagtgcttgtttgggaggaagcctgtatgcaagtagcagtgtattcctcttgttttttcaatgccataatattagtaggaagatgacgaatgcaaaagtcccatgtcttgttcctttta

SEQ ID NO: 91415 - DNA, 1281 bp, Zea mays
  Clone ID: MRT4577_18336C.1
ttgggtccccggccgccaggcggcgtcaccacgtcctcctccggctactcgctcgttccgccccggcgtcccgccctcagccgccgccgtcgccccctccctcggttcgcctcgtcgtcgtcatgggcaaggcctccaaggacaagagggacatctactaccggaaggccaaagaggaaggctggagagctcgcagcgccttcaagctcctccagatagaccaggagttcaacatcttccatggagtgaagcatgtggttgacctgtgtgctgctcccggaagttggagccaggttttgagccggaacctgtatgtaccagcaaaacagtcttctgattgcaaggaaggtgatcttcctctcatcgtcgcaattgacttgcaaccaatggccccaatagaaggtgttatacaagtgcagggcgacatcaccaatgctcggacagcagacgtggttattaggcattttgatggatgcaaagcagacttggttgtttgcgatggagccccggatgttactggccttcatgatatggatgaatttgttcagtcccagcttatactcgcggcattggctatcgtgactcatgtactcaaagttggtggaaaatttgtggcgaagatatttcggggtaaagatacaagtctcctgtactgccagctaaaactgttcttctcgcaagttacgttcgccaagccaaaaagtagccggaactcaagcatcgaggcgtttgcggtctgtgagaactactcacctcctgaagggttcaaggaggaagacctataccacctgctagagaaagtgggtactccctcaggagctggcgatctagattgcagaagcggatggctggagggaccaaacaaggtgtacatcccgttcctggcctgcggggatctcagcggctacgactccgaccgctcgtacccgctgcccagcagcacggacggtggctcgtaccggagcctggaccccgtgcagcctcccatcgccccgccttacaagaccgccctgcagatgaagaaggcttccagccacggcgccggcgcggacgccatcaagccgtccgcagactcctgagccgcagcccgtttccgtttaccaccttgcgcggtggaagttgctttcgctgggtcctggacctggctctctagtctctctctacagaaccttcatctacgaaactcaaaaaaaggaaaaaggattggaaacatttttgtggtaattttgagctggggatctgtgcggcacgtaactggttactactgattaggctgagatc

SEQ ID NO: 91416 - DNA, 229 bp, Zea mays
  Clone ID: MRT4577_183370C.1
aggagtgggaggtttttttttttttttaggcatataataaccaaaaaattctcccgggttgcaccctttaatttaaaaacttaataaaaacagtgttcaaataacttaaacagtaccaggcaagctttacacatgaaaaggggcatttcaaccttacaggttaactaaaaccttcacgtcgactaggactttttaagggtcccacaaaaaattccatgttaaaataaaa

SEQ ID NO: 91417 - DNA, 412 bp, Zea mays
  Clone ID: MRT4577_183371C.1
ctcgcggagaagcagaaagaccagcggcagcaagtgcaacgggaccaaactcaacagcagaccagttcgtcttccacgtccttcatgttaagggaagctgccccaacaacaaatgtcaggtagataacagattacattcacatcgtgctacaatcccaaatagtgatgtgacctcattttcgggtaaagatttgagtgtgcttgggcttagctgaatcccatttcaaaaatacacttgtgcattttcaaaatatactcttgtagaccagcatgagcaatgttggcagttgacccacaatgttccttcaaaaaaacttggatcgtttaagagccacaaagaaaaagaaaaaaaaatcttcaggaaatgatagggtagtttttttcttcacataaggtatgggggcattttttt

SEQ ID NO: 91418 - DNA, 374 bp, Zea mays
  Clone ID: MRT4577_183372C.1
acgaccacgagctccagagtggccgtcgccgagtatcgggctctgggctaacgcagtgcggatcacaatggcggacaaactcccacgcctactagaccgaggggggttcatctgctgaataaggtgaacctagaaccttacgaacacgtacctgaggattatcaatatacacggactgggctatgggttggcgattgttttatttacaacaattctctgcagccggtctataactgctgaaatagaggggctccgacgctactaaaagctataccggctgctatagaggacacggtgctgccgacagaagatgactgctgccatttaataaactgtataaaatgcattccaaacaataaaaaaagttcatgcct

SEQ ID NO: 91419 - DNA, 325 bp, Zea mays
  Clone ID: MRT4577_183373C.1
aacacgcgttcgctcacgcttatgcccacgcatacgcatacgcgtgcgggcgggggcatcatatgtggtgacagctgcagcgaacgtaccggccaaccaaaaagcgtgctgtcacgccgtcaatgggcccggttacgcctcaccgctggaggacatggacaacggtactatggagaaactcgtatacgtcacctgagtatacaacggcactggatttaacaagccgaattaccttaccacggcgaatttatatcccagttgtcctacatactcatatttgatccacaggctcacagtcacccacatctgcgactagcggcatcac

SEQ ID NO: 91420 - DNA, 464 bp, Zea mays
  Clone ID: MRT4577_183374C.1
gccacgcgtgcgcgttctgcttctcggcttctcctccccctccggttcgggtaggggcttcgggaggctcttcggggttcgatctcatcgatgtgccgatctagattgctgagtaccatttttactaccgctgcttcgtctgcggcctggactaccactccgtccacaactccttccacaactacttcaagacctacgggtacgacatcatgctcaatatcatcatccatcggtacacgcacatgtgcttcggctccttcttcaccaccttctccatgcaggacgccatgcagaacatcatcgacggcgtgaacggcaaggagctcatcagccgcaacatcaccgactaccaggcccactcccgaggcggccgtggaggcggctacggcggcggccacggaggcggccgctacggcggtggctaccgccgtgatggccgccgcgattacggcggcggctacggc

SEQ ID NO: 91421 - DNA, 305 bp, Zea mays
  Clone ID: MRT4577_183375C.1
tttagcctttactttccaacgcagggaaaaaggagacgggggcggtgtcctttctatgacagtgaagggggcgctcccgcgtttacgagcggaaacaatacatgccgttacggggatgaacaggacctgtatacagcctagtctgtggtctcgccagctagctggagaaacttggggcggagacttgccaagggggtcatcgcgccacttttacctatacggacagtcgtagtaagcggaacacacaacacactcttcaacctacgactgtgtggcggggcctgaaatgtttctatgcccgtgct

SEQ ID NO: 91422 - DNA, 770 bp, Zea mays
  Clone ID: MRT4577_183376C.1
attgtcgacctcgggcgggccggggacacaggcacccagctgagagacgatagaagcacgcagcagctgaaagggaggggaactaggaatgaaggggagcaaggtccacgagcacgaggcagacgtccccgcctccgacctctgggcgatctacggctccctccgcgccgcggaactcctgccggagctgctcccgcacgtgctcgccaaggtggagctcgtcagcggcgacggcggtgttggtaccatcttgcagctaatatttcctcccgggattcctgggctacagagttacaaggagaagttcatcaaagttgacaacgagaactatatcaaggaggcagaagccattgatggcgacattttgaagctggggttcgaggcatacatgatacggtttgagatcattccaaaaggggccaattcgtctgtcatcaggtcgactatcgagtatgtgattgctgatgcgcacccggagctcgaagctatggtgagcacagcaactttggctgaaactgctcagaaattttccgagtttgctaaggcgaagtaggtcccataaggaatgtcttgaaatatatatatatatatctcgagagcggagtttatgtttatcatgaaacaagtgaaatacagtttcagcgctttcgtgttgcgcctcaaatatatgctcctacattgcagtgacatgggaatctgatcccacaaatcaccaaaaaaaaataaaaacatttgacagaaaaaaaaaaaaaaaaaagggccctagggcc

SEQ ID NO: 91423 - DNA, 864 bp, Zea mays
  unsure (1)..(864): unsure at all n locations
  Clone ID: MRT4577_183377C.1
ccggccgggnaanaaaattaaaaaaaaaaaaaaaaaaaaaaaaaaaaaaaaaaaaaaaaaaaaaaaaaaaaaaaaaaaaaaaaaaaaaaaaaaaaaaaagggccccccggttgaaagacgatagaagcacgcagcagctgaaagggaggggaactaggaatgaaggggagcaaggtccacgagcacgaggcagacgtccccgcctccgacctctgggcgatctacggctccctccgcgccgcggaactcctgccggagctgctcccgcacgtgctcgccaagggggagctcgtcagcggcgacggcggtgttggtaccatcttgcagctaatatttcctcccggggagtataaaatacgtgggtatgctgccataatatctttgatgttggatatgctaagatactagtagtaaagttttaattgctctgctccgctccgctcctagggattcctgggctacagagttacaaggagaagttcatcaaagttgacaacgagaactatatcaaggaggcagaagccattgatggcgacattttgaagctggggttcgaggcatacatgatacggtttgagatcattccaaaaggggccaattcgtctgtcatcaggtcgactatcgagtatgtgattgctgatgcgcacccggagctcgaagctatggtgagcacagcaactttggctgaaactgctcagaaattttccgagtttgctaaggcgaagtaggtcccataaggaatgtcttgaaatatatatatatatatctcgagaaggagtttatgtttatcatgaaacaagtgaaatacagtttcagcgctttcgtgttgcgcctcaaaagaaaaaaaaaaaaaaaaaagcggcc

SEQ ID NO: 91424 - DNA, 409 bp, Zea mays
  Clone ID: MRT4577_183378C.1
ggaagaatcaagagaagttctactggaagcctggacatccacaatgcacatcatcattagtttcctcagcgagatgcagaggcaactgaaccgacaggactttggctccttcgacagaatcaaagaggaatatttcctggcaatcgcgagggtaactgccatgaagctgctcagctcagctagttctatcggctttcaggtgagcccaccaaccgacaagccatgcgagaacagttacggcggcgcagctagacgtggtctatccaaaatggtagatgtggtgatggtgtaccaggcactggatcacggtttgccaacaatcttatcactgctgtcgggggaaactaaagagctcgtcgttgcagaggctgaagggcttatcaagagactgtcggaagcgttcgccaaa

SEQ ID NO: 91425 - DNA, 421 bp, Zea mays
  Clone ID: MRT4577_183379C.1
gcttcctcaatttattaggactcaaacaattccaataaacaaataaatagtagaaaacaattgtaggggggggcataaataggggaaaaaaagaaaagaaattttaaaaaaaaaggccaataattgtaatagtccaacaatcaaattcaatacaaggggggaagaattgaaatgaatgcagggaataaggcaaaattttaatgattcttaatttttaaatctttttggctaatagggttaataataatccatataaacatttcctatggacataataattgttccaaacacattttgttgaacccgttgttgaggagaataagaagaggaagccataataaaataataataatggtaatactggttttagcttctgtttgtaaaggttattgtttttattcaatcataataggaccctttt

SEQ ID NO: 91426 - DNA, 103 bp, Zea mays
  Clone ID: MRT4577_18337C.1
agccattgcgccccaaagccgtcgcgggtgctgctgcggaggcctgggaccgaaattgaactgcggttggtgaggtggcggcggaccaggttgctgcaggggc

SEQ ID NO: 91427 - DNA, 324 bp, Zea mays
  Clone ID: MRT4577_183380C.1
acgaagactgtatatgaggaagagctcactgttgaggagcgtaaccttctgtctggtgcatacaagaatgtgattggggctcgacgcgcttcatggcgcattggtaattccattgaacaaaaagaggagtcccttaagaacctattatcctgtggaccttatcaaggaatatagtggctagatcgaagcttaactgagcaatatctgtgatgagctcttgaaactgcttgactcccacctagagccttattgtaatgctgctgaatcaaacgtcttctacctcaagatgaaaggtgactatcacacgtctcttaccgaatttaa

SEQ ID NO: 91428 - DNA, 142 bp, Zea mays
  Clone ID: MRT4577_183381C.1
gtattttctgtggcagttattctagacgttcaccaggtgtaaaagcctgagagagaaagttaaaggtactcaagctcccagtgcggtgctaccacatgaatcacattttaccaataggggcgatctgtcacctggaccctgg

SEQ ID NO: 91429 - DNA, 274 bp, Zea mays
  Clone ID: MRT4577_183382C.1
cagcttagtaaatctgcagctattggctcctagcacccctcatattgtttttcaagactggtgggctaatctggaaagcaaggtacctgttgtgccacacaaggggatcgattctctagttgtcttggtggctttggaagcaagggagtggatgtgtgtttgagggggcctcccctagtaccaatcagattattcaaaacatcaaagacgacgctcatcgatggtgccttgcaggtgctgggggctgcatgccctttggccttagtgttggttg

SEQ ID NO: 91430 - DNA, 573 bp, Zea mays
  Clone ID: MRT4577_183383C.1
gtatacggacgacctacccatttattctgtctcgtggtttttactccgttaatttctgaccgttacctgcaagcgtaccacttatccctatagcgagcagtattaggagcaaaagaaagtcatggttcacagatgattttctgggcgaaatgcggtccctcacattttcacacatcatacatagctcgaagaataaaatgtaaatcctggggcgcggaatgagtaacctaactaacattaatcggggaccgtttaatgaccgttttaaaacctggaaatttgtccagcgctctaaattaaaaatatcgtgcaacaacgccatgagaggcgggtagcttaaaggatctccagtgccatgggctatttctatcaaagacaccgactgcacctgatagtccctaaccgtctggaaactttcagattgcattgagggtcccacgctggattggcacagcacacgaaaattctgaatgatagaaggtaacctcagtatataacatgacctggattcggtatcagcaaataaaactaccaatttttccgcattaacgcgcaatccactctgcggcaatg

SEQ ID NO: 91431 - DNA, 230 bp, Zea mays
  unsure (1)..(230): unsure at all n locations
  Clone ID: MRT4577_183384C.1
ccggggcccgttccaatcgccattgcctggcaccacgtatgagctgcattgctttcgacgccatggagagttgcaacaagagtattgtcttcgtagttctttgttctgatctgcacatactttcagaggtaancgatttcgttcgtcgttttaagtagtgtatctggatttcgtgctgcttatatggtgactggtttgccgtgttttctcctaagagatgggtgagagct

SEQ ID NO: 91432 - DNA, 214 bp, Zea mays
  Clone ID: MRT4577_183385C.1
cgcccagcgttgaacaaatcccgggaagggaggaggagcgttctcggacgcgtggatggtttgtctctttgtagctggccatgagaggtaatagattattatatgatggatcgtcttgcaagcaataaactggattttttttttattcgagagaggcctcctgctgtgggtggggggagagtttttttctcgcccgctgcctatggtacgttgt

SEQ ID NO: 91433 - DNA, 289 bp, Zea mays
  Clone ID: MRT4577_183386C.1
acggcgggccgtgtcataaaggccacctcgacacggaggtgtgcattggtggccaacgctcggtgaaaaagccccacgcttttttttttggcaacctcgccgcgtcgggggcgccatgacgtttttttttcggtgaagggagaggagcggacgtactcccgggcgacggcgaccggagagcactctcttgttgcggtggacgtccgagatcaaaggcttggaaaaaggctagggaggcaccagcatttgtcacgctgcggtgacctcgggtggggggcgctgttgctgc

SEQ ID NO: 91434 - DNA, 305 bp, Zea mays
  Clone ID: MRT4577_183387C.1
gccgagtggaactgagagtgcgtccttgcgttctgacaaaagtgttctgagaattgagcaagatcagccaaatgcgtggactatccagcacgacgctggcctacatatgatcatgcaaccctccctgaccctcccctggccgtgcccgacgccgcccatgcatcgagaatagacctgggaataaacaaccgataagcgatggatggaatgtgcgatagggtctcctcagtgccgtagctgttgctagtaggcggcgagcacaggctgccctgcccattctcagcgcgccgttggtagcgccaatt

SEQ ID NO: 91435 - DNA, 812 bp, Zea mays
  unsure (1)..(812): unsure at all n locations
  Clone ID: MRT4577_183388C.1
cgcgggaagaggtggtaacaacgcagagtacgcgggcagggattgcaactggcaatagaatcggggaattgtggcaaggacaccattgatatgttgttgaaagatgctgattcctctngataaataaacaggacgtcccccanatcaggcgggtggatcattctttggtcgttactaggtgtggatcatctatatctatcgagattcgttgctccctcggngtttttgtaagggttttcctttcnngtnnccccttcngagctgcgaccttttgcttgccgggtgtggtttctgttttnccctttnnnnnncnnnnnncccccccccccccccccccccccccccccccccccccccccccccccccccccccccccccccccccccccccccncncctcccctctctccccccccccccttggggcggtttcttgcggtttgctctttccctgtgggggcggtgttatgcttggcttctggggggccccgttcccccctctcttccgtccccttttctttgtgtcttcggcgggctttttttccccgtccgcccccgcgctcccccctcccgctctcccctttcttcctctctctgcgccccttcccccttctcctcctttgcccccccccccgtcnttgcccccccccccgcggccccgtttctncccccgcgcccccgctccccactcgcgccccctccgcgccccccgctcccccnccctcccctcccccccgnccgcgcgctcgcccccccccccccgtgcccccccccccccccccccccccccccccccccccccctcccccccc

SEQ ID NO: 91436 - DNA, 1161 bp, Zea mays
  Clone ID: MRT4577_183389C.1
ccggccggggaccctcgagcaccccccggcccgtcgtctacagtctacagcacacatcgcagcagctcgcgaccatcgtccatccgctcaattgtgatcgatcgagctgcgagcccatcgcctctagctaagctaccatgggtcggcagccgtgctgcgacaaggtggggctgaagaaggggccgtggacggcggaggaggaccagaagctcgtcagcttcatcctcggcaacaggcagtgctgctggcgcgccgtgcccaagcttgccgggctgctgcggtgcgggaagagctgccggctgcgctggaccaactacctgcggccggacctcaagaggggcctgctctccgacgccgaggagaagctcgtcatcgacctgcatgctcagctcggcaacaggtggtcaaagattgcgtcgcacatgccaggacgaacggacaacgagattaagaaccactggaacacccacatcaagaagaagctcaggaagatgggggatcgaccccctcacccacaagcccctcccgccgcctgatccgcatccgccgaaggaccaccagagcccaccgcacaccgccacaggtggctcgccggaagcgccgccatctccgtcgccgaagcctccacaggagaagacggcagtaccggtgatgacgccagctagccagcaagaagcaggtgacgatgacgtgccgctcctcagcaactactacccaggcttctgcaccgacgaggtacccatgatggacccggacgagatcatggtgcctctggacgacgggcggacggcgccgccgacgtcgacgattttctcgaccacgaccacgacgtcctactctgcagcctccgactccgtgtcgtcgtccttgagccgcgacgaggacccgctgttcccgctcatggacttggagttccccgacatcgcgttccagatggggctactagacgacatggtcgcgtcgtgggacgactccttggcgcagcagccgctgtcgccatcccctgtctacgacgacgactatgcaaaccagctgcagatcaggagcggcgttgcgtttgaccaggagccagggaacaagattgtgctcttctctagctattaggcagttaacccctttaataaatgagatatgcacctcctgcaaaaaaaaaaaaaaaaa

SEQ ID NO: 91437 - DNA, 129 bp, Zea mays
  Clone ID: MRT4577_18338C.1
cagcgtcccctccacccgcactccattggcgccgctcacctcccctcgcagccgccggagatatgatccgatccgatcagatccgtttgtgattgtgctgcaggagtgagaagtaaaaacatatggctg

SEQ ID NO: 91438 - DNA, 345 bp, Zea mays
  Clone ID: MRT4577_183390C.1
gcagtccttttggcaacagaagagagaaataaggatgttgatgatgagatcgttcgcccaggttcttctattaattctgtaaatgttttagataaatatagttattgcacagtgggtaaacctatagataatcttagtagacccattctcttatcttcacaatctgctgatgtaccaggtcgagacttagcttctcagatatctgttgattctgatcacacttaccatggaagtactgaggatcctgtgggcatgtcaagtacaacacctgattcggtatcctcctggattgtagccattgtaccagaagctaacaaggaacaccaatcatgcaaatcttctcta

SEQ ID NO: 91439 - DNA, 661 bp, Zea mays
  unsure (1)..(661): unsure at all n locations
  Clone ID: MRT4577_183391C.1
tcgaggccggccgggncgggttactagagcaccccccggcccgtcgtctactgtctacagcacacatcgcagcagctcgcgaccatcgtccatccgctcaattgtgattgatcgagctgcgagcccatcgcctctagctaagctaccatgggtcggcagccgtgctgcgacaaggtggggctgaagaaggggccgtggacagcggaggaggaccagaagctcgtcagcttcatcctcggcaacaggcagtgctgctggcgcgccgtgcccaagcttgccggtgcgtatctatctatctatgtacgtgcatgctcgatcgatcgtcgcagcttttgtcatgacgagagaagcttgtcgcgcgttgccatgccatgcagggctgctgcggtgcgggaagagctgccggctgcgctggaccaactacctgcggccggacctcaagaggggcctgctctccgacgccgaggagaagctcgtcatcgacctgcatgctcagctcggcaacaggtggtcaaagattgcgtcgcacatgccaggacgaacggacaacgagattaagaaccactggaacaccacatcaagaagaagctcaggaagatggggatcgacccgctcacccacaagcccctcccggcgcccgatccgcatccgccgaaggacc

SEQ ID NO: 91440 - DNA, 308 bp, Zea mays
  Clone ID: MRT4577_183392C.1
tttggggttttttttaattttttttggggttttctctttctttttttttttttttgtggaaaaaaacaacatattttttctttacatcaatatttcaaaatcatttgcccaaatgaatgcccccccaagttttgggagacagatcaccccctttaattcaccggattttttcccttccctttggggccaatgtaatacaacaataatattggcttgatttgggaagacacctttgccacctgtgggatggccgatttgatctgtcaattggcccccttatgccaatgcgtttcatggtttttacacca

SEQ ID NO: 91441 - DNA, 276 bp, Zea mays
  Clone ID: MRT4577_183393C.1
gcgcggacgcgctttttttttttttttattaacagcacagacttccccggccataattgttgtagcccgcggttccagattgacggcgtcgtgtgaatttatgcagggcttgagtcaacatgtcttatcttatataaacgcattgctggtgctcacagcacaccagttagacgtctgcctgttgcccactcgcggccaaatcatatacattgggcgagtctcgctagccaaccatcagctgaggatagtaactgacggtcctctttactgccatgg

SEQ ID NO: 91442 - DNA, 378 bp, Zea mays
  Clone ID: MRT4577_183394C.1
gatggcttccgccgcagggtggaaggtatctactgccaggcctgcagaagatctgaacccacaccagtgtcgtaaagggtctactccgcccacctgagcgctacagaaagaaacaagctacgtgcatggattgaccttgtgaaggactgtgatgttcaaggacttttcttcttatgatcactgactggtactactttaggggtgcttacattgacagagaaaatctacctattgtaaggcatcaacatgtgtggctttaacaagatctacgtgatgacctgcaaaggtaatggctaacaagccaccacagttctttataagcagtggtcctttatcactcatcatgctgcatgatcttggaatctttggcataataca

SEQ ID NO: 91443 - DNA, 855 bp, Zea mays
  unsure (1)..(855): unsure at all n locations
  Clone ID: MRT4577_183395C.1
cattgggacctcgagccggccgggaaacgcgtaggccccagacgccaggctcgagttccgttctctattttaattctttgcgagcgcacagtctccttctgctttcctactgatccacgatctcgagcttgaaccgggttcgtcgtaccgcaacaccatcatggccatctttggtcgccaccgccgcgactccaccgctggctctgccgattccgctcctacgatcgtccccgaactctccaaagaccaggtcaaacgcgcaacccgaacacgcaagacatgggccctcctcacgtcctttttcctcttcatcaccgtcgtgttcctcatcctcgttgagattggcggcatcaagaacaagaagatcatacggaactggtactttattcgcatcgatgtttccaacatcattcccgccagtgtgcccaactccgccctcatcaacacaatcgcgcaaacactgggtctgcacgacttctaccaggttggactatggagattctgcgagggctacaagaaccagggtgtaacgttttgtagtccgcccaagacgctgtactggttcaacccggtggagatattgagcagtgagctcatagccggagcttcgatcaacctcccctcggacatcaacaacatcctcgacctcatcaagatcgcctcccaagtcatgtttggcttcttcctcgcctcggnctgtctctccttcgtcctcatgttcctgatgcccatctccgtcttctcccgctggtggaccctccccgtcgncatcctcaccttcatcaacgcgctcctctgcaccgccgncaccgtcatcgcaaccgccatggtcatcgtcttccgcaacgtcatctc

SEQ ID NO: 91444 - DNA, 532 bp, Zea mays
  Clone ID: MRT4577_183396C.1
ggggccaactggcccgcttaatttggggccaaaaaaaagggggggggtcagggtttaccccaaaaagggaacccaaaaaaatttccctaatttaaaaaagccacaggatggggtttaaaaaaaaaaggccaagggattttttcctttaaattttaaaaaaaaaaaactcctttttgttacaaaacagagatggaacgttccaaaagtggaccacggttccaattgaaaaaaaaaaaaaaaagggtgttggaaaaaaaaagctaaaagaaaaagccttttctacagggctgggttacaacccccgccaattatagggtccttgaacagggccccccaaaagatgggccccgagaaataaaaagaataccccaaacacatttttgggggggggacacagggaaactattggatccggagtttggtccccaaccaaaaaaaataaatcctaaaactgggacaccttaggtgccaaaggtggacacaccgggcatttttttttttaagggagcttaaaatttttaccttggggggg

SEQ ID NO: 91445 - DNA, 419 bp, Zea mays
  Clone ID: MRT4577_183397C.1
gagacatggtgaatttaaaaagtaaagtacacaaaaggaacaggggaaggagggcagtcaggattgtgggattgccggggctacacagaaaaagagatggaaatcaaaaaggcaagattaaggggaattcaaaggtgggcgatgaaggcaatgaccgaagcgtttaaagaggaagcacagagggtagtaaattaggcagcactttctgggcaggacccttgcagggcccagagaggcataaaactctagatgaacgggagggacctcaaggagtgcaaggaggaaaagttggagggtcttatacactacaaattgggcgaggaaagcacaagaaaatggaccagttatgaaaatgaacagatgttggtaacccagtccttttaagaataagggcaactgtgaacatatttggacagggg

SEQ ID NO: 91446 - DNA, 477 bp, Zea mays
  Clone ID: MRT4577_183398C.1
ccgggcgggatctctcctccccgaccccttgggccattctgcctttttctctctagttgtcctgtagctcgagatcttccatacctcgtggacaatgagatacatcttgcgcatccaggggagggccctgtggacagcagatacgcctcaggctctgggaacgtccgtgagacgacaacggcattgacactacatgccgatacaccggcacttctgaccttcagtccgagcgcggctacggctactacaatgacgcctcctggggtcgctttgtgccccgtactgttctcatggacctagagcctgggaccctggacagcgcacttactggacccgatcggcatatcgtccgccctgaccaccttgagaatgtgcaatcatggtgcatggcaacaaatgggccatgggggattacactcaggacgctgaggtctttgccctctgcccacgatgttctgaggaagcaagctgagacct

SEQ ID NO: 91447 - DNA, 259 bp, Zea mays
  Clone ID: MRT4577_183399C.1
cccacgcatcggaattcctgcatgacgtggaggtgctcaactgcatgggcaacaccagcatggtgctccgcctcggagcatgcgcggagtacggctgtctcgtatatcattacatggatcactggagcatcaacgaacggctgttatgtcggggcagcacgccacctctcgcgtgagcctagcggttcaggatcgcagctgagatcacaacagcgcagttgttccttgcacacacgaagccagagccgctggtgcaccg

SEQ ID NO: 91448 - DNA, 602 bp, Zea mays
  Clone ID: MRT4577_18339C.1
gttgacccagcgtttttcggcctcagactcgcggcgcagggccaggcatccttctgcaagcggctggcgaggaacgtggtggccatggccacgggggagcccaccgcggcgcctgtggctgacaacgaggagctcaccgagttcgtcaacgcgttgaaaaaggagtgggacaggatcgaggacaagtacgcggggagcacgctcgccgtcgccgccacgctcgccatgtggagcgccggtggcgtagtgtcggcaatcgataggcttcccttgattccaggtctgatggaggctgttggaatcggatacagtgggtggttcgcgtaccgaaacttgctattcaagtctgacagggatgctttctttgcaaaggtccgggaggtctacgaggatataatcagaagttaacagatggagcactaatgcaagctcatccaaatcaagttcactttaagagatccttctagtttgctgccgttcagttgcttttgctagctgtaatatatttcagtatagcatctagtttgatcctcactcaatgcatgtatggataaacattttttataaaatgcaatctatcgatgctctggtttttttttcgg

SEQ ID NO: 91449 - DNA, 867 bp, Zea mays
  unsure (1)..(867): unsure at all n locations
  Clone ID: MRT4577_1833C.1
cggccgctcgaggcggccggngcggggattcaagccaccccctccctcccccaaaccctctcacctcgtcggtgccacccccattgccgccgccggagaacccgccctctggaggtgcagccgcccgctgataccatcgtcctctccgccgccatgatttgcgcaatctccggcgaggtgccggaggacccggtcctgtcgaccaattcggggctgctcttcgagcggaggctcatccggcgctacatcgaggaccacgggaagtgcccggtcaccaaggaggagctcgccatggacgacctcgtgacggtgatgaccaacaagattcctaagcctagacctctgcaagctgcaagtgtccctggactccttggtatgtttcagaatgagtgggatgctctcatgctgtctaattttgctttggagcagcagctacatacagcaagacaagagctcagtcatgcgttataccagcatgatgctgcttgccgtgttatcgccagactaaagaaggaaagagatgagtctaggacacttttggctcaagctgaaaggcagattcctatttcagctgcaggacctgcgcctgtagctgctgttacaaatgggaaaagagctttggaagatgaagtgggtcctgatgggaagaagatacgtcctggtattaatcctgtcatcatcgatgaattaacagaatgcaattctgtgctctcagcacagcgcaagaaacggcaggtacctccaagtttagcaccaattgatgcacttgaaagatatactcagatctccagtcatccacttcacaagaacaacaaaccagggatcttatccattgatattcctcattcaaaggatattattgctact

SEQ ID NO: 91450 - DNA, 558 bp, Zea mays
  Clone ID: MRT4577_183400C.1
cctcgaggccggccgcaacgacaacttcttcgacatccgactactcacaacaagcagtcaagatgccgagccaaaagtcattccgcaccaagcagaagcttgccaaagcgcagaagcagaaccgccccatccctcagtggattcgcctgaggaccggcaacaccatcaggtacaacgccaagcgacgacactggcgcaagacccgtctcggtatctaagcggatcgcctccttcaagccatccctcactcgatttccgattcccagccacctctttcgacgacgacaaggactgtacgaaacgagcgatcatattgggaatttcgcacatggcgggaaccgagcgaccagtcttctaagcgaagtacatctgcaacacgagggatgcagtgggcggtactcttttcacgttaccggatacctccctacctctgattcacggcgctttgggtctgtaaatgggcatgaaaggaatcgattcatgatggttagactaggcagtgatgaatgaaaccacttgctgggtcgcaaaaaaaaaaaaaaaaaacaaccgccccta

SEQ ID NO: 91451 - DNA, 2388 bp, Zea mays
  Clone ID: MRT4577_183401C.1
aggaaacgggcatcttgtttattttgatagaacatgggaatccatggacaacatttaacccataggtgcatgttaaatacggccttattggaacaaaaatacaaattttggggccgcccgtttttttttttttttttttgcatagaaacgtgcgtcttctttattttcagcgaaacatgggaattcatggacaacgtataacccatagtgcatgaaaaacgggccttattggatcagaaatataattttttgtacaacaccgacaacagcaacagcagtccctcaattatatactcaagtagtcaacatcgcaaaaatatgcaccaggttcggcaggcactgtgaaaaatgggatttctggatctagcgcccagagccctttcagtgggcgagcaggcagctcaagttctccagacagcacggtcgcaacaaggtaatggacaacatgcacaacagataccggttgtcaggttatcatggtgcgaaaatgtgctcttgaagacctgtagagaccagccaaagcttcctgcaggtgctcatgttccactgttcagggaatatattagatctgaagcacactggtttcctctttcctgatctgaatatggttccataaactttggttgccaagatgaaatactggttgctcacatgaaacaatcatccgcattgttcacgcagtgttgaagcaccatacgtgctctaagcttgcaatccaagcagtggtcgtttatcatgtttttcacttgttggatcactccagcattttgcagtctgacagccctaccagatgaggcttcacattttgggtaaatcaagttcagaaggcaccacagcgtggcaactcgcaattgtttatccttgctttgcagaaagttcaccgcaaacaatggtttgatgcgatctgctctgtgaggcagaagaacattcatcacagcttccttgttcaattcgtttccagccgcaatgtttgcaagcacatacataccctgaacgaatactcccggggcagacgcattgttcagttgtcttgcaatagcattcataattattccatcttcaccaatgacaaaattagcagagtccacatatccatcaacaagattgcgcacaagtgccagggtttgttcttgaacaaaatgttcagaatcgcatatgaggcttgaaagagtagataaggtcaactccttaacaatgaagtctttatccttaggactaagaagaaacataatattcctgagagcccatacagattttagcctcaaaattggatccatggactttgacaaatgaacaagatgtgagacgaccccagagttaagaagaactgatttcctgggtgtcaaattaatggcaatattgcacatcgcaccaagagctaccacatggactgaagtagatgagtcatttaaaagctggtgccagggtttgttcttgaacaaaatgttcagaatcgcatatgaggcttgaaagagtagataaggtcaactcctcagacatgaacatgctgcaacacggatatcagcccaatcatgtttcaatgcctcaaggagtaaggttgatacctcaaccgacatcagttgagatcttgactcttcaagttttgagcaaagttcagatagcgcaagtaatatggtcactgctcgccttgtccccaatggatttgctagtagatggttgctgagcttctcaactgcgttcgttgtaagagcttgtctctgcagttcgaagctgtctttaatcagggtggttaatgccaagggagcttcatctcctacatgaccaggttcttcaattagctcaagtaaaaccataatcaacttggtcttaatctgattgtcctgaaaatgatcaggagaagcatgcccaagtgcaatcaagcagaggcaagcaagtaatcttgtgcgtggactccgatcatgtattaacccaactactgaacgaaaaccttttccatggtccgttgatgcaaatcttgaagcaacatcttggttattttgaataactgcaatgatagaacctaaacaagcatctcgtagattcatagaacatccaaaaagactaacaagtttctgtggaactccagcactgcatagtgacaattgttctgcaccactctcacaagagtgagatacaatagcagcagccagctctgtgacattctcgttctcactgtccaaaagggaaagaacaaaatccacgttttccccactattaacatcaaactttggagctaatcttgattgatatatcattctaagagcacgtgcgcatgcatccacaaccttctcgtcggggtgagcgaggaggcgagtgatgtggccgacagcgccggcggccagcacggcgcgcgcgccatcgtccacgccgcacgcgaagctccccgcc

SEQ ID NO: 91452 - DNA, 303 bp, Zea mays
  Clone ID: MRT4577_183402C.1
ggtccaagggccgcccgggcaggcgatcgaggcattcggttctaggccttgagcctcatggggaccaaaaacttcgggcgccttagagctttatgactacgtatccgggtaacaaccataatcaaaccccttatgggattgaatttgaaaaagtcaatgttgaacaacatgctaattttaatagggacataagaaggtgcggtttagctcatattatgctaagaaaaagatcggaacatttaaaaccggactatctcgaacaagaaatatgattggggatggtacacagatcacatagatgga

SEQ ID NO: 91453 - DNA, 2041 bp, Zea mays
  Clone ID: MRT4577_183403C.1
ctcttacaacgaacgcagttgagaagctcagcagccatctactagcaaatccattggggacaaggcgagcagtgaccatattacttgcgctatctggacggttgctcaaacttgaagagtcaagatctcaaatgatgtcggttgaggtatcaaccttactccttgatgcattgaaacatgattgggctgatatccgcgttgcagcatgttcatgtctgaagaatatctccaggtcaccaaaggtacttagtggaggtcgattatcctgcgatacagttattggtcccctagtccagcttttaaacgactcgtgtacttcggtccaggttgctgcccttggtgccatttgcaatattgccattaatttgacacccaggaaatcagttcttcttaactctggggtcgtctcacatcttgttcatttgtcaaagtccatggatccaattttgaggctaaaatctgtatgggctctcaggaatattatgtttcttcttagtcctaaggataaagacttcattgttaaggagttgaccttatctactctttcaagcctcatatgcgattctgaacattttgttcaagaacaaaccctggcacttgtgcgcaatcttgttgatggatatgtggactctgctaattttgtcattggtgaagatggaataattatgaatgctattgcaagacaactgaacaatgcgtctgccccgggagtattcgttcagggtatgtatgtgcttgcaaacattgcggcaggaaacgaattgaacaaggaagctgtgatgaatgttcttctgcctcacagagcagatcgcatcaaaccattgtttgcggtgaactttctgcaaagcaaggataaacaattgcgagttgccacgctgtggtgccttctgaacttgatttacccaaaatgtgaagcctcatctggtagagctgtcagactacaaagtgctggagtgatcctacaagtgaaaagaatgataaatgacccctgcttggattgcaagcttagagttcgtatggtgcttgaccactgcttggacaacgctgatgattgtttcatgtgaacaacctgtatttcaccgtggcaacccaagtttacggaactatattcagatcaggaaagaggaaaccagtgtgcttcagatccaaatatatgccactgaacagtggacatgagcacctgcagaaagcttttgctgatctctgcgggtcttcaagaaccagctgccttttttgcaccatgagaacctgacaaccggcatctgttgtgcatattgtccattaccttgttgtgaccgaagttgtctagtgaacttgggctgcctgctcgcagtctgaaaggctttaggcgctatggatccagaaatcccatttttcccagtgcctgccgaacctggtgcatgcttttgaagttgagtctgtaaatgaggaaaccagtgtgcttcagatccaaatatatgccactgaacagtggacatgagcacctgcagaaagcttttgctgatctctgcgggtcttcaagaaccagctgccttttttgcaccatgagaacctgacaaccggcatctgttgtgcatattgtccattaccttgttgtgaccgaagttgtctagtgaacttgggctccctgctcgcagtctgaaaggctttaggcgctatggatccagaaagaggaaaccagtgtgcttcagatccaaatatatgccactgaacagtggacatgagcacctgcagaaagcttttgctgatctctgcgggtcttcaagagccagctgccttttttgcaccatgagaacctgacaaccggcatctgttgtgcatattgtccattaccttgttgtgaccccgatgttgtctagtgaacttgggctgcctgctcgcagtctgaaaggctttaggcgctatggatccagaaatcccatttttcccagtgcctgccgaacctggtgcatgcttttgaagttgagtctgtaaatgagggactgctgtcactgttgtacaaaatttgtatttctgttccaataaggccgtatttaacatg

SEQ ID NO: 91454 - DNA, 322 bp, Zea mays
  unsure (1)..(322): unsure at all n locations
  Clone ID: MRT4577_183404C.1
aggagaagttgttgcccttgatagatctcacaataaggtgatggatattctgaagttggcttctgagatggacttgagttgtattaaagcttataaacttgatgctctcaaatctgtacggaaaactgatgaagcaagaagccttggcatggctgataatcacagtgaagcaattgaaacaccaacagaggacccttgccatgcgacactaggtgggaaatctaccagtgtagacgaagacagctcaacaacaacagtggtgttttctgataacaaaaacctaaattccanaagatacattagcaaggcagaactcaggaag

SEQ ID NO: 91455 - DNA, 583 bp, Zea mays
  Clone ID: MRT4577_183405C.1
aatccaacaatccttggaaaaagggtttttatccccctgaacaaattacttgatttaggggatggacccccagggaatacaaaacaaaattttgggcccaaaaattggccggggggggcacccccaaattaaaacagggcctcctcaagggtggaaccaatttttttcagcacaattgggaatattttaaaaatttccacactaaattggtcctggagcaaccttttagcacgggcctaaaaggccgaggaaaaaaaaaaaaaccgtctttccgggggggggggatttaaaaggaagaaaacttggaaacggccttggggcccttggaaacggggggtttgggaagctccccaggaaggacgagggcccccgaattctggatcccccgggaggttatggggggctttttgttggagcgggcaatcttgggggcctcaacggcccgtttttcaaaaatgtcgttgatgaaggggttcatgatggacatggccttggacaaaatccccttggccgggggcacctggttggccccctggaaaatggaaattttgggcgtctggaccttttttttggcctttttttt

SEQ ID NO: 91456 - DNA, 347 bp, Zea mays
  Clone ID: MRT4577_183406C.1
ttttcttttagggttgttgctcttgttgcttattgtcgtatactacgtccatggttgtgactgtcttacggcgcgcgtgcttcggtgtaagagacggcgtcgcaggtgacgttctacaggaagatcttgagcacaccgagggtctcctagtagatgagccccgagatgcacttcacgccgtcccggcgggccaggctccggatcgccggcttcctgatcccctggatgatgtcgcgcacaccttccggagacgcttcgcgccgaccttgaccaggcccttggcgcccttggcgaaccccgacattttcgccgcggatacaagaggattggggaatttttgtttgctg

SEQ ID NO: 91457 - DNA, 324 bp, Zea mays
  Clone ID: MRT4577_183407C.1
ttccccgggcttgcaaggtaatagtttttttatggggcccccaaaattaaattaatgggccggggtttaaaaacgtgggaattggaaaaaccctgggtttcccaaattaaatccctttgaaaaaaatccccttttccccagttggggaaaaagcaaaaaggccccacccaatcccctttccaaaaatttgcccaccttaaatggaaaagggaaccccccttttagcgccccttaaaccccggggggtgggggggttaccccaagggtaacctttacatttgccaggcccttaggccccgttcttttggtttttttcctttcttt

SEQ ID NO: 91458 - DNA, 116 bp, Zea mays
  Clone ID: MRT4577_183408C.1
ggggcgtgcgaccacgcgtacagccacgcgtccgggcagcggaagattgtatttatgaagaatacaaagttgacaaacgatgctcattgtaccacgtcggttccaagacaacttgc

SEQ ID NO: 91459 - DNA, 508 bp, Zea mays
  unsure (1)..(508): unsure at all n locations
  Clone ID: MRT4577_183409C.1
ccnnggccagggccgggatagcaaagcatagtcacctgcctatctatctatcgatagagagataggacagctagttagctagcatggagtgcggcagcaagaacgcactaggcggagtgctggcgctgctgcttctccagctggtgttagctccgacgacggcgacggcccgcctcctgcaggcggataactccaccgagcttggcctgaacatcatcgcgcagggagtttggacatccagagcatgcaggcatcctctgtggtgaaacctgcgtcttcctaccatgctatacggcagtcatgggtggccaatgcattgaacaaatctgcatgatgtgacatctgtgactagcgcctatttgtaatttgtgatgggagaacacactaagacagaactgtgatgatcaacttattgcacgtgtatggtgatctaataactctagtatagtaacaagggatcactcgaacggatgtgcactcaaagagaaacaaaaaggcccctagggcc

SEQ ID NO: 91460 - DNA, 257 bp, Zea mays
  Clone ID: MRT4577_18340C.1
cctgacccacgcgactttttttttaccggatcaaaagagaacctgcagagggggggtggaaacccaagatgcggtgtctccataaccccaacgacgtacactcgagaccaacttaacagcgtgaggaacgagccagaatctaatcacccgttgctgagcccatgcaacaaccaaatctgctacaagcacgaacctgttaagaccagtcaagacaaaacgatcatagaaacaagtgaacatgctgtgacttgcaaaga

SEQ ID NO: 91461 - DNA, 649 bp, Zea mays
  Clone ID: MRT4577_183410C.1
cattgggtacctcgaggccggccgggatggctatcatacaggactatctgacagctagcgtaggtccagaacttaatacagccatctctgttcattgtgtgaggaaatgacctgacgcaacgaggctatggcgctggagaagaacatagaatgcggcgctaaagaagcactacctcagcgtcccacggaataacattgcatacctcggagtacactatcatacctcgttgtgccacctggatatgacctgcgggctgatcaacaacctctacctgtcctgcgactccctggatgcgcggccgcatgtagaagcttgataactgcggcaccgtgtcagcctcggactttgacatctcatagttcatggggaatttctgcgagtacaaggtggtcgttgtcgacgcagcctagagttcaccagccggtgatcttgtcgtgcgggctgagtgaagtgagaggagtactccctcgtcaccctttcggaatcgctgcacaagatcaaacgcaccgaggtgccgctctcctactacactggagttcttgggatgccaggattcactgcgtactgcgggttcacccatgtcgccaggcccaagaaaggcgacttgcgtgtacgtctcggcggagctaactcacattcattcagatc

SEQ ID NO: 91462 - DNA, 130 bp, Zea mays
  Clone ID: MRT4577_183411C.1
cccacgcgtccgggcgaagcgacgaaaccctcgccagtccccaactcggacctcagtcaagcggcgtgaaggagggagagttcgaggaccgaagcggcgtccggcgagattaagcttaacgtcaagaccc

SEQ ID NO: 91463 - DNA, 1923 bp, Zea mays
  unsure (1)..(1923): unsure at all n locations
  Clone ID: MRT4577_183412C.1
caggcgcatcggcctcgccgctgcacaacgccggagacgagacgacggcggctgcgggatgacggtcttccacttcctcaactgcgccttcctcaccttcggccctcacgtcgtctactactccgccacgcccctgtaccccctccccctttcactgcttcccctctctctctgtctccgtgagatccgtatgctaaacacgcgggatctgtgtttgctacttgatctggtcgctctgttgcgtgatctgcaccggagagtccgaacgccttgacccggcttgtgggatggggttgtagtcagtgcaactgcagtgggtttcgctcactcaagttggcaggcaaacttacgttgcacagttcgttgggattcggagcttagtttgagtagattaaggttttccatccgaatctagctagcagagctgcaatttggggtggtgttttacgagctgtacctgccaagtaagctcacttcaatcgtacgttttttttttgttgtgggttcggagggtattgcttgattcgtggtatcagtcgcgaatgcataattcttgtaatgaccttatgcatttgtgcagtggggtccttgatggaggatagtaagaacaagcctagtactttggtttcaatagcctaagaatgaactacgctagagggtcgctagtctagtattctttgtgaagctatcaggctatggggacgggccgtcagtattaagttagacatagggttgaacttctcttctcccttgttatggctttcatccaccgggtgctgttctccgccttgtcagagaccgatgtgacaagacatccataaccacacgcctattttagttcaagtttgaagctcctgctgatgctacctgatacgtctgaagaattacgaagattctatgaactgtgctccacaacaaggtttcttgtactgtacatttacatccaatctactgtttcaggtcagagtatgatacaatcggcacttctataaaagccgctgctgtttatcttggaactgcgcttgtaaagcttgtttgcttggcaacattgctcaaagtacctgagaatgatagctttgacccctatcaggagttaatgaaagtttttattggattcatagatgtagctggactgtattttgctttgacccagctgacccacagaaacatctctcagaatcataagttccaggctgttggtcttggttgggcttttgctgattcagttttgcaccgactggcacctctctggattggggcaagagggcttgaatttacatgggagtacatatttcaaggacttgaagcgaatgctaatcttgtgatgaccctctcccttgctgcattggggtccttgatgtggcttaggaagaacaagcctaggactttggttccaataatttatgcatgtgctctgctcttggcaacaatgccatctatcaccagctacttgaggaggtcattggagtggcagacaccaaaggtggttggcttcgagctcttctcctcccttgttatggctttcatcagctggcagctgttctcggcttgtcagagaccgatgtaacaagacatccataccactgccaattttacgtgcaatttgaagctcctgcagatgctcctgagtacgtcagaagaattaggaagatcctttgaactttgagctacaactcttcttcttggcgttcggttacagaacattttacttagaacatctgttgtaacttgtgagctgtagagcagaaacccatgcctgaaatgagttattctataacagatgctcatgtaggcgtttgatctgaaacatttgtttattattattgcggtgtgcatttcagccagatgctatctttggtcgcataatccagcgtaaagatcagataattcaggtaaaaaaaaaacaaaaaaaaaaangagaaa

SEQ ID NO: 91464 - DNA, 902 bp, Zea mays
  unsure (1)..(902): unsure at all n locations
  Clone ID: MRT4577_183413C.1
cattgggaacctcgaggccggccgggacctcgaccgcgtcccctaatcgtctcgcacgtaccgtacggtctcaggcgcatcggtctcgccgctccacagacgacggcggaggcggcgagatgacggtcttccacttcctcaactgcgccttcctcaccttcggcccccacgtcgtctactactccgctaccccactgtcagagtatgatacgatcggcacttctgtaaaagcagctgctgtttaccttggaactgcacttgtaaagcttgtttgcttggcaacattgctcaaagtacctgagaatgatagctttgatccctgtcaggagttattgaaagttgttattggattcatagatgcagttggactgtattttgccttgacacagttgacccacagaaacatatctcagaatcataagttccaggctgttggtcttggttgggcttttgctgcttcagttctgcaccgactggcacctctctggattggagcaagagggcttgaatttacatgggagtacatattacaaggccttgaagcaaatgctaatcttgtgatgaccctctcccttgctgcattgggatccttgatgtggcttaggaagaacaagcctaggactttggttccgatagtttatgcatgtgctctgctcttagcaacaatgccatctattaccggctacttgaggaggtcattggagtggcagacaccaaaggtggttggctttgagctcatctcctctcttggtatggctntgatcagctggcagctgttctcggcttgtcagagaccgacgtgacgagacatccatatcactgcccattttacgtgcagtttgaagctgctgaggatgcttcctgatacgtcgnaagaatacgatgattctctgaactctgga

SEQ ID NO: 91465 - DNA, 340 bp, Zea mays
  unsure (1)..(340): unsure at all n locations
  Clone ID: MRT4577_183414C.1
cgactccactgcgtctcgtcccactgccgtccgtcccactgcgtctcgtcaactgtcgtgcatactcattnggatcannngtgcagagcagagccaanatgctcctaaagtgatgtngnnattcctaactctgcaatnngggaggaactnnngtggagatacctatggccannggtccnnaatgaactaagatgtcatgccctnctcttggtggacctggagaatctggactagcactagttatcagagtattcggtgactccactcatcctcagcgttcttgctgagggactattgcnnatttgctcgtggcgcgcccttcttcnntccgtgggccggt

SEQ ID NO: 91466 - DNA, 1372 bp, Zea mays
  Clone ID: MRT4577_183415C.1
atctacccagagaccgaacccaagcaactcattcttctttctcgagatctcccactcgcctccccgcgtcgccgtcgaacccactcctccgcaccagggtgcgtgccagtgcattgggtacctcgaggccggccggggcgtcacccactcaccccctcccccaatcgtctcgctcgcaagtcgcatcgcacgtacggtctcaggcgcatcggcctcgccgctgcacaacgccggagacgatacgacggcggctgcgggatgacggtcttccacttcctcaactgcgccttcctcaccttcgggcctcacgtcgtctactactccgccacgcccctgtcagagtatgatacaatcggcacttctataaaagcagctgctgtttatcttggaactgcgcttgtaaagcttgtttgcttggcaacattgctcaaagtacctgagaatgatagctttgacccctatcaggagttaatgaaagtttttattggattcatagatgtagctggactgtattttgctttgacccagctgacccacagaaacatctctcagaatcataagttccaggctgttggtcttggttgggcttttgctgattcagttttgcaccgactggcacctctctggattggggcaagagggcttgaatttacatgggagtacatatttcaaggacttgaagcgaatgctaatcttgtgatgaccctctcccttgctgcattggggtccttgatgtggcttaggaagaacaagcctaggactttggttccaataatttatgcatgtgctctgctcttggcaacaatgccatctatcaccagctacttgaggaggtcattggagtggcagacaccaaaggtggttggcttcgagctcttctcctcccttgttatggctttcatcagctggcagctgttctcggcttgtcagagaccgatgtaacaagacatccataccactgccaattttacgtgcaatttgaagctcctgcagatgctcctgagtacgtcagaagaattaggaagatcctttgaactttgagctacaactcttcttcttggcgttcggttacagaacattttacttagaacatctgttgtaacttgtgagctgtagagcagaaacacatgcctgaaatgagttattctataacagatgctcatgtaggcgtttgatctgaaacatttgtttattattattgcggtgtgcatttcagatgctctctttaaagtcgcatcatctagcgtatagatcatgtcccagagaccgtttttttaattgaccttttttgtcaaaaatattcatatataccctttgcatctcaaaaaaaaaaaaaaaaaaaaaaaaaaaaaaaaaaaaaggacagggcgct

SEQ ID NO: 91467 - DNA, 1728 bp, Zea mays
  Clone ID: MRT4577_183416C.1
cagctctcacctcgatccatcgttcatctcccagcccagcccaccccagcccagcaaccgcgaatccgtgttcatctccctactcgatcggcagccgcaagagctgaccctccgcttcccccccaaaaaccctagccatcccaggttgctccggccgcatccccgccgaccgccgaccgccgaccgccgacgatgcctcccaaggccaagaaggacgctgcgccgtctgagcgccccatccttggacgcttctcctcccacctcaagatcgggatcgttgggttgccaaatgttggcaaatcaacttttttcaacatagtaacgaagttggctatcccagctgagaattttcctttctgtaccatcgaaccaaatgaagcacgggtgaatgttccagatgaacggtttgattggctttgcaaactttacaagccaaagagtgaggtgcctgcatatcttgaagtaactgacatagctgggcttattagaggtgctcatgctggggatggtctgggcaatgcattcctctcacatatacgtgctgttgatggaatcttccatgtcctaagagcatttgaagacgcagaaattactcatgttgacgatacagtagatcctgttagagacatggaaactattagtgaagagctcagactaaaggatatagagttcatgaaaaagaaacttgaggaccttgataagtcaatgaagaggagcaatgataagcagctcaaaattgagcatgaattatgtgagagggtcataggccatcttgaggaagggaaagatgtccgtttaggagattggaaagctgctgacattgagatcttgaatacattccagctactttcagctaagccagttgtctatttggtgaatatgagtgagaaggatttccagagaaaaaagaacaagtttctacccaagatacatgcttgggtgcaggaacatggtggtgaaaccatacttcctttcagctgtgcttttgaacagaaactagtggatatgccagaagatgaagccgccaaatattgtgctgaaaaccagataacaagcatgatcccaaaaattatcaagactggttttgcagcaattcatctgatatactttttcactgctggtcctgatgaggtaaaatgttggcagatcagacgccagactaaagctcctcaagctgctggtgcaattcacactgattttgaaaggggtttcatatgcgctgaggtaatgaagtttgaagatctgaaagaactgggcagtgaatctgctgtaaaggctgctggaaaatacaagcaggaggggaaaacctatgtggtccaggacggggacatcatctttttcaaattcaacgtgtctggtggcgggaagaagtgaagaatgtatgaagatggtagcatcaacagtgttttacgtcttaccccgaatttctcattcaacagtgtttacaccttgccccgtatttccacatttttgaggtcgcttgccagtagctctaggttccggtatcgaaaacttgtacaacaaggctccagactgttgaaggatttgtattaataacatgcacaattgtatgtcttgtgcttgagctctcgctgttaccagaagcttagaatcgtttgagttctgtggttcagttttgcgtggtttattgtgtaagctggtctaactgcaaatcatttgatgcttgtggcgggaacaaatatgtatcaaccgtgaagctagttgtgg

SEQ ID NO: 91468 - DNA, 426 bp, Zea mays
  unsure (1)..(426): unsure at all n locations
  Clone ID: MRT4577_183417C.1
ggggnnnnaaaaaagaaaaggccgttttgagggcggtttttaaccttttttttaacccccaaaaaaacaccttttaaaaagggggttaaaggggaaaatgcccccaatgggggccaaactggggaaaatttgggagtaaagtcccaaggagggggccacgggcaagggttgggcctatcgggggcccaaagggggcccttagggaggcccgaaaggggccaaaaagggggggggttttttggggaaaattttgccccccttttttgggggtttttgggtttggagaaccccttttccaactttttgggcgggttttttggcggaattattgggggggaaagggttggcaatggcctcccggatggaaaaagggaaccccttttgaaaccggggggggccatgggggttagaaatttcctgggaaaa

SEQ ID NO: 91469 - DNA, 648 bp, Zea mays
  Clone ID: MRT4577_183418C.1
atcgctcgatgctccgccgcctccgacatcttcacttcgtcacctcgataatacccatactccgccggcgattagatgctggttatccggatcacctatctggcgacgagctcctgtcggattcattcacctacaccgagctccagaacgaacgtcctgaggcaagtcaaagaaaagaggatcacccaaggtactgttgatgcgaacattggtgacattccattcgcctagcgtgctgagcatcatcccatctatgacacgactgtaaaagtggttgatattgctacacacatctcgcctacacagcaacctccttttgacaagaactcttttgtgtcttacatcagagaatacatcatgaatctcactgctgagttaggacccttataaagcgtgatgaaatcaaaaaggccggctagtatgcaaccatgtttctcctgtagcaagctttatgacctcccatgctttgatgatgacaccatgaaagatgatgctgctcgagcattcgcctattacgatgatggtgactctacttgtacattcctctatttctctcatggacttatggatatcaagcgttagacacgcagccagactagatactcatgtagatgactatctacggaccattgttatgtccgctactat

SEQ ID NO: 91470 - DNA, 123 bp, Zea mays
  unsure (1)..(123): unsure at all n locations
  Clone ID: MRT4577_183419C.1
tcccncgatccgccctaggcagcaggcggcatcgccatacgtgttgtgggaagatcatcggttgctggattgttatgggtagcttcactgaagacccagggcactggtccaatccaaatggcg

SEQ ID NO: 91471 - DNA, 149 bp, Zea mays
  Clone ID: MRT4577_18341C.1
cggctgcggtacgcgattccaattcgagcacgcgtacgcgcacgtgtacgcagtccatcagggtgtctaagcctgcttagatgtgccttagcttgctggaagtggtaacttgacctggcatcagattcatttaagatcactgaaggaaa

SEQ ID NO: 91472 - DNA, 711 bp, Zea mays
  Clone ID: MRT4577_183420C.1
cctcgcccgcgagtttcacaacaaggtctgagcatctcttctcagaagcctccccagttaccaggctacaccttattcgcaaaaagtttgataaaggttctgaacgtctagcacattcaaaagctagataatccaactgtaccaagggatgtcgactgatgagtgtggatgacattgcctagaggatctgtttatacgggagttgacttttgcatgaagctctttgcagtgtctattgttcaaagagctgatgaattgcaaacaatgcttatggagatggtaaagcaagacagtaggcaccaattaagtgcaaagggtgaattgaaggaactttagacgtgcttgtgcccatcctcagcgcaaaacacagtggcagcgaaagatttaaggatgcatgaatatgtactttgaactttgtaataaacctggcgctcccatgttgcggcacttactgtggaggtggagctttgctatgcccctagctatcccctccattcaaaggattgtcatcgccagcgctagggataattgcctctggtcagatttctagaaaaaatgtccacagttgaacagcctttttcttctcgtctgcaccctctaattagcagcttagtctcagtctccatgttgtgtgcaattatatatgaaactatggatcaactttttgtaatgcaattattgattttaaatatatatattttgcttatttgc

SEQ ID NO: 91473 - DNA, 137 bp, Zea mays
  Clone ID: MRT4577_183421C.1
cggtgctgtgagaggtatcggtaggagctacgatgactccggggtgtgaagccgaccggtctgacttttcatcactgccgaacccactcgaaccacagccatgtccgggtacgagatgattcttgatcctactatga

SEQ ID NO: 91474 - DNA, 852 bp, Zea mays
  unsure (1)..(852): unsure at all n locations
  Clone ID: MRT4577_183422C.1
cattgggacctcgagccggccgggaacgatcctgcccgactctgtcgctcctctagctgttgccctctcgcacccttccacccggtcctcgaccctgcttcacctttgcccccattcactttcgtgcaccatcggtaccaccaaaggccgcacgcacttgctaagccgcagataaggcttccatgacgctgttcgacccttctgccctatactcttctacgcaacaactaccagaaccgggagcgaggaaccatttccacctcttctacacctgttccaacatcctctctactaatcctcccaacatttgtcctgctcacttggcaacctccccgctctccatccgctgacgccgcttcaccttcaacttttacacaaggacaacaccccttctatcctccaaacaaagctcgtatggctgaacctgactacggtgccgcttcctgggctcatgtgacgactggtcccggacatcagggtgcagagttggctgccccacttctctctgcacatgctccattccaacaacaactcccgcctctgtacggaggcgtatatctgcccatgagcgaccatcaaacaccccaaagccgcaacgtaccagatggaccagccggcaatccgctccatgaccgctctccgtatccacctgctggaatccgctacccatattaccagccgcatatgttcccgtatcaattcacgggtcatccacgaccgccaccttctttctggaatggagttgacatgtgcatccccgatcagttgttttctaaccctagtaacacgatgcaagggcatttaccctggcaaacaatagngatgccacatcanaataaaccattagcaccg

SEQ ID NO: 91475 - DNA, 343 bp, Zea mays
  Clone ID: MRT4577_183423C.1
ggcaaattaagaaaaactgtcaggagcctttcgatgagggggcatcttgttgcaattacatccacgaacctaagcctagacaaacaactaaggtgtcccaatccacgcaattaactactacctttccaacaccacccgtgtttgggcccgacatattcagaccggttcctgaaagagaaccaggtttgcatatagagaggagcatatgagcccggccagggcacggacagagctgctccccgagcgggactgttttcccctcaaaaatccccacaccataaaggccgggggggtgccatttgtagccttgggagcctaaggtctgatccgactcacattaatt

SEQ ID NO: 91476 - DNA, 373 bp, Zea mays
  Clone ID: MRT4577_183424C.1
tttgaagtggaaactgatgcatgtgctactggaattggggcagttttgatgcaacatcataagcctattgcatatctcagtaaatccttaagctccaagaatcagttgctttccatttatgagaaagagtttttggctctattgttggcagtcactaaatggaggcagtatttgcagcatactgaatttattattagaactgatcataaggctctgagttttttggaggatcaagtcctccattcggagtggcagaaaaaggcgatgaccaagcttatgggtttgcagtttcgagtggtgtatagagaagggaaggagaatgttgctgctgatgcactttctcgggtaggccatgcaatggcgatgcattctg

SEQ ID NO: 91477 - DNA, 373 bp, Zea mays
  Clone ID: MRT4577_183425C.1
tggtaaaaaaaaaaaaaaaaaaaaaaaaaagaagaaaaaaaaaaaaaaaaaaaaaaaaaaaaaagaaaaaaaaaaaaaaaaaaaaaaaaaaaaaaaaaaaaaaaagaaaaaaaaaaaaaaaaaaaaaaaaaataaaaaagaattgctttaaaagaaaaaagacattcgggggggccctttggggggccccggggtggatcccttttttttccactggaccttttttggtttgggttcctccacattctttgcctgggggcctgtttctaccccggttgctggggaactcctgggctgccccctaattgtgccggggtcagtaactgctgttttcacgctgggggaggtgatccggggggccgcccctgaagtc

SEQ ID NO: 91478 - DNA, 316 bp, Zea mays
  Clone ID: MRT4577_183426C.1
caattactattattggacatatatattgagagaggactgccgaaccctcaacataaaacaagagactgaagggacattaccacgttcctatcacctgggcagctcgaaggggtgatgacatgacgacccttctcggatcgctaacggttgcaggagacgttaccaccatgtgatgcagtaggccagtctcgacactgatagaatcttgcaggtgttctacgactcaggacattgggggggatagggagcaatgaatgtgctcacaccacattgtgagtcttatcatctgacatgcttatggctactgcgcctgaat

SEQ ID NO: 91479 - DNA, 171 bp, Zea mays
  Clone ID: MRT4577_183427C.1
aacaggaagtttcaggccatttcgatccaagtgaatttaatcaaacaggactagacactatttgatcactctaacgggacgtcatttgataaccgttgaccggatgatacagaagcgccacggactcgggaagttcatatgtaaagtgcatccacaacaggaactaaaaat

SEQ ID NO: 91480 - DNA, 401 bp, Zea mays
  Clone ID: MRT4577_183428C.1
ataccaaatgattttatgcacataggaaacactaaccagccttacactttccactgaatgaacggatgcaggggatgtgcatacctgaccctaagaggaatggggctctacagacagggaacagcacccatccattgtgtccagcttagctcaaactactgatcctctataacgtgtaatactctacatcttgcacacgagactttgcatcacacgaaggagaacctccaactctccttctcaaaaagttgaactctacaaacttgctcacaaactcccacatactggatgctgattgaaattttttattaacccgaggacacgataccacgaggatccacacgacttcactgaccgatcacttacttatgttacttcactggttgctcgtccgaaaccta

SEQ ID NO: 91481 - DNA, 446 bp, Zea mays
  Clone ID: MRT4577_183429C.1
gtataatgctgcgccacgcagtccgacgcttagtttctcacgcctaggatccgccgagcgcgcgccgggcacttgctacagcggaagtgcccgcacaggcattaaaggactctactttcgtgaaggcctgataaaaaggcgcccgaaacattgagcccccaacgacgccgctgtccctcatgcattcgtgcccgcccacgcgagttaccatccttaccaagttctaccgtaagttcgtgctctactacaagtgcgagatcgccaacaagtacgtttacatgacaattgtaccatctacaactggtcagatgggtgttttgacacgccatgttgacacaattgcatagctctagcctgttgttctctcactacattaaggaaacgatgtgcgcatgtactttatcagcagtgagttcgctttcgtccattcatactacatcgcttat

SEQ ID NO: 91482 - DNA, 456 bp, Zea mays
  Clone ID: MRT4577_18342C.1
ggcaggccaaaccaaagcaacataatttacttttttttaaaggaagggggcttagtcttttggaacccggaaggcaggggacgggtttcaaatggggctccccctatcccagccctttaaatgtccatgggggcagaagggtaatccgagcccctttccccctcctcctggatgggggagctagcagcagcagcctccaaagggggggcctggttggggacctccatttccatgggggcgaaaagttcctggacccttgccgggccgaacaccttaaacgggttgacggggccgtcgtccttcctgcccacaaaggccacggggcaattggaaccggacaggtttttgccctggaggggttccttcacgggggaaagggggtccctgacaagctgttccgggggggagtcgtcgaacccctggaacctgggttccaagaacctcttggggggttgg

SEQ ID NO: 91483 - DNA, 441 bp, Zea mays
  unsure (1)..(441): unsure at all n locations
  Clone ID: MRT4577_183430C.1
tttntttttttttttttttttttttttttttttgttttttttttggtttttttggggaaaaccaaacatgacaaattttttttggaggcaattccgttttgcaaagatacatttttccgggggataatccaaacaacagggggggttaaggggcttttttgttatttttgcttaaaacaccaaacgggaagcaaaccatcaaaactgatgccctttcaggacaactgagtaaaaaagccctgcaaacttatttcctaggggggggggagggaaagcacatgtgcacaaagagcgcccaaaggtcgttttttcgttgggggtatcaggcaggtttaacaagaagatgcgacaaaaacggggcgtagcttgctagggagctccactggttgggccatgggcactgctaatggagccccagggagaatttccggtccccatttg

SEQ ID NO: 91484 - DNA, 448 bp, Zea mays
  unsure (1)..(448): unsure at all n locations
  Clone ID: MRT4577_183431C.1
cgcggccgaagcaatnccaaataaatactctcttgaatttcttaagcggacacatctatatcggggtgggataaagtaatagatccttaacaccaaatccaacctggcgcaaatctgcttctgatgctcattgtgggcaccgatatggtacaggcaagggaatgcgaaaagtacaaagagcgacatggtgaagcatgcatgatcgcacacaactgatccaatgtataccgcgatgaggccttcttggccagcagacgcagcaccaaacggcggcgctgcatatgcactccgcagagctaaacaagatcgcacgatcgcttgccatgcatagacaacctatgattaataacgttcattatatggttcttatgaacgacgaatgtcatgtatgttctggagactgtcatgtatattctcatgacagacatgtcacttgaacatgtatgct

SEQ ID NO: 91485 - DNA, 542 bp, Zea mays
  Clone ID: MRT4577_183432C.1
tccttttttttaacagaagattcacgagtgtcagtgccagattccatcatcaacttgaacagcttatgaacaagctaaacacgaccacattccacattattcgatgcataaagcttaacgaaatgcaaaaaccagacatcttcaacgctggctttgtatgcagtaacctagaaacataggaatgtgtactgctcttagattaatgcaacagggattccctacacgctgcattttcgaagatctgtatgaaagatacgctcagttaatgccagcagtaatttctcgtttgaagccttatactttctgtgaagctgagttggtagctttggatctcaacggtggaaaagacttccaaatgggtctcaccaaagtcttctttagagctggaaagttgcaatttcttggatgaccttacatccaactcttaagcaatgatcaatggaatctaatgtaaagtgaaaagttggctttgcagaaagcgcttcaaggttggaatctttggcgtgttgccatgcaaagataattgctcgagttcaaatata

SEQ ID NO: 91486 - DNA, 247 bp, Zea mays
  unsure (1)..(247): unsure at all n locations
  Clone ID: MRT4577_183433C.1
tttaaaacttaaatcttttaatttcatggcgcatcagctcagacctgaaaccatttttttcttcatactttnttccatttgtttgggttttgtcatgcgcctngcggtgccggcgcccntttgcatggcggtgccacaaggagacttccttcaccccatttcccatgctggggttgtccgctccctgggggtggcctccctttgtgtttaccccaaggcttctcaaccttggactgggatagccttt

SEQ ID NO: 91487 - DNA, 297 bp, Zea mays
  Clone ID: MRT4577_183434C.1
acggccgacggctacgacatcggctcttcatcctcacgagcaaccgagaatccgtcggcgctgagatgttggttgatcaagacctcctatctggcgacgagctcctgtcggattcattcacctacaaggagctcgcgaacggcgtactgtgggaggtcgagggaaagagggtcacccatggctctgatgatgtgcacattggtgccaatccattcgccaagggtggagaggatgaaagcatctatgacacagacttgaacgtggctgatattgaggacacattccgtctacaggagc

SEQ ID NO: 91488 - DNA, 459 bp, Zea mays
  Clone ID: MRT4577_183435C.1
aaagcagcgcacgcctgcaggagccgggccggaattatatagcgcgctcgtccagttttctactcggcggacgcccttcacgctcacgctcgtgctcgtgcccgcaatgaacctgacatacggcaaggggagggcccaactgcacggggcgaaagatacagactgtcggcaacactgctctgtgcggtgcacgcctacactactcgggcagggaggcgtcatcaagatctaacagcaggaagaacaccgaacggggcatgcagagccatcgacgcgacacacgaacgctcacgagtgctagattacccactgccaagctacaccggggccctggacccacacgacaccaacggactaaggcataacactaccctctacttcctggccgggatagggctcatggtcatctgcaaggattactacaacgtgggtgacaggctccctggcgtgccctactac

SEQ ID NO: 91489 - DNA, 277 bp, Zea mays
  Clone ID: MRT4577_183436C.1
ttcctttattgcccagacattgatgttggcggaggggtcattttcatgaacgggaaggtggcttggatctccttcaccctcccaacctacgagccctgcctcgatgatgttgcgaagcagcgcaagagcaggaacctctacttcagcactgatgttgagaagcacgtccctgacgctgacatcatcttcgtctcggctaacacccccaccaaaacccgttgtcttgaagctgtcaagggtgccgacctcacctactgtgagagcgcttcttgtatga

SEQ ID NO: 91490 - DNA, 352 bp, Zea mays
  unsure (1)..(352): unsure at all n locations
  Clone ID: MRT4577_183437C.1
ccactccactcgcgccaccctcatctttccagggcgacgcgacttactttaagggccctaaccatgncnaagaaagtcggaccagcgaagaaagcaaccctcggccgcgaactgtcccgcttcccagaatcccatttccagaccattagcgacaccttccatatgatggcagaatcggctccagaagcctttgagctgacggagtggtctcacatccttaaactctgcgaccaactctccaagcatgccaccatccctggaatgctcttcagcggtgactcgcctgatgtagagaccctcaaaaaaaacatcgtttcttattttaacatcctacacgcattttttttttttt

SEQ ID NO: 91491 - DNA, 290 bp, Zea mays
  unsure (1)..(290): unsure at all n locations
  Clone ID: MRT4577_183438C.1
aagggcttaatggggggtagttgttccaaaccaggaaacataaaagagcacagnatttggcgacctgacgctcccaactccaaaagtnaaaaaaaaaaacagagcgaagggaagggaaacagatctttattaaaaggntcatggaacaacaaacggattngatggaaaactgggcganngaatatccacagncgagccatgcatggatgccctgggcacgcactgactccataaaacaaggggggggnagatggnaacgccttggggaaaggggagctggcagaactaaa

SEQ ID NO: 91492 - DNA, 123 bp, Zea mays
  Clone ID: MRT4577_183439C.1
gaaatacatccaacgcaaatacgaggggataaagctttatcgcacacaaacagatattgctacctggagagatctttagagatggcccaaattctatacccgggccagcgctttatcgttatc

SEQ ID NO: 91493 - DNA, 305 bp, Zea mays
  Clone ID: MRT4577_18343C.1
accgttctctaatttgcatgaactcaccaaaccgagcatggtccatggtcatggttcaccaaatccatacaaacacaaccctgtttagaccatcaatacaaatgttattggcaccccgtacatgctgtgacttgcaaagagagttggagctaggtcagtgttcatcatgccattgattcttccagcgccttatgtaaaaaactcaattacagatataattttggaattgcatgatttcgttgacatcaacctcagaagtatatggtgatccacttgagcattcttaaactgaggcctactggggc

SEQ ID NO: 91494 - DNA, 218 bp, Zea mays
  Clone ID: MRT4577_183440C.1
gcggtccgggctgtacaacaactgatgataatgagaggttcgctggaagtcagtctgaaaaaaaaaaaaggggaaaaaatggcggacgatataaaaagaaaacaaacttacgtgcgcatgcatacaacggcacggcttttctataggggcatccaacctcaattccctggccatgggtttacaacgttctgtcttgtagaaccctttatcaacccaac

SEQ ID NO: 91495 - DNA, 326 bp, Zea mays
  Clone ID: MRT4577_183441C.1
acggaaccatataatatatcacaagagtgagggaggattttttggatgtccttcacacaaatgcaagcaatgatagaagcagaagatgaagaatgttagctcggcgtgagacagatcggaattgggatagaaacatccatggtctcacatgagatgtacattcttgactacagtaatatatcatacatgtaccactagactgacggttgcttcaatctactccatgtgattgcactatgtactgtaagtgagactctgtgttgcacttcatctacatcgccatcgtcaccgtcatgggcgtctcaaagtcaacctccaagtgcgcc

SEQ ID NO: 91496 - DNA, 557 bp, Zea mays
  unsure (1)..(557): unsure at all n locations
  Clone ID: MRT4577_183442C.1
cacgataggggcgcacacacgcgatcgctgtgcgcggcatggcgctgctctggggcgcctcgctcgaccggatcgatcggaacactgcctaaccctctgctacggatgataggcatgtccgcctcaggctctgcacccgaaacggcactactgcccagggcagccggcgtacaacttctctctacctgtccgcagaccccaaccaccaccgcnggcggtgtgcgaccatggcatgccgggaaagaacaagacgatctccacaggaaagaagggcggcacgaaaaagaccgtcgaccctttctctaagaaggattgctgtgacatcaaggcaccgtcggtgttcagggtgcgcaacatcggaaagactctattgtccaggacacagggtaccaggattgctcctgagggtctgaagcacactacctatgaggttggccttactgatcttcagggcgacgaggatcaagcttacacgaaaatcaggctccgtgctgaagatgaccatgcatgaatgagctcaaaacttttggggtatgaattntaccactgacaaactc

SEQ ID NO: 91497 - DNA, 3079 bp, Zea mays
  Clone ID: MRT4577_183443C.1
gattctcttctacagtttccttcgtgtgctccgaagtctaaagtttccttcgtcgagagcacccaaccccaccccatcctccgatcccctcccggcctcccctccccttccgctccgcctctggccaccgcgcccgcacccaatggcgtcggcggcggggtcctctaacgtgatgcttgcgattcacgagaagaaaacgactgccactgacctctaccgcccgctgcgcctctacatcgcctccacctactcggaacgcgaggccgcggcggccgacgacgaccttagcgtggtgcgcgacgcgctcctcgcctacgcgcgggccctggcactcgttgagccccgcttccccatctcccctgaccgcgcccacgtccactccctcaccttcacctggcacgacgccttcaaggggaacaagaagtgcgccctcgcctccatccacctcgagaaggcctccgtgctgttcaacctcggcgccgtctactcccagatcgcggtcgccgcggaccgctccaccgacgtcggaataaagaccgcgtgcggtgccttccagagtgcggcgggggcgttcgcatggctcagggagagcggggtcgcagccaaggctgttgctgcgggaaccaccaccgtggacatcacgcccgagtgcgctggcatgctggagaaactcatgctcgcgcaggcgcaggagtgcttcttcgagaaggtcataggtggagggaagccaccagcgctgtgctccaaggtggcgcggcaggtgggcatattctatgaagaagcatatgcagctctcagtgcacctcctctaagtcagcactttgataagacatgggtgtcccatgtccagctgaaagctgctcaattctatgccgatgcttgctataggtattcattagatcttcatcagaaagaagaaattgctgaggaaattgcacgtttgaagattggtatgagtgccttggcagatgctaagaaggctgcgaagggagttgctgcccagcttatggattccgtcaacaagctggaaagtaacatgaaaaccaacttggaaagggctatgaaggagaatgatcgtgtttacctgatgcgggttcccgctgctggttccttgggagccctctctgcagcgtcccttgtaaagcctacctctttgtctgaagttttagatgccagtaaggaaaggctttttttcatcacttgtgcctgatggcagcatgaaagcactttctaaatacacagagatggtagataatattatccggacccaggcagagaaattgcagcaagctagtgagatcactagagttaggttgaaggaaatggacttaccagattctattctttcattggaaggaaatataaccttgcccttggatctaaaggaagacgtagaggctgtgcagataagtggtggccctgctggtttggaatctgagttgcagcagcttagggatttgagcagggtcaatcaggaactacttgttcagactgaagagcttctacagaaggaggcgaatgaagacgctcagtttcgtacacaatttgggagtcgttggactagacctcaatcaagcaccctaactaagaacattcaggatagattgaatctgtttgcttctaatctgaagaaagctgctgatagtgattctctgattgaacgaggcgtgaaggagaactatcccttgatgtctatccttgacaaaagaccgatagagtctgcacttccaagtatttccaggcctatcatgtccttggatgggaatgaagatgccattgttggagccctgaaacaaagcttgagacaactggaatctcttggagcgcatagggcaggtcttgaagacatgctcaaagaaatgaaaagaaaggatgatatactgcctaagttgatggctggtgttggatcacatgatgatcttttcaagaaagagattgctaagtatgatcctatctgtgctgatattgctgataacattgtggcacaggaacaattattgctgcaaatacaggcacaaaatgagcaatttgcctctgtattcaatatagaggattacaaagctgctcgtgagagatgttacaagcaaattgctgctgctgttgctaaataccgggagtttaagaagaatattaacgagggcttaaacttttacgtgactctgcaggaagcaataggcaaaataaaacagcagtgcagtgacttcataatgacccgaaacattcaatgccgtgaaatgatcgaagatgtgcagaggaagctagcgggtttcagcttctcgtcctccagccactcctctatgcagaggaatgcttctgtaccacctgatcagagcagcccgtcaccaccaccgcatgctcaggctccctatgcctctccacctggggtagactcaagacttggatattctcaaacggagccaagacctgcttactcacagccataccccccatcctatggcgcaccaccacaacagccttcatatggcgcaccacaccctggtcagtaccagccgccagcgcaccagccacctcctggccatgactacggtcagccggcatatcctggatggcgtgggccatattacaatgcccctcagccgcagcaatctgcgccatatccacagccaccgtacaatgcccctggggcttaccctccgcaccagagcaactattacaggcctcagtaagctatcttatcgttcctgcaactatttgtttgcttcttttccattggatcttaccgttgtggagtatgcatacgagaatttggttggtgcaatatcagattgattagaaggtatagcttgtatgatttgtacgtataataatgtgctggatgtattgtaatacacggctatgcatattgcaacacctaccatttgccgttacctatcttgagtgcgtcctaaattgtaattgcagccaagcagcgaaatgtgtagaactaaagaaccctgagcgtcaaaaaaaaaaaatataaataaatgaatcaaaaaattgatatgataaacgcaaaaatatctactaatgaaatttccataataagttaaagggtccaaacttgttgggtttctaaaat

SEQ ID NO: 91498 - DNA, 3052 bp, Zea mays
  Clone ID: MRT4577_183444C.1
ggccgctttttttttacatcataacttgtatgtcatctttaacatctatgacaacattgtttaaccgtacaattttttatatgctactatattatagtttatggtcgcttcggtccgggtctttctgggtccgccactaaatcatacaaagctatacctgctattacactacccgaactctctcgtatgcagtagtagtacaccagaatggtaagacccaatggaaaaaaaagaagcaaaataataagaaatagttgcagcacttattgaggtcggtaatagttgctctggtgcggagggtaagccccagtggcattgtacggcgcctgtggatatggcgcagattgctgcggctgaggggcattgtagtaggtatggcccgcgccatccaggatatgccggctgaccgtagtcatggccaggaggtggctggtgcgctggcggctggtactgaccagggtgtggtgcgccatatgaaggctgttgtggtggtgcgccataggatggggggtatggctgtgagtaagcaggtcttggctccggttgagaatatccaagtcttgagtctaccccaggtggagaggcatagggagcctgagcatgcggtggtggtgacgggctgctctgatcaggtggtacagaagcattcctctgcatagaggagtggctggaggacgagaagctgaaacccgctagcttcctctgcacatcttcgatcatttcacggcattgaatgtttcgggtcattatgaagtcactgcactgctgttttattttgcctattgcttcctgcagagtcacgtaaaagtttaagccctcgttaatgttcttcttaaactcccggtatttagcaacagcagcagcaatttgcttgtaacatctctcacgagcagctttgtaatcctctatattgaatacagcagcaaattgctcgttttgtgcctgtatttgcagcaacaattgttcctgtgccacaatgttatcagcaatatcagcacatataggatcatacttagcaatctccttcttgaaaagatcatcatgtgatcccacgccaaccatcaacttaggcaatatatcatcctttcttttcatttctttgagcatgtcttcaagacctgccctttgtgcgccaagagactccagttgtctcaagctttgtttcagggctccaacaatggcatcttcatttccatccaaggacatgataggcctggaaatacttggaagtgcagactctatcggtcttttgtcaaggatagacatcaatgaatagttctccttcacgcctcgttcaatcagagaatcactatcagcagctctcttcaaattagaagcaaacagattcaatctatcctgaatattctttgttagggtgcttgattgaggtctagtccaacgactcccaaattgtgtacgaaattgagcgtcttcattcgcctccttctgtagaagctcttcagtctggacaagtagttcctgattgaccctgctcaaatccctaagttgctgcaactcagattctaagccagcagggccaccgcttatctgcacagcctctacgtcttccttcagatccatgggcaaggttatatttccttccaatgaaagaatagaatctggtaagtccatttccttcagcctgactctagtgatctcactagcttgctgcaatttctcagcctgggtccggatactattatctaccatctctgtgtacttagaaagtgctttcatgctgccatcaggcacaagtgatgaaaaaagcctttccttgctggcatctaaaacttcagccaaagaggtaggttttacaagggacgctgcagggagggcacccaaggaaccagcagctggaacccgcatcaagtaaacacgatcattctccttcatagccctttccaagttggttttcatgttactttccagcttgttgacggaatccagaagttgggcagcaactcccttcgtagtcttcttagcatctgccaaggcactcataccaatctttaaacgtgcaatttcctcagcaatttcttctttctgatgaagatctaatgaatacctatagcaagcatcggcatagaattgagcagctttcagctggacatgggacacccatgtcttatcaaagtgctgacttagaggaggtgcactgagagctgcatatgcttcttcatagaatatgccaacctgccgcgccaccttggagcacagcgcgggtggcttccctccacctatgaccttctcgaagaagcattcttgcgcctgcgcgagcatgagtttctccagcatgccggcgcactcgggcgtgatgtccacggtggtggtccccgcagcgacagccttcgccgcggccccgctctccctgagccacgcgaacgcccccgccgcactctggaaggcgccgcacgcgatcctgatcccgacgtcagtcgagcggtccgcggcgagcgcgatctgggagtagacggcgccgaggttaaagagcacggatgccttctcgaggtggatggaggcgagggcgcacttcttgttccccttgaatgcgtcgtgccaggtgaaggtgagggagtggacgtgggcgcgatcgggggagatggggaagcggggctccacgagtgccagagcccgcgcgtaggcgaggagcgcgtcgcggcgctgctcgagggaggacgggtccgggagggagggcttctcgacagcagcgcggaggtcgcacaccacgctaaggtcgtcgtcggccgcagcggcctcgcgttccgagtaggtggaggcgatgtagaggcgcagcgggcggtagaggtcagtggtgatcgttttcttctcgttgatcgcgagcatcacgttcgaggaccccgccgccgacgccatcggaggcggacgcggtggctggaggcgaggcggacgcggtggctggaggcgaggcggaagggaagggggaaatttgggggagtcgggacctgggagttgtcgtcctggaaaggtcactagcggtagcggaaggaaacaaggtcccggccggcctcgagagcgaaaaaaaaaaaaaaaa

SEQ ID NO: 91499 - DNA, 299 bp, Zea mays
  Clone ID: MRT4577_183445C.1
accggccgccctaaacatggatttttttcccccccccccacctttctttccaacaacgaaaaaaaataacaaaaaggccaaaaatacccaacacaccgatcaaccccaactgctaaatataaaaactttccacctacaacacaccttcatacattgtggaacaagaccccggcatcacactcaaaccctgaaccccgcttccatcaactggtcaaacccgaacaccccaaaaaacccgaccatctatgactccccagatcacaacataggcaacaacatccaccctcacaaggggtcca

SEQ ID NO: 91500 - DNA, 632 bp, Zea mays
  Clone ID: MRT4577_183446C.1
cctcgaggccggccgggaccgtcatctctgatcaatatcgggtccgctacctcttcagcatgctagcgtctctgcggtattgtctccgatcctgacatcgacagccatgagcaagatcctcatctctatcaacggtttcggaatgatcaggcaagatcacgatcagtgacgacctgccaatcgaggatgtatagctcttcagcgacaacgaccccttcatcaccacggattacatgacctacattgttcaagtactacaccgtgaacggacaatggaagcacagcgacatctgcctcaaggactccaagaagcttctcttcggcaacaagccaggcactgtctttgtcatcaggaaccccgaggacatcccgagcggtgacgatgtccgctgactatgctcaccgcatgctcccggacgtcttcactgactaggacaaggctgctgatgcatgtgaagggtggtgccaagaatgatggtatctctgccccgaataaagatgcgcccatgttctgtgttgccgtcaatgaggacaagcactgctccgatgttagcattgtttccgatgctagctgtatcacagactgacttggtcgcgttgctaacgtcatacatgacaactgtggcattatt

SEQ ID NO: 91501 - DNA, 404 bp, Zea mays
  Clone ID: MRT4577_183447C.1
tcgcggtcgcgtgggtctccgcgctgcggcggcggcgctcggtgtgcggctacgtctggggctccatcctgccgctgggggagtgccctgctggtccgggggatatgagcggcgtcggcgccgcgaggtggtcgctgcggccgtgttggccgccaggacgatcctcgtctgggacggcatgggcagtttgctcgtcccctgcgaggcgcgcagggagttcggcggcctccgccgtgcttttgatgacgtccaccaccagctcctgaccaagttctcccggctaccctggtcggttgattgtgagtgctacgctctcggacttgcctctccggcggcgggtttgttcactgaggttgtcgcctgcctcgagatcccgggtgtcgtcgcccctgtgccctccctgg

SEQ ID NO: 91502 - DNA, 1125 bp, Zea mays
  Clone ID: MRT4577_183448C.1
cctcggggaaagagtcgtcaccaaacagcgccgcgctccgcattgcgctagggttttagaactcttcctccggtcctccccgttatccctccaaaaggcagcgcccgctagggttttagccgccgcctccttccctctcctcctccacgtctcctcaacagccgctgccacccggagccttcccgcagcgacgccatgtgggctcttcgccgagctggcaaccccctcaggttccgtgcccaaaaagttgcaagtgcccatgtctgtgcgagtcttgaggtgctgctagctgctgatgcaaagaatgtagaagagcaccatgaggcagactgccagaaaatgtgctgctgtcataaaccaaggtcaccagcctttcaattgtcattttcatctggccagtttgcttgcagtaggggtttctcctctcagccaggtgcaaattctggtgacaaagctgatgagttagaggacggattttctgatctcgaggttccaccagcagctgttcaaaacgatgacgggttggcatctgaagatagttctgatgaggatgctgctgacgaatttggcttgcctgatgtggatgctgatgcaaaacctgagaaggagcacactagaagattatctgattctattctcctcaagacattatctgattctattctcctcaagactgtgttggaagctccgaggcatcaagtcacttcagcacttgagaaatgggcaaaggatggcaatgcatttgataggggtgaactctattatgttcttcttaatcttcgaaagcggcattggtactccaaagccttggagcttgttgagtgggttcaaaaatcacagctattcgaatttgtagagcgtgattatgctgcacatcttgatttaacagctaaggtctatggtcttcataaagcagaacagactattgagaagattcctgcatcttgtaggggtgagattgcttatagaacacttctggccgattgtgtttctgcatccaatatagagaaatcggagcaagtttttaataggtgaaggatcttggatttcgggttacacgattttctttcgatcagcttctagtactctacgaaaggctggacagggagatgattgctgatgttc

SEQ ID NO: 91503 - DNA, 1037 bp, Zea mays
  Clone ID: MRT4577_183449C.1
ctgacactacaccgcggtggggcggcgcggccgcttttttttttttttttttgcgatcaaaatttcagggctagcacataacatatgctggaatgattcgtacagttattacaggccgatggtgctcccgcacacacctgacacccccacgcctcaagctctagcacacacacagcccagaagatcccgattcccgtcaggggaacacataaacaaggggagcagagcacgtatggcgtcggtttaagcttccaacccgcagatcaggttcgatctgtcaccttcttcggtcttcagatccatccacccccgcttgcctctgtttcgcgcacgaaactcgttgtgcggcgcagcgcccctcgcggccagccaggagagctgcggagcggagcggagcgccgccccccaacgggatctcttgcagctgtagcgctgcttgaaccagcacggccttcttctcctcctcctcctcctttctcggcctcgctgtgcttgcttttactactactgactagctggccacggacacgtccgccttggcgcccacggacgaggcccctctgctccgctgcgactgcgactgcgactgctgctgcttccgccggctgctggccgcctgccttgcgtacgccgcgtcgtggtgcatctgctcgtagcggcagtcctcgctgcagaacggggtgtcgcccttgtacatgaagatgtcgctgttgcggctgagcggcttggcgcagagcgcgcaggcgtccagcgcgtgccgcccgggctcgcccagcggctccgcgtcgaagaagaaggcgcaggccacggacgtcgccatgcctccgtctgctgctctctggctggcttatatctgttgtctctccggaccaagcttgcttgctggctgcgctgcgcagctttgctagatgcttgtgctgcgttggagagtgggcaggagggggggaagagagtgcgtgcgtgcgagtttctctgctctggtgagcttcccggccggcctcgagggcccctaccgccccgagggacccaatgaattg

SEQ ID NO: 91504 - DNA, 346 bp, Zea mays
  Clone ID: MRT4577_18344C.1
ccaagctcggaattcggctcgagctggtgcaggacgcagaagtttcgctctacaacatgaacaaaccatgtacggaaggggtaatttaaaggccagctcgcatgcccaaccgcgcagatataagacaggcatagtgcagccgaccatatgaacgcccaccgaaacaacaaaacgaacctgaacatagcaaggagctaacagccctacatcagaatcagggggacagacgcgggccacaaaacccaaccctaatggaacccgatcaacggcaaagggtgaagggaatcaacctctcgaacaatgcaaccgtgacctgatgaaaccaagaccaacctactgagcagtg

SEQ ID NO: 91505 - DNA, 2342 bp, Zea mays
  Clone ID: MRT4577_183450C.1
ccggccgggaagggatgatcgcgctcagttttgtggacatgagcaacaacagcttcaatgcatctggtgttccttcctggttcaccactctgccatctttgacctcactgtaccttgaaaacctgcgtgtcacagggcagctgccccaagccctgttcagccttcctgcagttcagacactgaggctccggggaaaccgtttcaacggcacgctaactatcggatcagactacagcactcagctccagctaatcgatctgcgagacaaccaaatcagccagataactgtcggcgggtcacagtacaacaagcagctcatactagtcgggaaccccatctgcagcctggggacggggagcagcgagaaatactgcgcgtcgccggggcagtccgtccgggcggcgccgccgccgtacagcaccccgatgaactgctcggggctgccgccgccgtgcctctcggaccagctcgtgagcccaggctgcgtctgcgccgtgccctacaggggcaccctgttcttcaggtcgccgtccttctctgacctcagcaacggctcgtactggggccagcgggagaccggcatcagagccaagttccggagtctcagcgtccccgtcgactcggttgcgctccacgatccgtccgtcaactcggtcaacaacctgcagctcgcgctggaggtgttccccagcggcaagacccagtttagtgagcaggacatctctgacatcgggttcatactcagcaaccagacgtataagccaccctcagtattcggtccgtactattttcttggccagccgtacagctttgccaatgtggtgctaataccttccaaatcgaaggcgaacaaccgcttacctctgatcgtcggagcctcggtgggtggagcggttcttgttgcaatagttcttgctcttgttaccatcgtcgcaaggaggaagaagagaccaaagcagaacgaagagaggagccagtcttttgtttcttgggacatgaagagcacgagcggcagcagcgtcccccagctgcgcggcgcgcgcacgttcaacttcgacgagctgaggaagatcaccagcaacttctcggaggcgaacgacatcggcaacggcggctacgggaaggtgtacagagggaccctgcctagcgggcagctggtggccgtgaagaggtgccagcaggggtccctgcaggggagcctcgaattcaggacggagatcgagctgctctcccgggtgcaccacaagaacgtggtcagcctagtgggcttctgcctggaccaggcggagcagatcctcgtctacgagtacgtccccaacggcacgctcaaggagagcctcacgggcaagtccggcgtgcgtctggactggcggcggcgcctccgggtgctgctcggcgccgccaagggcatcgcctacctccacgagctcgccgacccgcctatcgtgcaccgcgacatcaagtccagcaacgtcctcctcgacgagcgcctcaacgccaaggtctccgacttcggcctctccaagcccctcggagaggacggcaggggacaagtcaccacgcaagtcaagggcacgatgggctaccttgatcctgagtactacatgacgcagcagcttacggacaagagcgacgtgtacagcttcggcgtgctgatgctggagatggccacggcgaggaagccgctggagcgcggccggtacattgtcagggagatgaaggtggcgctggaccgtaccaaggacctgtacggcctgcacgacctgctggacccggtgctgggctcgtcgccgtccgcgctggccgggctggagcagtacgtggatctggcgctgcgctgcgtcgaggaggccggcgccgaccggccatcgatgggcgaggtggtcggcgagatcgagcgggtgctcaagatggccggcggcccggggcccgagtccgcgtccaactccatgagctacgccagccggacgccgcgtcacccctacggcggcgacagccccttcgaccacagcaacagcgggttgccgtccgcgagggttgagcccaagtgaatctacagcgcgcgccgcgagtacatgcggaaaagcttcactcttcaacaaaagctagctctgaatgtacagggtattgtaattattagtgttataattttggttactatgataggtgtgcgattggattaagaactgatttcttgataacgattgtttacatgataattttggttgctatgtatttaagatagatatgcaattggattgttgacatgctaatatatttcatgtatgtcatcaaatacacaaatgattatttatgttcaaatattagacaatttcacaact

SEQ ID NO: 91506 - DNA, 129 bp, Zea mays
  Clone ID: MRT4577_183451C.1
gcccggaattccggggcggaccacacccgtccggttttagatcgggggcggccgttttggaggttccaggcttacgtccgcgggcatgcgaggtattagtttttttatggggtgacctaaatcaaatta

SEQ ID NO: 91507 - DNA, 411 bp, Zea mays
  Clone ID: MRT4577_183452C.1
ctgtcagttattttttttttaagagcaggaaaggggggggatgtaacaagccccgtgggtcaaggggtactggaaagccaaccattggaaagttgtaaaaaacctccacaatgataaaacaaaaccccagtgagacaaaaattttgaaatcccaggaagtaagcggaaataatttttaggagtaaagcaccggaaaacaaggaatcaggcccccagggagctcatgaacacattcaggggcctcgaagggaaggaaacgggggcgcacacaatcgcgagcagggacccagtcaacctccggggccccaaatccagaaaaaggatcccgcaactccggggacagagcgtacaaacacccaaggggaaaaataggtggaagagtgaaaccaggaacctccaggaccggacatg

SEQ ID NO: 91508 - DNA, 284 bp, Zea mays
  Clone ID: MRT4577_183453C.1
catgaaaccgattccaaaggaaacaaaatattgttaatataagcttctatttgtcctcacgcaattagcatatgcttatcacattttggaatgactcgctaccttatggtccaccactatttgtcattaaaaattaacctctccgaactggacagattatataattcgttcagctcaaaaatataacagatttgtaacagggagaacagattcttgcatcaaacattcaataataaaagggccaggtacataacatgcatggacccgtgggtcattgattataa

SEQ ID NO: 91509 - DNA, 352 bp, Zea mays
  Clone ID: MRT4577_183454C.1
ctttgcaggtagagcatgtgttgtcttcagaaggttctgaccgtgaaaagctatggccaaattgcagggtggggattaccaggtgtaactcaaaacagcttgaagttcttcaaggttgcagtcgaatcttatgtgtctctcgtgtttaatagtgtcacttaggccggaatctcacaacatacgtttcctgggctgcccggatcatattcaatcaggaaagcgctgcttgatgctataaatgaattcaagaatagaagggactcgcgtatgttcacatactgctcatttatacactgttagtcaactacagctatgatttatcattcgacatcatctgctagagtgaacaaca

SEQ ID NO: 91510 - DNA, 204 bp, Zea mays
  Clone ID: MRT4577_183455C.1
tgttgttactagagaggttgaaaggggttccaggtacacacgggatgccactggcttgcttgaagctatggcgggggattgctagccgttcatttgctcttgctggccgattttttcgttccggtgcttttccccccaagatttttctttgcaccagctgattctttcctacagaggatacaatcagggacggggatgttcaag

SEQ ID NO: 91511 - DNA, 287 bp, Zea mays
  unsure (1)..(287): unsure at all n locations
  Clone ID: MRT4577_183456C.1
ctgccggatgagcgccatcattgagacctacgtcatggacagccggatcggtcagtttcncctccccggccctcagccctggtccagccttcacctggccctccctctccattctgtgctgcggcttctctcctctcctctcggaactcagcgaactactgacaagaccatggcctgtggaggggagaacaggaaagcactgtctcttgatcgcgcctcctccctcttctctcttcctctgtcatctctccactctccattctccattgtgtctctctgtccacttt

SEQ ID NO: 91512 - DNA, 625 bp, Zea mays
  Clone ID: MRT4577_183457C.1
gtttgccgccagacgtgggtggacgtcactccccgacctggggcactcatggtcaacatgggcagctttcttcagcttgtgacgaatgaccggtacaagagcgtggatcaccgggtgccggctaacaagagcagtgacacggcgagggtctcggtagctgccttcttcaaccccgacgagaagagaaccgagaggctgtatggccccattccagaccccagcaagcctccgctgtacaggagcgtcacgttcccggacttcatcgccaagttcaacagcatcggactggacggtcgcgtgctcgaccacttccggttggaggacgacggccctactcgtcttgctgctgctgcacaccacgtctagtcttgttttcgttcgatcgaacaaacagttctcgtcgtcgtctcttttatttttcctgcaatctgaatttcgagttctccaaataaataagggtatccattcccttcatccgcagagcgcgcggatgccttcactagcagctctagttttgctatgtatatagctgtgtgtgtggtacctttgtgactcatatattatgcaataaagtatgctttctcctcgtaaaaaaaaaaaaaaaaaaggcccctacaggtatgtt

SEQ ID NO: 91513 - DNA, 730 bp, Zea mays
  Clone ID: MRT4577_183458C.1
ttcctatttctcagttcttacactactgttgtgtggtattacgtgacaagaagttgcacatattgtagcaaacacaaacaccagcgcatgggaatgcacgggttcacgactaagctaggttttggacagtgttacgtccttcctaaatcattttctcttctaagcgcatacaggtaggaggtgaaaatatcttccaatttatcaccgaatctcttttcttgcttatagtccctctgttcctatatataagtcttagagattacactatagactacatacggagtaaaatgagtgaacatatactttaaaaggcgtctatatacatccgaatgtagtctctatagtggaatctctaaaaagacttatacttagaaacggaggaagtatatcgcatgaagtatgcgggacgcagttgtggcacattagtttcaccataaaagcatatacaactcaatgtacatatatacatggagagtgaattttttgctcttgggctaataaaaaaaaaataaccttttatgttttagaaaaactgcaaataaatacaggtacttatcgtgaaactactaaatacacaggtactatacacaaaaatgtcgactagatgtgtgtgaaatatcatcacgaaataatttttgatgtgagctgtacaaaaagaagtcatgtcgttttatagtgaatagcacatatgcttgaaatatgtgatttcgtcatttttgcgtagctcgca

SEQ ID NO: 91514 - DNA, 394 bp, Zea mays
  Clone ID: MRT4577_183459C.1
aacactacagaataactaacgatattaacactagaggcattcacataagatgaatcaacgtacactgagtcgacacgtatcccatgtaaacaacccaccacaggcagatgactgcgggaggtcgctcgcctaatatctcgaacttgccatcgttctgtaactcctgaaggtacagctacacaccttcttatttacctgagcatagattgcaccaaaggcaacctcaaccaaccagatgctcaggatcttgaatttgagatagcttgaggagcttgatcacttggccaccaaagcttgaccttcgatctctcgaagctcgcaaacggatcgcacattatttgggacgcacaacgaataccaacaggcacaaacaaacagacatatgtctatgcat

SEQ ID NO: 91515 - DNA, 345 bp, Zea mays
  Clone ID: MRT4577_18345C.1
ggggggggaaaggggccatccctcaaacagggaaacaacatggtttccccattacaggcgggtccaacacaggggggggcttttgacagttccaagggaacgatttacccatacacaaggggaggccccacttaaaaagggattttacaaaacaaggggggtaactatttaccctttacacatgttttatgtagaggggggtgcttcctcaaaggaaaaaaggaaagcccttttgtgattgagggttggggcaatctgaaactgcccatccaaattggttccgggggttggcgaacacaaccaatttgccgcgcaaagaaacaactcctactatgaaagggggcc

SEQ ID NO: 91516 - DNA, 407 bp, Zea mays
  Clone ID: MRT4577_183460C.1
tcgagcggccgcccgggcagggacaagcttttttttttttttttttttttttcttttttttttttttttttttttttttttaatctcaaaatggggtttcttatttctgggaagccacaaacatcagacaaaaactttattatgtgaactataactcaaaagaaaccgaaaagagggccccaccaatgaagggttgtgggtagaacgcagcggggtttgtcaaaggaaggtgggggaaaggcagcaataggggcacatggaaaagggggccagggggaggcgcagcgggctggtaaaacgacaacaacaggggttgtgggaaaaaggcaacagggctcacaccagctagctggctgaatgggagaagttgatgccgctgtaaataagcacgagaggtcaaagaccct

SEQ ID NO: 91517 - DNA, 485 bp, Zea mays
  Clone ID: MRT4577_183461C.1
ccggccgggccgggattccggttggcttggccgagttctggtcctcctcctgagtgcactccatagtgctaagactgtttcacccgctgcacgactacagcaatagaggtgccagtctctgatcgacgccctcaaatgtcctcaggaggtgcatgatattttgtctccgactaaggcaatgaagtgcagacgatcaggctggggagcagagcgatctcctccgtgctgcctcaggccatctggacacacgccacaatgctgaagaacaaaagcgcttcaacgctccgaatatggatgcgcctcatcgtccggctatatggattatacgtacaccttaccgagaagacattttctccaatagctcatggaaatgcgaatgttgacagagactcgaaaaggaactacgggccggaaattgctatcacaacctgtgagtgcatctccgtggcaagcttgtgacttctctcgctgtagcaagcgatgat

SEQ ID NO: 91518 - DNA, 536 bp, Zea mays
  unsure (1)..(536): unsure at all n locations
  Clone ID: MRT4577_183462C.1
atttcctagggtttcgtcgcttcgcagtcgtcgccgcgtccggctcgccgagcgtagcagccggcgcaggacatctctctctcgatctcgaccatggagtacgtggagcattaacaggacacgccgaagatgttcaaccgctggaccttcgatgatgtccaggtgaacgacatctcgctgaacgactacctcgctgtgaacgcgactaagcacgcgatgtacctgccgcatcaccgcggggagttactccaagaagcggatccgcaaggtcgcagtgcccgatcgacgagcgcctcacagaactccctcatgatgcacgtcncgcaacaacagtccatagatgtcatgggctatccgcatcatcaagcataccctggagatcattcacctgctcaccgatgtcaaccccatccaggtctccgtcatacgcgatgcatcaacagtggaccccgtgaggatgccatcgccgtgattggatccgctgttgttgtgaggagatgaggcgtgccatatgtcgcctctgagatcggagagct

SEQ ID NO: 91519 - DNA, 370 bp, Zea mays
  Clone ID: MRT4577_183463C.1
gattccgggtcgaccacgcgtccgctttttttttttttttttttttttttttttttttttttttttttttttaaaagggaataaagacattgtttatgcttttatttggattccaaatttaaaaaaatataaaaagggggacagaaaattgatataaataccatctggcctgttaaacccttggacaggaacagcagggggaaccagcctaatgcacactaggaaatgagtacaattttaaatgatacccaagaggcttgggtagctttgtctggccaggaagttgctatgtcaaaacacccacctgcctggctcgaaagggggttaaagaccgggcccaccacctggcccccattaaatggggaggaaa

SEQ ID NO: 91520 - DNA, 275 bp, Zea mays
  Clone ID: MRT4577_183464C.1
caccaccatataacaagtcaacattttcaaacattctaacactactactcgacagcgtcattatcataaatctgtatgaaacaagaacaattattcttacttatacaaatatcaaccactaaatcatccatacttccactaatatccatactcatattatacaactgcattctaaccatattgacgtccattgcataacacctctataaatatcatcactcgtcataaaactatccaaattttcattcgatcaatccgatatctaatcacactta

SEQ ID NO: 91521 - DNA, 340 bp, Zea mays
  unsure (1)..(340): unsure at all n locations
  Clone ID: MRT4577_183465C.1
tttttttttttttttttttttttttttttttggttttttttttttttttttttttttttttttttttttttttttntaaaggccaaagcccaacttgaatttagtaagatttagggctttttttttttcgtcggattggacccgaaattgttcccgcttatcaaaggtttttttaatttgataaacaatccgggcaggaattgtttcgacccaccaattcgggagaaaagaaaaagggcttacaaggaaaaaaattctttgtttttcagtttaaaggccttaaaaaaggggggctttagggattttgaacttggttttcttgcatgaattttagctgtcc

SEQ ID NO: 91522 - DNA, 950 bp, Zea mays
  unsure (1)..(950): unsure at all n locations
  Clone ID: MRT4577_183466C.1
cattgggacctcgagccggcgggacacccattttctcgtgcaaagattctttataaccattttgacggtggtgagcccgaagccagcgaaaaccatcaatcccattcctctcctccgctagtagccgccaaatcgacgagaaggagccgaggccaggcctccaccaagtatcagattccacgccctacgaatcatcgcaatgacgaagaaacagcggagggaggcgggggcgatgcgacggcgagaccgacaccaccatcaccggcggcagccgcgggacgagcgctgcgtttcctgcaccacgtttaacatcctggcgccgatctacaagcgcatggacaacgagaattgcagggagagccagtacagggcctactggttcagccgcaacgagaagattattgaccgccttctcgctgatcactcctccatcatctgccttcaggaggtatggttggggaacgacgagctggtcgacatgtaccagaagcgtctgggagacgccaattacatgctcttcaagcttgcacgcaccaacaatcgtggagacggtcttcttactgctgtacatagaaactacttcaacgttttgaattatagggaactgctgttcaatgacatcggtgatcgggtagctcagctgttgcatgtggaatcagcgatgccattcttacaaaatcgaagcaccagctgtgtccaccagcagagcctcattgtcaacactcatttgttgttccctcatgatcacagcctttcaatagttcgcttaagacaggtatataagatccttcagtatattgaggcttacctagaagagcataaacttggtccactgccaatcatcctttgtggggattggaatggaagtaaacgtggccaagtttacaagttcttcgctccgcaggggtttgtttcatcatatgacactgctcatcatacaggnacagcga

SEQ ID NO: 91523 - DNA, 233 bp, Zea mays
  unsure (1)..(233): unsure at all n locations
  Clone ID: MRT4577_183467C.1
aacaccaaacttttatttttttcagggnaatttttaaaaataatgccctgttttcctaacacttctcacccaccactaacttacctttaacatgaccaaaaactctctaccaatacattatagagcaccattcctctttctctaatccctcctattctactattatcatcctattttctacacataaacacactacccttcaattatccttcactaagcacaacatcctactt

SEQ ID NO: 91524 - DNA, 329 bp, Zea mays
  Clone ID: MRT4577_183468C.1
acgcgtcaaccaggcgtccgcaaagtttggttcttttcttggtatgcagttctacatccaacatcatcaaatgtgtcagcggaggtatagaatgattcgccatcgatttacgccatcattacgggtacagcaccagattctacaaagattataggggattctggtcaggacgctacgttgaacggaactggtaccgagaaagactacaatgttgactattcatgttcctgtcacatcctgtaagttcagtttgatactttctatctctgcgcatgatactcagcagctatactggttatgcgcagcatgatcgctacttttgttaactc

SEQ ID NO: 91525 - DNA, 776 bp, Zea mays
  Clone ID: MRT4577_183469C.1
ctggccggctcggcaatggtgagtattcgcccgcggcgaccccgtcgagctatgtgtggcttactgctcgcatagcctcttccgccgtgggcttggattgacggcccggttgtttgctgaggtgaggtcctgctgtgtgtgtgttttgtgcagacgaagaaacagcggagggaggcgggggcgatgcgacggcgagaccgacaccaccatcaccggcggcagccgcgggacgagcgctgcgtttcctgcaccacgtttaacatcctggcgccgatctacaagcgcatggacaacgagaattgcagggagagccagtacagggcctactggttcagccgcaacgagaagattattgaccgccttctcgctgatcactcctccatcatctgccttcaggaggtatggttggggaacgacgagctggtcgacatgtaccagaagcgtctgggagacgccaattacatgctcttcaagcttgcacgcaccaacaatcgtggagacgggaactgctgttcaatgacatcggtgatcgggtagctcagctgttgcatgtggaatcagcgatgccattcttacaaaatcgaagcaccagctgtgtccaccagcagagcctcattgtcaacactcatttgttgttccctcatgatcacagcctttcaatagttcgcttaagacaggtatataagatccttcagtatattgaggcttacctagaagagcataaacttggtccactgccaatcatcctttgtggggattggaatggaagtaaacgt

SEQ ID NO: 91526 - DNA, 453 bp, Zea mays
  Clone ID: MRT4577_18346C.1
ttctcctcacatcctacgtcactcccgacgtgcacaggacttcggcgcacgccacaacatcctggacaatcacaaaatcactatttgatctcttgctgccatgatcaccctcacgcagactacgacgcatccgataccgtctgaactcctatccattatccaccattaattcccctttacttgcgtgtgcttcatatcataacaggcctcgttctatatgatgtaactggcactgcattatttactcgtctgcatgctgctacgtaaagtatgcgttttgcttcttaatttcccttggacgacatactcactttagcctgtatctttgtaatagctgttctgactagatggctagcgcgctacccacacgaccaagatgatatttcgctatgcaactaaatagagggggcctactggtattttaattaattctctattcaaaaagaaaacaaa

SEQ ID NO: 91527 - DNA, 2104 bp, Zea mays
  Clone ID: MRT4577_183470C.1
cggacgcgtgggcggacgcgtggggtgcaaagattctttataaccattttgacggtggtgagcccgaagccagcgaaaaccatcaatcccattcctctcctccgctagtagccgccaaatcgacgaggagccgaggccacacggcctccaccaagtatcagattccacgccctacgaatcatcgcaatggtgagtattcgcccgcggcgaccccgtcgagctatgtgtggcttactgctcgcatagcctcttccgccgtgggcttggattgacggcccggttgtttgctgaggtgaggtcctgctgtgtgtgtgttttgtgcagacgaagaaacagcggagggaggcgggggcgatgcgacggcgagaccgacaccaccatcaccggcggcagccgcgggacgagcgctgcgtttcctgcaccacgtttaacatcctggcgccgatctacaagcgcatggacaacgagaattgcagggagagccagtacagggcctactggttcagccgcaacgagaagattattgaccgccttctcgctgatcactcctccatcatctgccttcaggaggtatggttggggaacgacgagctggtcgacatgtaccagaagcgtctgggagacgccaattacatgctcttcaagcttgcacgcaccaacaatcgtggagacggtcttcttactgctgtacatagaaactacttcaacgttttgaattatagggaactgctgttcaatgacatcggtgatcgggtagctcagctgttgcatgtggaatcagcgatgccattcttacaaaatcgaagcaccagctgtgtccaccagcagagcctcattgtcaacactcatttgttgttccctcatgatcacagcctttcaatagttcgcttaagacaggtatataagatccttcagtatattgaggcttacctagaagagcataaacttggtccactgccaatcatcctttgtggggattggaatggaagtaaacgtggccaagtttacaagttccttcgctcgcaagggtttgtttcatcatatgacactgctcatcaatacagtgacagcgaagaagatgcacataagtgggtcagtcaccgaaaccatcgagggaacatctgcggagttgatttcatatggcttttaaatcctgataagtgcaggaagcccctgaagaccagctggaatgaagctgtttttggtatcattaagtacttcctccaagttgcattcctttccgaggagaatgcatttgcactcctgaaggcagacagcctttatgatcacatcacatattcaagtttctaccaggcattgtgtcagttaggaatggtccatcctgatagactaaaatcagaagaaattgaggagttgtggagtgaagctgaccgtgatggcgatggtgttattaactacaaagaatttcagtgcatctggagcccaaactgctgtagtcaagaggaggatactgaaattgacatcactgatgaaagtctggacacttttgaggcaaacaacgaagccttcggcttcaccgtgaaggaagctgttctctttcccccagaagtagagaagggcatgtggccagaaaactacagcctctcagatcatgctcccctcactgtggtattctctcctattagaatgccttgctctccacgcaatcgtgggggagctctagctatctaatgtcaatgatctcatgtatacatatacatgccccacgaaatcgttgttagatttggtggggactacagaggtttggagggggttaaatcactaacaagtcaaaatcttcctcaaaaccctttgatctcctccttcctggtctatagaggattacttttggagaaaatagaaacttggacttttagcaaaaaaaaaaaaaaaaagcgggtactaagcaagcatcagtatcggttctaactgctaggatctgtgtaagccaccaatcggtattggtctctcgagcacacacaactcatactaaagctagaaaagcctttagtattggttagtgacaaaagttgatagtaaagggtactctttagtatcggctgtattgtaccgtttaaacgctagttttataatttgtgcctca

SEQ ID NO: 91528 - DNA, 867 bp, Zea mays
  Clone ID: MRT4577_183471C.1
ctagttctagatcgcgtgggcctcgcttttttttttttttttattttaaagatagaagctgaattaaagttaaggcatcaagaccttttttaacagaaacacttcgtcgtccaacaaacacacaaccaaccaatatttgctcagttcctgctaatcccagatcactacagtactacacgtgcggacatcaccactgacacactacacaacgcaaaagctccatccgctgctctgctctccgccggtcgctcagtacccgaacctcaaaagctccatccgctgctctactctccgccggtcgctcagtacccgaaccatccgccgccgtaggcgtcatcgaggccgttgtgtgggtacgcgccccacgcggtggcggggtaggaagccacgtacggctctggcggcgggccgtacccaccctgctggagcgcgtaccagggacggccgtgctgctgctgctgttgcagaccggcggcgagcagcagcgcctgggcctgggcctgagcctgagcctggacggcggcgttcgcctcctccctgccgctgccgccgttggccgctgcgggcttggggaagacgatgtcgacgctcttccccgtggcctcgcgcaggcggcggcgcagcctctccgggtccgccgtggccaccagcgccagttcgcccttggtgtccagcgccgactggtccagcgactggatgccctcgcaccggagcgtcagttcgctgaccgcggcgcggatcttggggacgcagccgtcgcagcggcagtgcatcgccaccttcagcacgaacgccgtcgccttgggcgcgtcggcgccgctgcggccgctcttcttgcccattgatcggcctggcctgagtgtcggt

SEQ ID NO: 91529 - DNA, 5069 bp, Zea mays
  Clone ID: MRT4577_183472C.1
atcgcaaatatgtctccggaatatagtgcaatatgggattcttcccagttgatggaaagacgctggactatttgaagcttactggccgaagtgatgatacagtggccatggttgagtcctacctgcgtgcgaataagatgttcgttgatcacagccaggttgacgctgaaagggtatactactcctatctagaactgagccgggcccccctctcccgtcgtccccacctcctccctttttggcgcagtggccatgcctcccctcacaagctccctcctctcccgctccaccaccggcggctcctctacccgcgccgcggcagcggtcgcagcgatctccaggcccgccgcaccttcctcctcgtccccgcccgcccgctcgaccccgaggccgcgctccagcccggcgtcgcccttcgcatccggcctcgcgagccgcctcttcggcggccaccgcgccgtcgcccgctccgcgtcgtctgcagccgccgtcttcgagcgccggtttgcctcagccgcgaccaggaactcgtacgatgaaatcctgacgggcctcgggaggccaggaggcggagaggagtttggcaagtactacagcctgcctgctctctccgatccgcggattgatcggctcccatattctatcaggattcttctcgagtcggcgatcaggaactgcgatgatttccaggtcaccgggaaggatgttgagaagatcttggactgggagagaagtgcaccgaagcaagttgaaatcccgttcaagcccgctcgtgtcctcctccaggattttactggtgtcccagctgttgttgatcttgcttgcatgagggatgctatgagtaaacttggcagtgacccgaacaaaattaatcctctggtacctgtagaccttgttattgatcattcagtacaagttgatgtggcaagatcagcaaatgctgctcaggcaaatatggagcttgagttccatcgtaacaaggaaaggtttgggttcttgaaatgggggtcctctgcattccgtaacatgcttgttgttcctcctggatctggcattgtccaccaggtgaatcttgaatatctggcaagggttgtgtttaacaatggtgggatcctttaccctgacagcgttgtaggcactgactctcacacaactatggtagatggtcttggagttgctgggtggggagttggtggtatagaggcggaagctgcaatgcttggccagccaatgagcatggtcttaccaggtgttgttggctttaagttatcaggcaagctgaggaatggagttacagccacagacttggttctaacagtaactcaaatgcttcggaaacatggtgttgttgggaaatttgttgagttttgcgggcaaggcatgagcgagttgtcacttgctgatcgggcgaccatcgcaaatatgtctccggaatatggtgcaactatgggtttcttcccagttgatggaaagacgctggactatttgaagcttactggccgaagtgatgatacagtggccatggttgagtcctacctgcgtgcgaataagatgttcgttgatcacagccaggttgacgctgaaagggtatactcttcctatctagaacttaacttggaagaggtagaaccatgtctatcaggaccaaaacggcctcatgatcgagtgacattgaagaatatgaagtctgattggctttcttgcttggacagcgatgtaggattcaagggttttgctgtccccaaagaatcacagggcaaagttgcagaattttcgttccatgggactcctgcaaagataaagcatggtgatgttgtaattgcagcaattaccagttgcacaaacacatcaaatcctaatgtaatgctgggagctgctttggttgccaagaaggcttgtgagttgggcctggaggtaaagccatggattaagacgagccttgcacctggttccggtgttgtgaagaagtacttggataagagcggtttgcagaaatatcttgaccagcttggcttcaatattgttggctatggttgcacaacctgcattggaaattccggggagcttgatgaatccgtatctgctgcaattactgagaatgatattgttgctgctgctgtattgtctggaaacaggaattttgaaggacgtgtgcatcctttaactagagcaaattaccttgcttcccctcctttagttgtggcttatgccttggctggcacggttaatattgattttgagaaagaacctattggcatctcgaaagatgggaaagaggtttacttccgggatgtttggccatcaacagaagagatagccgaggttgtcaagtcaagtgtgcttcctgacatgttcaagagcacatatgagtccatcacccaaggaaatcctatgtggaatgagctgccagtctcaacaagcactctctatccctgggatccatcatctacatacatccatgagcctccttacttcaaggatatgacaatgactcctcctggcccgcgacctgtgaaggatgcatattgccttctgaactttggtgacagtatcacaactgatcacatctcgcctgccggaaacattcacccagacagcgcagctgcaacatatctgaaggagcgtggtgttgaaaggaaggacttcaactcatatggtagccgaagaggaaatgatgagatcatggctaggggaacctttgccaacattcgtcttgtgaataagttcttgaagggtgaggttggacccaagacaatccatgttccatctggggataagctttcagtttttgatgctgctatgaaatacaagaatgaagggcatgatactattatcctggctggtgccgagtacgggagtggtagctctcgggattgggctgcaaagggcccaatgcttcagggagtgaaggctgtgatagcaaagagctttgagaggattcaccgcagcaatcttgctggcatgggaatcatccctctatgcttcaaagcaggggaggatgcagacaccctgggcctaaccggccatgagcgctacacggtccaccttccaaccaatgtgagtgagataaagcctggccaagatgttaccgtgacaactgataatgggaagtcgttcacttgcacactcagattcgacactgaggtggagcttgcttactacgaccatggtggcattctaccatatgtcatcagaaagattgcggaacaatagattgtacaatttgagatgattgcgatgcggtgaatcgtaattggtgtaaacgacccatttttgagtacttataataacctctgagtttctcagagtgagctgtctggaacttttagtaaccttttgctttctttaagacactgttaataatatgttaactcctgcaatatctgaatatacatttggcagatgattccctatgttgtaaatgacactagttcataacactgacgcagttcaaagcggttcttgttatctggtggtactcaaattagtactgcaaaaaaaaaactgaggtgaatttatttaaaacgaacatgggcgcattctacctaggccagcaacaggatttcggaacgatgggtgcatccgttaaccagagcatgttaccttgcttcccctcctttagttgtggcttatgcaatcgcgaccgctgggaatgttgttttacgcgtgggcgcttgcgtgagctcgaaagatggaaaagaggtttacttccgggatgtttggccatccacagaagagatagccgaggttgtcaagtcaagtgtgctccctgacatgttcaagagcacatatgagtcaatcaccaaaggaaatcctatgtggaatgagctgccagtctcaacaagcactctctacccctgggatccatcatctacatacatccatgagccaccttacttcaaggatatgaaaatgagtcctcctggcccgcggcctgtgaaggatgcatattgccttttgaattttggtgacagcatcacaaccgatcacatctcacctgccggaaacattcacccagacagcccagctgcaaaatatctgaaggagcgtggcgttgaaaggaaggacttcaactcatatggtagccgaagaggaaatgatgagatcatggctaggggaacctttgccaacattcgtcttgtgaataagttcttgaagggtgaggttggacccaagacaatccatgttccatctggggagaagcttgcagtttttgatgctgctatgaaatacaagaatgaagggcatgacactattatcctggctggtgccgagtacgggagtggaagctctcgggattgggctgcaaagggcccaatgctgcagggagtgaaggctgtgatagcaaagagcttcgagaggattcaccgcagcaatcttgctggcatgggaatcatccctctatgctacaaagcaggggaggatgcagacaccctgggcctaaccggccatgagcgctacacggtccaccttccaaccaatgtgagtgagatcaagcctggccaagatgttaccgtgacaactgataatggaaagtcgttcacttgcacactcagattcgacactgaggtggagcttgcttactacgatcatggtggcattctaccatatgtcgctagaaagatagcggaacaatagattgtaccgtcgagatggttgcgatgcttgcggtgaatcgtaattggtgtaaacggtttgtttagtagtacaacccatttttgcggactacttataataacctctgagtatctcagagtgagctgtctgaaatttgatgaactgctacaattctggtgcgccatgaggatgggatccttttgccttctatgttaataatatgctaacttctgcaataccagatatacatttggcagaagattttgcacgctgtaaatgacactagtattaacactgatgcggttcaaagctgtccttgttttgttatctgccaacaagagaagagcagaattggcgtcgcggccgcgttacgaaccttttaccacgttgccatgtgcgactggtaatgactctgaagcaaccgatgggtgtaaaactgtcatgtaagccaa

SEQ ID NO: 91530 - DNA, 738 bp, Zea mays
  Clone ID: MRT4577_183473C.1
gacgaaaccgcggcgatcgcccacacagctcccctccaataaaaacacccaccttgctgccgatttcgggggcgggagtgccaagtggtttctagagctgggtagagattggcggtttgccgatggggagaggcgacggggaaggagggatggcgccgcggggcggcgtggttgggtcgggggcaatgctggggctggacatgcacctcgccgcgcagcagatgcacccggccgccgccgcgttccagcaccagcaggaccaccaccacgatgggttccagctgcagcagccgcccccgccgccgtcgttctcgccctactccaacacgtcgtcgtccagggtcgtggtgagcgcggcgacggtggggcacgatgaagacacggtgggcaacggctgctgcgggaagggaggagtggtggtgcagcagcagcaacagcaacagatggcggcggcggggtgcccgtggacgaggatgaagtggaccgacgacatggtgcgcctgctcatcagcgtggtctacagcgttggggatgactgggagggcgcggcaatgcctggcggcgcggggggaggcaaggcgagcagggcgggctcgtcggggcacggccacggtcatgcgggggcggcgcagcagcagaagaagggcaagtggaagtcggtgtcgcacgccattatggacaagggctttgtggtgttcgcgcaacagtgcgaggacaagttcaacgaccttaacaagc

SEQ ID NO: 91531 - DNA, 143 bp, Zea mays
  Clone ID: MRT4577_183474C.1
ttctctactgtacggacaccgggatgcgcatcgccacgcggcaccaaccgtggtgcaccgacatcctcctgttcgtggtcgtggccgtggctgccggcgcgtactaccggaggccaagcaggctcacggagaggttcacgact

SEQ ID NO: 91532 - DNA, 184 bp, Zea mays
  unsure (1)..(184): unsure at all n locations
  Clone ID: MRT4577_183475C.1
gttgtgtncntccaactacttacnacctcnttacactgtncctggctttctntacagangcnntnggcngtattcccttttanatngctttncaggacgttgctgagcantggggtggnctnggganctgtnatggccactgaagcncgtgagagacccacgcaaaatnntcaaaaaagaccaa

SEQ ID NO: 91533 - DNA, 325 bp, Zea mays
  Clone ID: MRT4577_183476C.1
ggtgcaaaatggaagtattttagtccaaagtgaattttacgtgtttaatttttaaacacaggttaacggactttttagggtacccgatttttacaacaaaatagaaaaaaaagggtgaggaccctcacattatgctttaaatacctgctttaaggggggaataaaaaatggcccaaaagttttagggttttggggccttaagaaaacctttgggacaaccctttgccttaatattaatgtgtggtaaatttctcctaaaaaaaaaggcgctttttgcaataggtggtaaaaaaaagtcccttttttaaaaagggggggggggtgg

SEQ ID NO: 91534 - DNA, 352 bp, Zea mays
  Clone ID: MRT4577_183477C.1
gtctgtttggccctctgattcagttaggcgggtttggccggacggcgaaacaaattactctgctgccgtggtggttgttagtttggtgtcggttaccctgttggtgttaggtattgcagtgctgtttgctatgtgatgcgtggggttataggataatgcgtcggcttcgcattccctggaggtgttcttgtgcttgctcttaaccagcactatggctaactttttaaataactgcgatgttttttgtatagttttttgattatgtgtgttagtgtaactttacatctagttgtatctaatatggcctctgatttatagtataaaatgaatgaaggatgccagttgcccaaaa

SEQ ID NO: 91535 - DNA, 323 bp, Zea mays
  Clone ID: MRT4577_183478C.1
ccgtaccggttcggaattcgaggcacgcgtcacgcgtgcgcttacgcgtagcatcaactaattcacaatggcgaccaaagtatttttccctccgtatgctccttgctctatctgcatgtgttgcttacgcgacaatttatacacaatgcttacaagctcctatatctttcctttattatctcataccttgcatcaatgatagcttcagtatgtgaaaacccatctcttcaaccctataggctccaacaagcaatcgcagcatgcaacatacctttatcaaccttgtttcaacaatcgtcagtcctatcttaggtgcattcatt

SEQ ID NO: 91536 - DNA, 575 bp, Zea mays
  Clone ID: MRT4577_183479C.1
agacggacaaggtgcgcaagcgtgacgtggtcgtgaagctgagcggggcgacggcgggcgcgtcggtgcgcgtggtgcagctggacagcgccttccccatcggcagctgcatcaacggcacggtgatccaggaccctgcgttcgtggacttcttcacgagccacatggactgggccgtgttcgagaacgagctcaagtggtactggacggaggcggagcgcgggcagctcaactacgcggacgccgaccgcctgctcgacttctgcgaccgggcgggcaagcccgtgcgcggccactgcatcttctgggccgtggacggcgaagtgcagcagtgggtcaaggacatcgggcgcgacgaccccgaccagctcatggcggccgtgcgggaccgcctcgggggcctcctcggccgctacgccggcaggttcccgcactacgacgtgaacaacgagatgctgcacggccgcttcttccgcgaccgcctcggcgacggcgtggccgcgctcatgttccgcgaggccgcgcgcctggacccggccgccgcgctcttcgtcaacgactacaacgtcgagtgc

SEQ ID NO: 91537 - DNA, 200 bp, Zea mays
  unsure (1)..(200): unsure at all n locations
  Clone ID: MRT4577_18347C.1
cgtccgccatcccggtcgacccagcgtccgccccgcgtccgccccgcgtccgggtatctgaagtgcaaagaatctcataaggaagatgctctgcccttgtccttcagagcgtctgaaagcccatgaagtactacgccatccttggatctgtgaaaatggagtggctactgatcaggctcttgatcccggngttctctctg

SEQ ID NO: 91538 - DNA, 299 bp, Zea mays
  unsure (1)..(299): unsure at all n locations
  Clone ID: MRT4577_183480C.1
acggtgcgtgactcgcttccttcccccacnctctcaccaacaggtcaccggcgcggcgaggcggccgccgctgctgcctccccctctcttcctccctctccgcgcgctagggtctggtggagcggattcttcccggagtcgatcgaactgattcgttcgtaatggcgaacctgcagtcttccgcctccgagccctcctccttcgcaggcaccacggagacaacaacgacggcaagccgctggaccattttcgtacccttgctgactacaacacccagacagacgccaccctccacctcg

SEQ ID NO: 91539 - DNA, 340 bp, Zea mays
  Clone ID: MRT4577_183481C.1
acctccctgttgttcatacttattgttggaatctttgcgtcttcttgggtgggtacatctgtctgtgtggggtggagaatggtttataaaaaaaatgccatttgttaggcacatatactctgcatcaaagcatgttagtactgctgtatcaccacagctaattacaacagctttcatagaagcgtcaatttttagtcatccccgtgttgttgaatatgcttttggattcataacatcaaccattgttctttagacagacaaaggtgatgaagaatattgtagtggttatgtcccttcgcaatcatttatatatcggtgacattattttggttaactccac

SEQ ID NO: 91540 - DNA, 874 bp, Zea mays
  Clone ID: MRT4577_183482C.1
ctcgaggccggccgggattcatatcaacttctactgtttcattcgagccaaacaccagtatctaacccacatggcccacctgcaccgagcggttgccgccgttaaaccctaccgctgctctcgtcaccatctctccgactcacccctctgtcctcgcaagccgccgccggccaagtcctgtccctctcccttgtctggttcggatcgtcgttgctagccaggtgctggatccgtagcggcggcggcggccatggacaagagcatgctcggcgacctggacggcctccccgaggaggacaagatgcggatggccgccatgatcgaccagctccagatccgcgacagcctgagaatgtacaattcgctggtggagaggtgcttcacggactgcgtggacacgttccggcgcaagaacctggacaagcaagaggagtcttgcgtccgccggtgcgcggagaagttcctgaagcactccatgagggtcggcatgaggttcgccgagcttaaccagggcgtggccacgccggactaagaaacatgctgctgctggctgtggccgccaggtttctggctttgctggcacagatttgtagccgacaaaaggatttcagcacttccgctgcctgagatatatgcgtcttagagccgaacgctgggtgtcagattgaataaaaactgccttgagaagtgttgtatttcgtttcatacttgttgtgtcaacggtttcatttttttaggagccacataagtgcgggttttttttatatataagcttttttttttttttcccccccccaaaaaaaaaaaaaaaaaaaaaaaaaaaaaaaaaaaaaaaaaaaaaaaaaaaaaaaactcgaggaagggcgccggtacc

SEQ ID NO: 91541 - DNA, 1150 bp, Zea mays
  Clone ID: MRT4577_183483C.1
aaaaaaaccccaaatcccatacccagcaacaaaaatggccaccgccaccactgaagcggaagtccgtgagtccctcggcacgaagttcggtctgcctcaaggtacaggcgaaagacatggcctccaggcaccccgtcgctggagccgcggccgtcatcgctgtcagcgccgtgggcgcctactttttgtggccagtggcggacccgggcgtggccgtgagttgggaacctcgaggccggccggactgtgaaaacaccagtatctaacccacacggcccacctgcaccgagcggttgccgccgttaaaccctaccgctgctctcgtcaccatctctccgactcatccctctgtcctcgcaagccgccgccggccaagtcctgtccttctcccttgtctggttcggatcgtcgttgctagccaggtgctggatccgtagcggcggcggcggccatggacaagagcatgctcggcgacctggacggcctccccgaggaggacaagatgcggatggccgccatgatcgaccagctccagatccgcgacagcctgagaatgtacaattcgctggtggagaggtgcttcacggactgcgtggacacgttccggcgcaagaacctggacaagcaagaggagtcgtgcgtccgccggtgcgcggagaagttcctgaagcactccatgagggtcggcatgaggttcgccgagcttaaccagggcgtggccacgccggactaagaaacacgctgccgctggctggctgctcacgttgtgcgcggccgccgcgcccgccgccaggtttctggctttcgctggcacagatttgtagccgacaaaaggatttcagcacttcccctgcctgagatatatgcctcttagagccgaacgctgggtgtcagattgaataaaaactgccttgagaagtgttgtatttcgtttcatacttgaagtgtcaacgatttcattttttacgagccacataagtgcggttttttttacgagccaaataaaaaagcagtttttttaaaaaaaaaaaaaaaaaaaaaagggccctcgaagcagggagcaggcatcctggatgaggtgaatccgtcgactagtgtcaggctgcggtacagcccagctgtttcagttgcatcgagtgatctggaaaag

SEQ ID NO: 91542 - DNA, 624 bp, Zea mays
  unsure (1)..(624): unsure at all n locations
  Clone ID: MRT4577_183484C.1
tccaggggctgacaagnaacacacgatctcgaatctgagacgacttcagtggatgacctgccatattctgtaaaaaggggaaaaatcaaaagagatcgtggaacagctaaactagaagagaaaaatcaaaatgagggaagattagatgaccagaaacagggtcaaataaagaagcgcagngaaaaagttaaaacatactatccatgttgaatccagtgatttggattttgagattcactatgcctttcatgatgaacctcatattttactagctcagcgtccatttcactatcgaaagctaagatactcgcgctggcatgggtgagtggtggtccagtgggggcgtggggctaaactctattatcatccttggatcctggatcatttggagcctttggcccttgctatagaggaggtagagtggtggagactggcaggggcaaaggggctcaccctgcccactgctagggagagaggttaggttgtgctctccccattttggccgggtcttgttttttatgtaataggtagttaggatcagaattcacaaacttctaggggggggtctgtaagactattcttctatcaattcaatgatacgcgctggtagtaactagtaatgcc

SEQ ID NO: 91543 - DNA, 274 bp, Zea mays
  Clone ID: MRT4577_183485C.1
ataccataaaggcggcggcaccttgcacacttgtcactagggtggagctcctctaccgtttcgatcgctctgctcagctctgcttcgcgtctccgtccgccccgagaaaagcaaaacacagccatggaggggtaagaacgcgagttctggcagctcagtgaccagctgagcctgcggacgaccgcctcctcgggcctctcgcctcggcgactcaacctggacgccgcccaccgccaccggagggcgtcgcaatgacaaccccgaggtggtcgcg

SEQ ID NO: 91544 - DNA, 1104 bp, Zea mays
  unsure (1)..(1104): unsure at all n locations
  Clone ID: MRT4577_183486C.1
gccggccgggtcggggcggtttgttgctccacctaccaccgccggccccaaaatcccaaatccgtggcaccgccggcggccgcacccccggttgcccgcccttgacacccatcactcgaccccacccgaccgccctcgccaccgctccactccacaaggtgctccgccccagcaccggatccaacaagtcagcctaggcactgctgctcgagccgactggccccgagacccgtggaggagaagaaagctgtggtagcagccagtgtgatgaatggtgtggcggcatgatccgaacggcttcttgttcttgtccttcccgggcgctgccactgccgctccttgtttgcatccttcctgcgcaagtgtggagctctggtccaagctgtcccagattatttgctgtagatgcagacctgtacatgcagataggagattgcttgattgttccccatccgttaaagcaatgaatacatgggtgaggggagctgtgcttgaccaaagggtgtaaaatctggatcatgttttggacaaatgcatcgcttagatcaacaaattatactgtgttgagagtttttgtccgaagaaaatacccttgctggagagcaaatacagctgaacatatctgtaacagctggagctgtccttatcttcattagtcacatctctgggtactcaaaatatgcaattctactgcattagtagcatcacttggtagctgctacggcatcggcatagaagcacaaggagagagggaggggagagtaagagcgatgggggatcttgtcgtcggattggcaaagtcggtggtgggagggggttctaacaaaggcccagtcagctattgaggaagagtcaaagctgcgtcagagtgcacagagggaccttgtgttcatcacaggtgaatttgagatgatgcactcctttctcaatgtcgccaatgaagagcgtggccagaacaacgtggttaggacatggngtgaaggcaggtccgtgacctagcctaacgatgtagaggattgcatttggattttgttgttcacttgggataaccggnccccactggtggcgccgcttcataccatcatgtatgccagcatcggcact

SEQ ID NO: 91545 - DNA, 890 bp, Zea mays
  Clone ID: MRT4577_183487C.1
atacattaaatacgcccgcccttatattttttcttttttttacataaatcacaatgccagctcatacgagtgtataaaaaaaacccccaacaaaattacgattcgtattcgtaatcctaagaaacgatcctataaatacctcatctccgcaccgctatacatgataaggccctgcacctgcttacacaacgatcgttcccagggatcattccatggatcttaacaagttattctacataccacatttaacaagtaatttaagctttaacccaatttgccatcgcgaccattagcgctactccatgtcttggccttgtgtacatggttgtccacgtccgacaagaacagaccaaatgccgcgcgcgatgagccgccatccttccaggccacggccgcggcatccctgtgcgccgtcacacgtgctctgagctgctccccttccttgaactccattaccatctttaccttgcgctcgacctcctcggcgttgaccagtccctgctgccatccaaccagatccacaccgatcccggcctcctccaccatgaccaccgagttcatcttctgctccgcgtacataggccagcaaagcataggcactccggccgtgaccgcctccatcaccgagttccacccgcagtgcgtcacaaccgcacctgtggccctgtggttgagcacgttcacctgcggcgcccatagcttgacaactacgccgcgagctctggtcctctccaataacccggccggcaggagcgcacagaggtcgaagtcggcgcgcgggtcgaacagcctctctgggtccatgccctcggtggggagaggagccctcaccacccacaggaaccggtgcccggacctctccaggccgacggcaatctccttgagctgct

SEQ ID NO: 91546 - DNA, 267 bp, Zea mays
  Clone ID: MRT4577_183488C.1
aatgaacttcagctagagcaaagccgagcagccaatcaagaacaacgagctaatgaactggaacaaattatggacagtgtgaaatccaaaattggtgaattggaggatgaatcactaagtagggcttgccaccaacagaataaaataaaagatcttcaaaaggagcagaaaactttacaggtgaagtgccagcattataagaaaaaacgaacggagcaagaagaaactattgcttctttgcaaatggaagtctgtagattaaaaagg

SEQ ID NO: 91547 - DNA, 587 bp, Zea mays
  unsure (1)..(587): unsure at all n locations
  Clone ID: MRT4577_183489C.1
gngaagatgcagnacttacctttatgagagatcctcagaatgctaaggaccctgatgctataaaggtgctacatgcagggtctgaatgtgaggagatgcttggatacttgcctcgagatcttgctaaagttttggctcctctagtggacaagcattatgttgaatgcgagggatctgtggttggtctgcatgaacagcagtttggcaatgttcccatccagattactatccagaaatgtaaatctgacaatcagagaaacaatgatccaaattgttgccaatccttatgggaaaatttcgttagcactgtcaaaagagaaaatttccggcgacctcacagtgcaagatatcagacaaattttaatttgatgatagctgtngttatggttaaccatgcacatgtttttagtgatatagaaaaatcatttttagcttcttttaagtcgttatcagatgatgggcaacggcttttcattaggatctacactcgaaaagggccatggttccggaagggcagcatctcatatcaagagatttcagatctggagcatgcagtcatggagttggagttggcaggttatatcgac

SEQ ID NO: 91548 - DNA, 877 bp, Zea mays
  Clone ID: MRT4577_18348C.1
ggcagcctccatactcttcatcacagcagcaataccagcagcagcagcatgaagttgcccattcattctatggccaaggcaacacagtattgcttcctgtagcagatcataacgctcagcatcagcaaccgcaaccagtgcagctacacagccagggcccctcctgtccacctcagccaggcaagcccagtcactgcagcgccgcaccctatgctgttcaaggaaacggccagacctacagctccgcatacaagaacccttctaactgccctgcaactgcagccgttgtagctcttctgcctcagcctcctgccatcgcctgtatggcgtaccatcccttgggaccacaggtcgtgcacaaccatccatttggaaatactatggttgaaacgtccaggtccagcgtggtagggtacccacgggatcagtttgagatgctcccggcgattactgccgcccaacctgtactaccggttgataagctcaatgctggcagcaatgtaacatcgtcccctagggaatggtcagcatagcggtggacggtgcgcggtcttgcatttcactgcttccacacagcattctactatacgtattgcagctgggagctcgtcgggtctattttatctggctcttttttcccccatcagccagcagattagaacggatccttctacctttttcagctgaaggtcggtatggaataagataagtaggttggctgagtgatcactggtcgctgttggcatatgccctcacttttaatgggcatatgtgcttgtaaccaggtgcgagcttatattatatgcctttcttatatgagtacatgacgggtttacatcagcttgtcagatgtttttttgtaactgtgaattgcatt

SEQ ID NO: 91549 - DNA, 355 bp, Zea mays
  Clone ID: MRT4577_183490C.1
aaaaaaaaaaagatgataaaccggggttcttgttttaaaccggggggtttttttgggagagaacaaaaacccgttgtcttttgggaacaacccccccgggaaacaaacccaagcctttttccttatcaaaaggaacgggggcctaccttggtctcatgggggaacactgagccccggtggttccggaacattcttatgcctttcaccatggggcccccccgggcccgaaatcggtctccaccccccggacaaaaaagaccttgccggcctcaacttcttcttaaaccaaggcccacgaaaaaagggcccggccaaggaccaccttgccccgggtgttgtaccgggaacccgggca

SEQ ID NO: 91550 - DNA, 409 bp, Zea mays
  unsure (1)..(409): unsure at all n locations
  Clone ID: MRT4577_183491C.1
cccgcgtaacccggagnaaggggggtatctagggtttcccttgctcctgcgacgcaaacgcagatatagctcgtcgaataatcaggaaggactgcccggcgagcaggtacccgtgctgctccagtgaggaacccaacatatcaggacgccagactcctcctccgctcctgttcgagatggtgcgggctccatgtttacagcaactggatccaccattgctcaaggtatgccgtttaggacgggtagtgccctgacacacaggattgtagatgctgtataagcccaccagaccttttttcatgacacagtggccggagaagctgctgatgctgaccctgccccctcaaagatgaatgttgatgcttgacaccatcattctaaggctttctaagattgactcaacaactat

SEQ ID NO: 91551 - DNA, 666 bp, Zea mays
  Clone ID: MRT4577_183492C.1
tccggaacccacgacgcagctgtcgccagaggtacagaccaatggcggccgccgcaggcgacggcggcagcgtcccgccgaagaccccaatagcggagtcgcctcccgcttctcgtccgcacgtgacccgcaatgccatgccgtgggagaagtgcgtcgccggcgttcaattggctctcaaagacccgaaggtggtgttcctgagggagcagatcgagaaagccgggtgcaccgtatggccgacgcttttccgggcggccatctgcaggagcggcgggaactacgcaagcggcatgggggtagtagtttgctgtaatcacatgcgaaggcaagatgagataactcaggtcataattcatgagttagtacatgcttatgatgactgtgttgtcaagaacatcgactggaaaaactgcgctgaccacgcttgctctgagattcgagctaatcatcttagtggcgattgccattacaaacgtgaactgatgaaaggcttcctgaagataaaggggcatgagccagaatgtgtcaaaagacgtgcgctgctttctgtcaaggtgaacccgcactgttcagaaaaagatgcagaagctgcagttgagaaggtgtgggatatgtgctacaacgacccacgcccgtttgataaggctctatgaagtgaaagct

SEQ ID NO: 91552 - DNA, 247 bp, Zea mays
  unsure (1)..(247): unsure at all n locations
  Clone ID: MRT4577_183493C.1
cgaaacggtcgacatggctttcgcacgcannatctgccnngtagcggttcnngccgtggtgcgcccccgcggtgcttttgctgcttggcaagcggcggcgaaccaccttggagggccgcattaccttgcggccggtggagctccgcattgggcccttgcttttcttaccccgggggaacggggtccggcccttccggttcttgttgtaccgcggtaggaaccttaagaagcgcggccggaaccgcgg

SEQ ID NO: 91553 - DNA, 380 bp, Zea mays
  Clone ID: MRT4577_183494C.1
cagtatactaggaattaggcctctagctcgagcgagaagcggtctgctccacaggcccatggtcgtgccctggtgctgggacacatcccttgcacaaaaaaaagcacatgcagcagcattagctctacctacctctactacggacctggatccacccaacccgttacgctaagctgccctttcctggacgaggagagaagagaataggtctttcctccatgcagaggtagacccagcaaaaaaggagaaggaggatacaggcgcttgacataggcaagtacagaggatctggtggacatgggcgtgcgcattgccaagcgcttgcactaccactggcgcgagaccgagcgcctctactaccaacggccccccggtggacc

SEQ ID NO: 91554 - DNA, 346 bp, Zea mays
  Clone ID: MRT4577_183495C.1
ttttttttttttttttttttttttttttttttttttttttttttttttctgaagtctgcatggcagcagcatccacaattccaaatcggatttatttatattttgcttgcctgtaatatacatctgctacgcaaaatcaatataatgtaatgaatcaataggtgcaggttctaacaaaaaacccttttgctttgctattcaactaccatgcatggctcaaaatcatgtccactatctaaaaactaaaatcaagattcagctaccatgcatgggtcaaaatcatacatcatcacaatgctttgctgctcaacctgaggcaaactattacaaaaatttaacttttttc

SEQ ID NO: 91555 - DNA, 429 bp, Zea mays
  Clone ID: MRT4577_183496C.1
cctcgcccccatccatgacctctctctctctctgctctcacctgacctagaacagatctggcacgcgctctcctcccctgccatgtcctccccgtcacgatccttcttcgtctgccggcgggcgcgccgcccagcctgggcttccttctcgcctccggagcctcgagagccgctccgtctctcctccaggcgcaccttcccggccgtggacacacgcttccgtccgtcgatagtttaccatggcgcgcgcttgtcgtcggccggccaagaatctacatggcaggtcgctctcgtctccatggtgcccggccggcgctcgcggcggcccctctcgtcgtcggccgagggcgactctggccgactgccacaagtgcatggctggcatggtttactatcatccagcgccgtctagatctgtgaacttgcatg

SEQ ID NO: 91556 - DNA, 573 bp, Zea mays
  Clone ID: MRT4577_183497C.1
ctagttcacaaaaggagagcgagctcgagagtaacaagggcttgcgtgtgcatggttgataggggaaatggctaatggcagcaactggctaggcttctccctctccccgcatacggccatggaggtgccctccgcttctgaacccgcttctacccatcacgctccacctcctccttcttccagtaccacgatctcctcttccagtaccaacaacaccatcagttccaacttcctcttctcaccgatggcctctccctatcctggttactactgtgtgggcggcgcgtatggcgatggcaccagtgctgccggcgtctactactcccacttgcctgctatgcccaacaagtccgacgacggcaccctctgcaacatggaaggcatggtgccgtcgtccccaccgaagctagaggacttcttgggtggtggcaatggcggtgggcaagaaacggccacctactacagccaccagcagcagggccaggaagagggggcaagcagggattaccgccagtaccactaccaacaccagcagctcgtcccctacaacttccagcccctgacggaagcaga

SEQ ID NO: 91557 - DNA, 130 bp, Zea mays
  Clone ID: MRT4577_183498C.1
gtggtttagcagcatgaaaccaactattatgttatgatgctagtacacataggactttactataacatatggaaatactcgcactactacagagatcgcgactccttttgcaagcgagccatatgcccat

SEQ ID NO: 91558 - DNA, 654 bp, Zea mays
  Clone ID: MRT4577_183499C.1
gcccgcttttttttttttttttttgtataatcacagagtgtatagagataaatgtcacaataatcagagtacttattacatagcggaagtcttacaaaataaatgataaatatagcaggatctaaaatccatccttggcgccagaaagtcaactgggagacgccacctagatcgaatcgaactcctcgttatggctcctcttgaaccacccgttcttctccttggtttgcagcggtggtgacgagaaatcaagacgacgcaagacccgcgtggtcagttcttcgcgcggcatgggcgggatttgcgacgtcgcgacgtcgcgacgtgcggcccgaatcggcgagtgcgacacagagcaacattatgcgctcggggaaggaagcgactggtggagttggtggccgggactgcagcccgccctggcatcggtgaagaggtagagggcgcaagggagttcgccctggaggtgggtcacggctagccgaggaaggtactggggtccggcctacagggagctgtgagggagtagatggctagagggagcggcggagtcgtcagagggagccctgctcggccgccaaggaagaggagcagggataccgggtgccgagcaccatggatgggcaggagaggagctcggtcgagcccggccgg

SEQ ID NO: 91559 - DNA, 331 bp, Zea mays
  Clone ID: MRT4577_18349C.1
cccacgcgtccgcccattttgttttctagagcacaccaatcctaagaaccggcaaaattttaatggcctgcggcgcaatctcggaatcctagccgtccgaacatggccggggctttcttccggccaacaaatggggttctctggccgttggtttatcccgaggacctaacccaaggcggtaggtcccacctaaaattttaaagccaacacccgacccggccggaattaccaccgccccgagggagaagcccctggccgccaccctttccctggccacgcttattggtcgcgagctccctgccgggggcttcgagcgcccggccctgcgcta

SEQ ID NO: 91560 - DNA, 1337 bp, Zea mays
  Clone ID: MRT4577_1834C.1
ctggccgcgaggccggcagggagaagtactaacgccccgcccctgcctggggttttaaccctacccaaccgccgcccatggcgtccatctcggagcccgctgctagggagaagcccatcgtcgtccgggtcaagcgcaaaccttcgcaaaaccgcccggacgctttctggctagagattaatgagaggccggcaaagaaggcggcgattgatttctcccgcctttccatctccgaaccctcctcgtcctctgccagtgtcaaagcttcagaggaaccacgggttaagaaaattcttgtccagcacatcgagacagtacaccactctgaagctgtcgaagatgttttacaatctcttttgcttgttgactcaaattccaaggagacaaagagcaagacaaaggagtggaatgacagaatcaagcaagacaaaaaaccagagcaactacgatcagctgccagacagaggcatgaggatatgggaagaaatgctcggtttgcacaaatatggaagagtcgaaaaggagaaaaggctgatgctggtgactcattgagagaaatatgccatctttatgatgctgtccaagtagatcccgatgatgagaagcatccagcagaaccacggattacatcttttgaagagggtgctgttctatgcaactttcttccacttatacgggaatacttgccatcaactgccgaggaaattgaggcggatataatttcattggcgcaatcagaagattctgaagtttatgatatctatactgtcaaggaggtggatgacacaatggaggccacgtcagcagcttcatatccaaggttacaagtggatgatggagaagatgaatgctacgaagattgtccatatgacacagatgattcgaatgccgaagacaatcctctttttgattatcctgatgaatcttccgaggacgaggatgatggtaggaacgacgaggatccttttggagacaaagaaggttctgactcagattacgagaaggaagaagtagaggtggaagaggatgagtaacggtgaagggaagttgtgatgaaacgtgcggttgtagaatgtagatgcagggcagcaggggagctgactgatgaatgtttgtgttgctttatgctgtctaagaaacgggacttgtctcgacgttatgtgccagttagcatagcacatcgtgtgcagtatccggaggaagaattgggaaaaaacaatatttggaagcgtcagctagacacaggcgaatcgtaataattggtattttgccacttgaaaagttgcatccttctgtaattaccgtttgtgttgagccttgtgtgttcttgctctcgt

SEQ ID NO: 91561 - DNA, 327 bp, Zea mays
  Clone ID: MRT4577_183500C.1
aggaaaggggggaaaaaatgactccgcttgtcttgatggcatgaacccgctgctgcatactggccatacgagccacctaggaggacccaacaatgagagtctgccacgggacacctgccgacttattctgcacatagcaataagcgaaggtgtaagctcatttttactacacgatctgtaagacgaggcaggcaaaatggagtacaaatgttgagccccctcggaaattccacaaagggactgggtccgctgtgacttcaccttcgaggccggcacttcacgctaccaaacggaagggggttggaatgaacatggaaggggggaaag

SEQ ID NO: 91562 - DNA, 343 bp, Zea mays
  Clone ID: MRT4577_183501C.1
tgcccgtgctggtgccattgccccatgtgaagtcactgtgccagcccagaacactggtctcgggcccgagaagacctcctttttccaggctttaggtatcaccactaaaatctccaggggcaccattgaaatcctgagtgatgtgcagctgatcaagactggagacaaagtgggagccagcgaaccacgctgctgaacatgctcaacatctcccccttctcctttgggctggtcatccagcaggtgttcgaccttggcagcatctacaaccctgaagtgcttgatatcacagaggaaactctgcattctcgcttcctggagggtgtcagcaatgttgccattg

SEQ ID NO: 91563 - DNA, 346 bp, Zea mays
  Clone ID: MRT4577_183502C.1
ccccgctcggcctggccgtcccgacccaccttcggaagaccggctcctgcttcgaccaccatcccacagatagtctaccactgtgcgaccgatcctctatggtctggccacgcagggcagaccccacaggcttactgctgcccatccacataaggcttcggttccaggtctaagcgcatgcccgaaacgtctctcctggtgtcggactgcgcggatacatgatatgactactacagcccccggaactgtaaggcactcgtaacgtactcggtcactaacctggctgaggagtcctttgtgctgtacatcctatatttgagttccgcatgggcagcgcctgctccat

SEQ ID NO: 91564 - DNA, 471 bp, Zea mays
  Clone ID: MRT4577_183503C.1
ggcgggggaaattttattaccaaattttacaagttacaaaaaatttacttttttttatcggaaggattacaaaagtataagtttgaaatatatgctagctaaaaaaaccttcctcaataaaaagtatagaagggttacttaaatttataaaaagggggggcccaccggcttttaacaccttttttagcagcacaaagctttgacctttttgcagggaagaggttttaaatccctttacccaaccataaattagatagctccatccttttgaggaaaaaacacttgagtaaactcctttttagcacccacttcatcttgaatcttcactttttgtttggggagctttttgccgagcatggaacaagtagtacacggccaaaaatacttgggggaaaccttgtccacgggagggaaaaaacgggtgggtttggtcccccctagggaagggaacataaagctccgggcaaaggg

SEQ ID NO: 91565 - DNA, 462 bp, Zea mays
  Clone ID: MRT4577_183504C.1
ttttttttttttttttttttttagggggaattttttttttttttttttttacaaaagaatttaaggttctactaccattttttcccaccaaggggccttacaccccacttccctttttgttcccatttttttcaaaacggaaaaacccctaaggggcccgggaaacctaaaaaactttaatgcgaccgggagcccggaaacccctccccttttaagtgcccccagaaaaggtaaactgaacattgtttttcttttttcgggaacttggtccttggaaaaattgtcccaaaaacgcgggaatagggcgttccttataggccccccaacctccctttaagggggtgggggtaaaaccactttgtgccaattttagggctggggggtaaacaatttttcggacttgttacacaaagaagatgggggttttttgaaaaattgccctggggaaaaaaaaggggcttt

SEQ ID NO: 91566 - DNA, 927 bp, Zea mays
  unsure (1)..(927): unsure at all n locations
  Clone ID: MRT4577_183505C.1
ctcgaggccggccgggccggggctgcgatttctgccgtcaattcggcaatcggacggctaagagaataccgcacggctccgctgtgcctccggcccccgccttcatgtcactaatcgacaagggcgtctcgaatggaaggagcccatccaacccaacgaagaagcaaaatccccaatctctgcgccgccgccgttctgtgtcgttcttcgcccgccgtcgttccgtgtcgttcttagcccgccgccgtttgtagtcgcggcttcatcgtcgcgtaccgatccccaccgcccccactgccaccagaggtgtcgacatgtctcagaacaacccctcccagcttctcccctcagagctgatcgaccggtgcatcgggtccaagatctgggtgatcatgaagggggacaaggagctcgttggcaccctctgcggctttgatgtctacgtcaatatggtgctggaggacgtcaccgagtatgaatacactgctgaagggcgccgtattacaaaacttgaccagatcctcctgaacggcaacaacatagccattttggttcctggtggttcaccacctgatgtgtaatgaacttttgcttcccagagtatcattcgtggtgaaggcagccccgtgaactttgcaccttatattttttaatcattggatgtttcctcatctcggatgtgtttctcctgttcatgattataccgaagtttattgttaactctgtcagcatggaatctctcctctgtattgaacttactgacctgaagtagtgtgcctgcatagctgtggttatatgattcgctttgctcatcatcattgtactgtaatgtgaattgcaggcaatggattatgaagaaacctgataaatggaagcgcatcggttgtatttggcgttaaaaaaaaaagggccctagggccgnnnnnn

SEQ ID NO: 91567 - DNA, 1306 bp, Zea mays
  Clone ID: MRT4577_183506C.1
gacggcgtccgcgccgtgcttgcccagatcgatggaatttgcggtctccagatgcaagtccggggctcgctatccgtggaaggcgaggagagacgatgcatcggctctcgattcgcgctctacatggaaggtgaggcagatcagggggagtgtgtagagaaatccaagcgaaaccccgcgagagcgaggcgacggcagacggaggcgagtgggtgagccgcgggcgagagacgaggtagcgggctagcgggatggcgtcgccggttgtagtggccgcgacgctgctggtggtagcactggcggcattctgcggcacggacccgctccgaacggacaacatggtggacttcccggggtttgagtcccacctcgtcgacctccctgatcccgccgagatgccgacgcacgcggatgaatgggagcgactctgtggagccgatgtgcggttctgcggcgaggtgcaggggcccgagagcatcgccttcgaccagcagggccatacacgggcgtctgcgacggccgggtcgtcttctgagacagtgagcggtgggtcccattcacgatcgcctccccccgcttaacataatcttcttgagcacggatatcatggtggaggatgctcttgtcacggcttccagaagaaagcaaagaagaactccatgcaagagcacctacacgcatgcgatggctttccatagttcttattcttttacaacgagttgcatcccagatctgaacttttccttgctttgtgcctacagctaggtgagtgccgcgctgcgcccaccccacagagcaaacattgtcatccacccccaaatcacaaagcttggtgaccttgctgctgcatgcattccacaagtaaacgcaattgcccaacccgacagcaaggacgttatgtgaagaccaatcgacgaggttgaggtagaagtcgtcctgcaaagcgggcgcatccagcaccttgtacggcgaccgtggcaccttccttggtcccgcgcccctggtggtgaaaatgccggggaacagcgcgtcctcctcttggtctcccgaaaaaagcgccctcttggcgttccggcgcacctccgtcttgaatctgaagatgttcccggtggcgggggtgccgacaggcgagggccccggggaggagaaggaggaggaggacgaggaggagcacgcggcggccgaggacgcgacgcggtcgggcgtgtcggggccgaagagcgcggcgcggaggagcgtgcagtagggcgacgcggcgggctgcgcagatccggacgaggccgcggggccgccgtcgtgagagtgc

SEQ ID NO: 91568 - DNA, 288 bp, Zea mays
  Clone ID: MRT4577_183507C.1
gcgagcgaagaacgcgggcagcgagcgagatgcagcaccgaggcttcctcgtcctcaccctcctcgctctgctggcgctcacctccgacggtcgccaacaagaaagataaggtgaagaagggcggcccggggaccgagtgcgctgactgggcctgggggcatgcacccccagcagcaaggattgcggcgtcggtttccgcaagggcacctgcggggcccagacccagcgcatccggtgcagggtgccctgcaactggaagaaggagtttggaaccgcctgcaagtaca

SEQ ID NO: 91569 - DNA, 1587 bp, Zea mays
  unsure (1)..(1587): unsure at all n locations
  Clone ID: MRT4577_183508C.1
ctcgagcgcgccttcatgtcactaatcgacaagggcgtctcgaatggaaggagcccatccaacccaacgaagaagcaaaatccccaatctctgcgccgccgccgttctgtgtcgttcttcgcccgccgtcgttccgtgtcgttcttagcacggccgagtggggagtaccacatgccttctcgtcacaaatcgactagggcgtctgagactctgagacacaggaacagaaccctctctgcgccgccgccgccgttgcagtcgcggccacatcgtcgcctatccatccccaccgctcccactgccacgattcacaagaggtgtcgagatgtctcagaacaacccctcccagctcctcccctcagagctgatcgatcggtgcatcgggtccaagatctgggtgatcatgaagggggacaaggagctcgttggcaccctctgcggctttgatgtctacgtcaatatggtgctggaggacgtcaccgagtatgaatacactgctgaagggcgccgcattacaaaacttgaccagatcctcctaaacggcaacaacatagccattttggttcctggtggttcaccacccgatgtgtaatgagcttttgctccccagagtaaccattcgaggcgaaggcatctccatggactttgcacgttattttgggtaatcattggatgtttcgtcatctcggatgtgttcatcctgttcgtgattataccaagtttattgttaactctctttcagcatggaagctgccttctgtatcgaacttactgacctgaagtagtgtgcttgcatagctgtggttatatgattggctatgctaattctgtgtatgtctgctcgccatcattgtactgcaatgtgaattccaggtaatggattatgcagtaacctgataactggaaaaacaaccgtagcaattggcgaatccaaggacacactggcacttgtaaaagttaaaaaggcccatcttggtgttatgactaccctgtccttctctcaggattcaagaacattgctgtcaacttcctttgactctactgcaagggtgacgtacgttggttccccaaaaagtaatggaacaagtatatggcccatcctactagttattattcttgcagttttagtgtactactgtatgcagcacaaagaagacattctggcaatgttgcagcgttgagatagatttctgttcagcccctgactggtctactctgctggacgtattattagtgttgcttcagtgattgaagaaattttggacttgggccaacttcattattctctcaaggacaaacaatacagcaaaaggcactgagccctgttatgttttgtagtaaaaagggtaatgtacttactcatgttgtcgaagtttttgtaagttgatggccgcaagtgatagacatatgtggcaatgtttcttcatgctgcacttgtgaattgcaagatgttcgccccaagagtccaatatagagagttcagaaacaaatttttttggtgtgcgaaacaatttattatgtatgcgtaataaagctgtacaaagaatatctnnnnntgcagatagttctgggtgcttatacatgtga

SEQ ID NO: 91570 - DNA, 279 bp, Zea mays
  Clone ID: MRT4577_183509C.1
aagatcgagaacacacagctgcctctgcactcgccatcgccatcgcaccggcttcatgcgtatacatacaccacgcccgacgcaacggcggcaaggaacaggctccaggtagttaagagcaccccgccccatgagctctgggggcttcccatggcgagcaccatcgccgccgcctatgacggaggcatgctcccctccctctccgtggccaacttcaaaaactaccaggacgtagctctctcgattctggagagaagtgactacaccactatcagtggg

SEQ ID NO: 91571 - DNA, 2743 bp, Zea mays
  Clone ID: MRT4577_18350C.1
cattgggtacctcgaggccggccgggattacaacatgtacccctgcactaggaaaataaggcactcggcactcgtgagccgtcgcatttccccccgtgtgaccaattcctctccgggccgagcagccgttccaatccgctcacgccgcctctctcgctgccccgcttgaccgcctgctagcgctgcagtttgatgctgatgacctgatccctccgttgggtaggttcttgggcgcggaaagaacaaagaactcgtggtgggtccgggtccgcaagaccctaggtgttcgtcagcagcgaggatgcccggcctgcctctgcctcaatcgttaaatcagaatattggatgtgaatatgcctatcctgggtctacaggccaggccttccgtcagcagctaagaactgcattgtctccagatgagaaacttaccgctgaaaaagatttggctctgtattgcaagccagtcgagctctacaatattattcaacggcgagccatgaaaaatcccctttttattcaaagatgccttctttataatatacatgcgaggaggaaaaagaggattcagataaccatatcactttctggaagtacaaatactgagttgcaaacacattatgtctttcctctttatgttctgttagctagacccactagtaacctttcacttgaagggcattctccaatttatcgattcagtcgggtttgcttgcttacttcctttagtgaacatggaaataaggacaacagtgaagctacattcatcattcctgacgtgaagagtttgtcaacctcccgtgcttgcaaccatgatattatctttattagctgtgggcaagttggacaaattattggtgaagataactgttctgggaatcatgtggaagattcttctctccaaatgcttgaagggaaatgctcctggggtaaaataccaactaatttacttgcttcatctttggagaaatgtgtgactttaagtacgggacatattgtggagttggcatctaaagttacaatgagaccaagcttcttagagccaaaatttctggagcaagacagttgcttgacattttgctctcataaggttgatgctgtgggttcatataaactacaactatgcatgtccgcagaagaggctggcgcaagagaattacttttatctccttattattgcaattactcatataataatgtcccaccttctctattaccagaaatcataaggttgagagctggaaatgtactttttaattacaagtactacaacaatacaatgcaaaagactgaagttactgaagatttttcctgcccattttgcttggtaccatgtggaagcttcaagggcctaggatgccacttaaattcatcacatgacctgttccactatgagttgtggatatctgaagagtgccaggctgtgaatgttagtctgaaggctgatgcctggaaaactgagtttgtggcagagggagttgatccaaggcatcaaacattttcctactgctcgaggtttaagaagcgtagaaggttggaaaccacagctgagaaattcaggcatgttcacccacatattatggaatcaggatcacatgaagatgcccaggcagggtctgaagatgactatgtgcaaagggaaaatgggctttctgtagcaaatacttcagttgaccctagtcagcctgtacatgggagcaatctttcaccaccaacagtgctacagtttggaaagtcaagaaaactatctgccgagcgatctgaccccagaaaccggcaactcctgcaaaagcgtcagttcttccattcacccagggcacagccaatgccattggaacagtcctctcagatcatgaaaattattatgcatatgtggaattcatttgttcgaaaacaaagagtgttagctgatggtcatataccttgggcctgcgaggcattctcccagttgcatggacgacaacttatacaaaatcctgctctgctgtggggttggcgtttcttcatgattaaactttggaaccataacattttagatgcccgcactatgaacacatgcaatacagtccttcaaattttacaagaagaaagcacaggactaaagtaattttgatgcttctgatgaaaattcaagggaagaagatttctttaccatttccaagaagaaagcatagaattggagtaactttttattgataatttcattcatatctattgtcaattgtattaatggtttttaaaagagacaaatcatgtctaactctcacgctgtaatattctaagtcgtacgtgaatttgatgaatattcattgttgttttacttaagagttatcaaaaaaaaaaacttaaaaaaaaaaaaaaaaaaaaaaaaaaaaaaaaaaaaaaaaaaaaaaaaaaaaaaaaaaaaaaaaaaaaaaaaaagaaaaaaaaaaaaaaaaagggggcccctgggcccccacttttggtccctttaggggggggtaattggccccctgggggaaaccggggcaaaaggggttccggggggaaattggttatcgtttccaattccccccaaaaacccggccgggagcctaaaggggtaaccctggggggcctttaggggggccctacccccctttattggggggggccccccgccccctttcccgggggggaaaccgggggcccccgcccctttaagacccccccccccccccgggagggggcgctcgggtattggggcgctttcccgttccccccctat

SEQ ID NO: 91572 - DNA, 588 bp, Zea mays
  unsure (1)..(588): unsure at all n locations
  Clone ID: MRT4577_183510C.1
cgcgtccgccccgcgtccgccccgcgtccgggagagggcaccagggccttcggcgcccgttcaggatccacatcttcccgagcgagttcttggttggcctcttcctcttcggaccacctccaggttgctggccctgaatcccaacagtcagcttgctcgggtctgagaggatttatgttggctgttggggtagcttgccactctcaccaatcaagttttcatgtctgatctcgacattcagatcccaactgccttcgatcccttcgctgaggccaatgctggggactctggtgcagcagcagggtcaaaggactacgttcacgtgcgcatccagcagcgtattggtcgcaagagcctgacctccgtcccgggattgaagaaggagttcagcttcngcgngatcctcagggatctcnngagggagttctgctgcggtggttctgtggtcccggacccagaacttgggcaggtcgttcggctgtggggtgttcagagggagaacgtctcgatttttctcgtcccggccggccttgtgggggaggggcccgtcggggtttctggttgtctgggcatccgccgggtcccttt

SEQ ID NO: 91573 - DNA, 663 bp, Zea mays
  Clone ID: MRT4577_183511C.1
caacgacgtggcaagaaagaactacctgcagggctacgtcacatgcctatccaaagcagtcaggaacggagcaaacgtgcggggctacttcgtgtggacgctcctggacaacttcgagtggacgttcggttacaccgtgaggttcggcctgtaccacgtcgactacgacacccaggagaggacgccccggatgtctgcgacgtggtaccagggcttcctcactgcaggcaacaccagcctggtgacccacgaagacgaagcgcaggcacggagagcagacgcgtgatggtgatgcttccagttccagcgaacggatgcgttgctatttgctaaacagctagccgcaggcctcaggatgaactcaggagtcagcactactcgatcgtgctcgtctccttcccctcgccatattagaatgcgtggggtgtcctagctagtgtgtgtgtatatggatagatataatatatgggcatcattagaaaaggtggtactgctgcatatatagtggatcatgctgtactgctgctcgatggcttaacggtctgtactactagctagatgcttgcagttgcaggtagatgctctcagacgatctgaatgtgaatgtctgtctgtagtactatttcatagacgaacgcccagcagtccatttctgctgctgag

SEQ ID NO: 91574 - DNA, 917 bp, Zea mays
  Clone ID: MRT4577_183512C.1
cattgggtacctcgaggccggccgggaggggccttcagatccaagaagagggaagagcaccaaggaccttcggcgcccgttcaggatccacatcttcccgagcgagttcttggttgacctcttcctcttcggaccacctccaaggctcttggtgtagcttgccactctcaccaatcaagttttcatgtctgatctcgacattcagatcccaactgccttcgatcccttcgctgaggccaatgctggggactctggtgcggcagcagggtcaaaggactacgtacacgtgcgcatccagcagcgtaatggtcgcaagagcctgaccaccgtccagggattgaagaaggagttcagctacagcaagatcctcaaagatctcaagaaagagttctgctgcaatggtacagtggtccaggacccagaacttggacaggtcattcagctccagggtgatcagaggaagaacgtctcgaatttcctcgtccaggtacgcaccattcggtgcaacaccttgtgcgcttagagacatgtagcaacgtatgtataaagacggctgattctgttcctgatgttgtcctggcaggccggcattgtgaagaaggagcacatcaagattcatggtttctgagcaaccgccgggtccatagcaaaccaaccctgcatgcagggccagcttattatatataatatctgaggtggagcatatctatctggctgtgtactgcaagcaggcctagtacgccgcctgcgcgttcctcctattacacatataggcccctccctgcgtgtatgcttgttaccgtcgtgtcgaaccttgtactacgaggctccatcgaacatcgatggcttgcttctttatcagaacatgtttgaataaacgctatttggtgaaaaaaaaaaaaaaaaaaaggccccta

SEQ ID NO: 91575 - DNA, 689 bp, Zea mays
  Clone ID: MRT4577_183513C.1
atgattttccgcgagaaaagatacctcctctacttctccttcttcaggcgactagcgtacaggtacagtgcgtcatggaggccgcagctggactgaagtgtgcggccgtgacggcggagctcgtcgggaccgcgttcggcctcatagccaagatcaagcagacggtggagacggcacgccagaacaagctggagtgcgaccacctcaagggccgcctgcccacgatcggcgacgtgctgcatcgcctgccgccggaccccgaggtggagcggccgctggccgagctgatcgacttgctgcaacaggcgtacgacctcatcgtcgattgccagaagcgaagcgccgccagccagctcttccgggctagcaaacacgccgacaggttaagggcagtcaacgccaggatcgactccaacctcagcctcttccccttgatcacctatgccgccatcgcccgccgcctcgacaaacaggggcgctcctgtgctgcctgcccgcacaaggtggaggacgtgttggtggcggagcgcaagatcctcgaaatccttcctcccaggcacaccgacaccgttgtgccggaatgctcctctgctgtctccccgcagaatgcagaggacgcgttttgtggcgcagtgcaagatccagcgggatctttccctctagccgcagcggcgaggtgcaggactgct

SEQ ID NO: 91576 - DNA, 717 bp, Zea mays
  Clone ID: MRT4577_183514C.1
ggacttcccggcgcccgttcaggatccacatccttcccgagcgagttcttggttgacctcttcctcttcgaccacctcctaggctcttggtgtagcttgccactctcaccaatcaagttttcatgtctgatctcgacgttcagatcccaactgccttcgatccctttgctgaggccaatgctggggactctggtgcggcagcaggatcaaaggactacgttcatgtacgcatccagcagcgtaatggtcgcaagagtctgactactgtccagggattgaagaaggagttcagctacagcaagatcctcaaagatctcaagaaagagttttgctgcaatggtacagtggtccaggacccagaacttggacaggtcattcaactccagggtgatcagaggaagaacgtctctaatttccttgtccaggccggcattgtgaagaaggaacacatcaagattcatggtttctgagcaaccgccgggtccatagcaagccctgcatgcaaagcagctatatatctgaggtggagcatatctatctggctgtgtacaagcaggcctactactacgcctgcgcgttctcctatactacacataacacatagccccctccctgcgtgtatgcttgttaccgttgtgtcgaatcttgtacgaggctccatcgaacttcgatggcttgcttctttatcagaacaagattgaataaacaatatttggt

SEQ ID NO: 91577 - DNA, 1196 bp, Zea mays
  Clone ID: MRT4577_183515C.1
ccggccgggaaccattaatcagcaggctttgggggccaaaagaaacggagaggagaaaagcgggggcggcaagcaaccacgggcggagctcggagcgtcctcctcctcccgtctataaattcccctccttttcttcctccatatataggggccatcagatccaagaagagggaagagcaccaaggaccttcggcgcccgttcaggatccacatcttcccgagcgagttcttggttgacctcttcccccttcggaccacctccaaggctcttggtgtagcttgccactctcaccaatcaagttttcatgtctgatctcgacattcagatcccaactgccttcgatcccttcgctgaggccaatgctggggactctggtgcggcagcagggtcaaaggactacgtacacgtgcgcatccagcagcgtaatggtcgcaagagcctgaccaccgtccagggattgaagaaggagttcagctacagcaagatcctcaaagatctcaagaaagagttctgctgcaatggtacagtggtccaggacccagaacttggacaggctgcccgctataggtcattcagctccagggtgatcagaggaagaacgtctcgaatttcctcgtccaggccggcattgtgaagaaggagcacatcaagattcatggtttctgagcaaccgccgggtccatagcaaaccaaccctgcatgcagggccagcttattatatataatatctgaggtggagcatatctatctggctgtgtactgcaagcaggcctagtacgccgcctgcgcgttcctcctattacacatataggcccctccctgcgtgtatgcttgttaccgtcgtgtcgaaccttgtactacgaggctccatcgaacatcgatggcttgcttctttatcagaacatgtttgaataaacgctatttggtaatgctgtgtgtcgaatgcttccgctgaattcaccaagtcctgttggatgggcggtatagtttaccaggctgacttgaagtgtcaaagacaattgatacggttaagcaggtgaagcccgcacagtcgccttgaagcatgctgctggcagaatacgattagatgttaatgaggtgtttgttggaagagtcaattcattcgtgaagcattatgacttcattacgactttattaatttggaggaatgaattcatttcatcatattattact

SEQ ID NO: 91578 - DNA, 1187 bp, Zea mays
  Clone ID: MRT4577_183516C.1
gcgggggcggcaagcaaccacgggcggagctcggagcgtcctcctcctcccgtctataaattcccctctttttcttcctccatatataggggccatcagatccaagaagagggaagagcaccaaggaccttcggcgcccgttcaggatccacatcttcccgagcgagttcttggttggcctcttcctcttcggaccacctccaaggctcttggtgtagcttgccactctcaccaatcaagttttcatgtctgatctcgacattcagatcccaactgccttcgatcccttcgctgaggccaatgctggggactctggtgcagcagcagggtcaaaggactacgttcacgtgcgcatccagcagcgtaatggtcgcaagagcctgaccaccgtccagggattgaagaaggagttcagctacagcaagatcctcaaagatctcaagaaagagttctgctgcaatggtacagtggtccaggacccagaacttggacaggctgcccgctataggtcattcagctccagggtgatcagaggaagaacgtctcgaatttcctcgtccaggccggcattgtgaagaaggagcacatcaagattcatggtttctgagcaaccgccgggtccatatcaaaccaaccctgcatgcagggcatcttattatatataatatctgaggtggagcatatctatctggctgtgtactgcaagcaggcctagtacgccgcctgcgcgttcctcctattacacatataggcccctccctgcgtgtatgcttgttaccgtcgtgtcgaaccttgtactacgaggctccatcgaacatcgatggcttgcttctttatcagaacatgtttgaataaacgctatttggtaaaaaaaaaaaaataaaaaaaaaaaaaaaaaaaaaaaaaaaaaaaaaaaaaaaaaaaaaaaaaaaaaaaaaaaaaaaaaaaaaaaaaaaaaaaaaaaaaaaaaaaaaaaaaaaaaaaaaaaaaaaaaaaaaaaaaaagggggggggcctttttaaagaaccaaattttacaacccggggatggaaaggaaaaatttttttttaggggcccccaaaaaaaaataaaggggccggtttttaaaaagggggggaggggaaaaacctggggtttcccaaatttaatggcttggaaaaaaatccctttttcccaaggggggaaaa

SEQ ID NO: 91579 - DNA, 601 bp, Zea mays
  Clone ID: MRT4577_183517C.1
tgggtacccgggcccctttctcgagttttttttttttttttttttttttttttttttttttttttttttttttcaggggagggtgtgggggcacagctttaccaaatagggtttattcaaacatgttctgataaaaaaccaagccttgggggttcgacggaccctcgtattacaagattcgacacgagggcaacaagcatacccgcggggggggggctatatgggttatgggaaaaagggggaacgcgcaggcggggtactaggcctgtttgtagaacacagccaaataaatatgctccacctcaaatattatatataataagctggccctgcatgcagggttggtttgttatggacccggcggttgctcaaaaaccatgaatcttgaggggctcctttttcacaaggccggcctggacaaggaaattcaaaacgtttttcctttgatcaccctggagctgaatgacctgtccaagttctgggtcctggaccactgtaccattgcagcaaaacttttttttgaaatctttgaggatcttgctgaagctgaactccttcttaaatccctggacggaagtcaggcttttgcgaccattacgct

SEQ ID NO: 91580 - DNA, 218 bp, Zea mays
  Clone ID: MRT4577_183518C.1
gcggggcaagcacacatgctttaatctgttttaccatttttacttccgaacgcgcggcgggggagctttaatccgggtaccttgactaccatttcaaaccccacaagctaatcattgacagcagcgccgtctcgacgtcagaatacatggcgtcagcctcatccgcgcagatcgcggcggcacccctcaggattgggtaccgtaagccggcgtccatt

SEQ ID NO: 91581 - DNA, 929 bp, Zea mays
  Clone ID: MRT4577_183519C.1
ccggccgggatataggggccatcagatccaagaagagggaagagcaccattgcaccaaggaccttcggcgcccgttcaggatccacatcttcccgagcgagttcttggttgacctcttcctcttcggaccacctccaaggctcttggtgtagcttgccactctcacaaatcaagttttcatgtctgatctcgacattcagatcccaactgccttcgatcccttcgctgaggccaatgctggggactctggtgcggcagcagggtcaaaggactacgttcacgtgcgcatccagcagcgtaatggtcgcaagagcctgactaccgtccagggattgaagaaggagttcagctacagcaagatcctcaaagatctcaagaaagagttctgctgcaatggtacagtggtccaggacccagaacttggacaggtcattcagctccagggtgatcagaggaagaacgtctcgaatttcctcgtccaggccggcattgtgaagaaggagcacatcaagattcatggtttctgagcaaccgccgggtccatagcaaaccaaccctgcatgcagggccagcttattatatataatatctgaggtggagcatatctatctggctgtgtactacaagcaggcctagtacgccgcctgcgcgttcctcctattacacataacacatatagccccctccctgcgtgtatgcttgttgccgtcgtgtcgaatcttgtactacgaggctccgtcgaacctcgatggcttgcttctttatcagaacatgtttgaataaacgctatttggtaatgctgtgtgtcgaatgcttccgctgaattcaccaagtcctgttggatgggtgatggtatagtttaccaggctgacttgaagtgtcaaagacaattgatacgtttaagcaggtgaagcctgcgcagtcgcctg

SEQ ID NO: 91582 - DNA, 811 bp, Zea mays
  Clone ID: MRT4577_18351C.1
gccgttatcaacctcccgtgcttgcaaccttaacattatatttattagccgtgggcaagtaggacaaattattggtgaagatagctgttccgggaatgatgtggaaggatcttccctccaaaagcttgaagggaaatgttcctggggtaaaatgccgactaatttacttgcgccctctttggagaaatgtgtgactttaagtacaggagatgctgtggatttgacttctacagttacaatgaacccaagcttcttagagccaaaatttctggaacaagtatgcatatccgcagaagaggctggcgcaagagaattacttttatctccttattattgcaattactcatataataatgtcccaccttctctattaccagaaatcataaggttgagagctggaaatgtactttttaattacaagtactacaacaatacaatgcaaaagactgaagttactgaagatttttcctgcccattttgcttggtaccatgtggaagcttcaagggcctaggatgccacttaaattcatcacatgacctgttccactatgagttgtggatatctgaagagtgccaggctgtgaatgttagtctgaaggctgatgcctggaaaactgagtttgtggcagagggagttgatccaaggcatcaaacattttcctactgctcgaggtttaagaagcgtagaaggttggaaaccacagctgagaaattcaggcatgttcacccacatattatggaatcaggatcacatgaagatgcccaggcagggtctgaagatgactatgtgcaaagggaaaatgggctttct

SEQ ID NO: 91583 - DNA, 443 bp, Zea mays
  Clone ID: MRT4577_183520C.1
catctagcccgctcgctgtggccaatgcacctacgtacctggggcaacagtggggggaacataatgaacaaaatttaaaataaggtacctacaacagggggggggggggacttttttttgctggttccatgagagcaactgactgaggggaactttggtgggtgccttcggcaggggcagctggaggttaatccactggcaggggctaatacatgggggcggtgccttcctacaggagggacaattgctcgccatacaaccaggttctctttggaggaaccctgcctgtggcggggcagcaacccatggctggaggtgccatcttttagattacatatgaaatggacttgataatggtgccctcataccggcgtgtgtttcctagcaataatcaatatattgattgagatttaactgttatgatttccggggggcgcgcccgg

SEQ ID NO: 91584 - DNA, 939 bp, Zea mays
  Clone ID: MRT4577_183521C.1
gccggccggtccggcgaggagaaaagcgggggcggcaagcaaccacgggcggagctcggagcgtcctcctcctcccgtctataaattcccctccttttcttcctccatatataggggccatcagatccaagaagagggaagagcaccaaggaccttcggcgcccgttcaggatccacatcttcccgagcgagttcttggttgacctcttcctccttcggaccacctccaaggctcttggtgtagcttgccactctcaccaatcaagttttcatgtctgatctcgacattcagatcccaactgccttcgatcccttcgctgaggccaatgctggggactctggtgcggcagcagggtcaaaggactacgttcacgtgcgcatccagcagcgtaatggtcgcaagagcctgactaccgtccagggattgaagaaggagttcagctacagcaagatcctcaaagatctcaagaaagagttctgctgcaatggtacagtggtccaggacccagaacttggacaggtcattcagctccagggtgatcagaggaagaacgtctcgaatttcctcgtccaggccggcattgtgaagaaggagcacatcaagattcatggtttctgagcaaccgccgggtccatagcaaaccaaccctgcatgcagggccagcttattatatataatatctgaggtggagcatatctatctggctgtgtactacaagcaggcctagtacgccgcctgcgcgttcctcctattacacataacacatatagccccctcgctgcgtgtatgcttgttgccgtcgtgtcgaatcttgtactacgaggctccatcgaacatcgatggcttgcttctttatcagaacatgtttgaataaacgctatttggtaatgctgtgtgtcgaatgcttccgctgaatttagcaactcctgttggatggc

SEQ ID NO: 91585 - DNA, 237 bp, Zea mays
  Clone ID: MRT4577_183522C.1
aaagcaagatcatttacttttcttttaaaaaacctttcatttacctattttattaattatttccttccccttaaccttatccttccttccaaaattccccctgccatttgattcaaccccccttaaccaaatccttatcacccgaatttaacaataacttttttttttcttccatgcttaattccaaaaccattgtttaaccggtgtcccttttaaagaatccaagctaactacccc

SEQ ID NO: 91586 - DNA, 246 bp, Zea mays
  Clone ID: MRT4577_183523C.1
cggctcgagcagagaatgaggcaccttgggatatacgagagttgcatgatatatcacagatggacgctagagttactactagttaagcttggcctaattaattggtgctcgtcagaccgaactaatgaactcaagcacaatcactgtgttgtgttgtgcaggtaaaccggcagtcctcgtccatgatgacttgagtccggttcaagacaccagcaccatcgcaacagtccactcgacgaacgcgtc

SEQ ID NO: 91587 - DNA, 1993 bp, Zea mays
  Clone ID: MRT4577_183524C.1
ccctgaatcccaacagtcagcttgctcgggtctgagaggatttatgttggataattttggtcatgactgcacagaaaggattaatcttgatggaaataatttagacgaaatctttcatgagataaaagcgtgccatcttatggcccttgctttgttgattctacagttatgtgaagccaaagacagtgacctaagcagatcaaaactaccaagggtgcatctataactgttcgttattttgtttgtatcttggttatacaatacagtagtgtaaaaaacgaattggtgctcgttaactagtacatgatgcatctagtcagcttaattcctgttttggatgttgtgtggttgatttgatcataactccttgtttggaatgtggacctcatcattacttccctgacatcttgtctagaattgagatgccttcatttaagctttggaccacttaattgaaagttatctggactgtaggaataaataggtgctgggaggaataatgaggtagattacaatggtgccgcaacaatgataaaaggccattgagacctgaatatagagatgatcacatggtggggcttgtgactgaattctttgacacagtacaacatttcataagtcttgggaaaagctatatcatatagtctagatttcttagctcagtacaaattgctcctagattcttatggaagaatgtcatcagtctattgtttcatgggtgtgcacccatctgactcaaataatattgttgtatggtgtgcacccctttgacttcaggagaaacttatcctatattttgtagatgtttgggtctgtgatatggtttcctttgtctacaccgaatgttctaattatctatatcgttcctttgtacagctcttggtgtagcttgccactctcaccaatcaagttttcatgtctgatctcgacattcagatcccaactgccttcgatcccttcgctgaggccaatgctggggactctggtgcggcagcagggtcaaaggactacgttcacgtgcgcatccagcagcgtaatggtcgcaagagcctgaccaccgtccagggattgaagaaggagttcagctacagcaagatcctcaaagatctcaagaaagagttctgctgcaatggtacagtggtccaggacccagaacttggacaggtcattcagctccagggtgatcagaggaagaacgtctcgaatttcctcgtccaggccggcattgtgaagaaggagcacatcaagattcatggtttctgagcaaccgccgggtccatatcaaaccaaccctgcatgcagggccagcttattatatataatatctgaggtggagcatatctatctggctgtgtactgcaagcaggcctagtacgccgcctgcgcgttcctcctattacacataacacatataggcccctccctgcgtgtatgcttgttgccgtcgtgtcgaatcttgtactacgaggctccgtcgaacctcgatggcttgcttctttatcagaacatgtttgaataaaaaaaaaaaaaaaaaaaaaaaaaaaaaaaaaaaaaaaaaaaaaaaggagggggttcagctacagcaagatcctcaaagatctcaagaaagagttctgctgcaatggtacagtggtccaggacccagaacttggacaggtcattcagctccagggtgatcagaggaagaacgtctcgaatttcctcgtcctggccggcattgtgaagaaggagcacatcaagattcatggtttctgagcaaccgccgggtccatagcaaaccaaccctgcatgcagggccagcttattatatataatatctgaggtggagcatatctatctggctgtgtactacaagcaggcctagtacgccgcctgcgcgttcctcctattacacataacacatatagccccctccctgcgtgtatgcttgttgccgccgtgtccaatctgtactacgaggctccgtcgaactcgatggcttgcttctttatag

SEQ ID NO: 91588 - DNA, 1210 bp, Zea mays
  unsure (1)..(1210): unsure at all n locations
  Clone ID: MRT4577_183525C.1
ctgtctccgttagaaggcgttctccttcaccacctaggaggcataggtcaccgatgcgtccttcacctaggaggggacgtggcagtccttcaccacgcaggcgctcccctgggcctcttaggcggcgctcgccacctccaaggcgtttgaggagcccaccaagaaggccaccacctccacgtcgctatagtcgatctcctcctcgccgaccccttcgctccagatcgatttctccaagaaggggacgagggcctctcttgaggcgtggtaggtcaggctcatcatattctcgatcacctactccaccgccaagaaaggggccaagaagggtatcaaggagtcgcagccctagaaggcctcccagaggaagaagcatctctagtgacagccgaagcagcagttctccttcccctagacgtggcaggtagaaggaacccgttgcattgtgtatccggcaggtaaagcctacggcaatgcttccagtggatctgcttaacatgcctggtgggctcactggcttgtgatttgtacccgagacagaattatctgcccatgtgacatctggctcatgtacttgattgtaccccaagtatcgcaagaaaggtttcatctactttgttggaaggagtttttcaacattcccattgtatntatgattccgttgatcaagcaatttgtgtatgcgcaggcgcacgcacagcgtacaccttttctaatctgaaaagagttgtcattttgccaaaccccgcncctgcttgttgccctgtcccatcagtcattggtttactgacgcgacgcaacgccgtttcctacaacatcctcatcgccgcctactctcgcgcgggcctacctggcgacattcgcgcgctaggaacggcaatgtagggtattgggcgtacccacgtgacggcagaaaaacatattgatgttcttctaagggctcagtccctttgggaccaagggtaatgaatggaattctgaggggatcaaaatcccttactatttaaaattgaatattgagggattatggtcctcttaatcccgttcattacacatacacttgctgtcgaagaagtggaatgttgggacttatgactcatctatttgtaaaattgtctcaaatagttaaatgacacaagattatatttgacatttctatgctcgtaattgaaggagagtaaaaaaaaaaaaaaaaaaggcccctagggcc

SEQ ID NO: 91589 - DNA, 299 bp, Zea mays
  unsure (1)..(299): unsure at all n locations
  Clone ID: MRT4577_183526C.1
cccgtcccgcccctcttgccatggcgaccgcgccgcggggggtgtgggggggctgcctcaggccctagctccagccggcgcgcgcggcctctcncccgnggaggctgtcggcgccgccgccgtcgctgtcgtgggccggccccccgctnngtgggtgccgggctcgggcctgaggtgcccgctggggctggtcgggggggggcctccgctcaaggttggtggccgcatcgccttttgtgccggggctgctgccggtgttgggcttggcctcccactcgggtgtctctgccttggtctgg

SEQ ID NO: 91590 - DNA, 482 bp, Zea mays
  Clone ID: MRT4577_183527C.1
ataaaaaaaaaaaaaaaaaaaaaaaaaaaaaaaaaaaaaaaaaaaaaaaaaaaaaaaaaaaaaaaaaaaaaaataaaaaaaaaaaatataaatcttattttttttccttcgttccgggccccctttgggggtttttttttggcatttttcggttccctttggggggccttttttggggtgtgcttttggggggtcctttttagccctttttgtggtttctttttccgtttttttgccccgtcctttttcggggaggcccttgggttccccctgttgttcccctttttggccgtcttcctttaattcccctttttcccagttggggtgattcgcaaaaaggccctttcctatagtttttcaaccttttttgcatcttgaagggcctttggccgccccttttagcggcgctttagccgcggttgttgtggggttttcccccacttttccccgctcctttggccccgctctatcccctttttttt

SEQ ID NO: 91591 - DNA, 890 bp, Zea mays
  unsure (1)..(890): unsure at all n locations
  Clone ID: MRT4577_183528C.1
ctgtgcggcgctcgaggcggccgttttcaaaactgcttcctttcccagcgagtgcaaggctggaaggcgagtagactctcagcagtcagcaccaccatcagtctcatctacgacaaaaacagatcttctgtcgccaggaatcagcaccaccatcgggtattcctggcttcctgcgctccctgcccgacggagctgcttccctgcttgctgcgcttgttccagagtctactccaccactgcgccgacctgtcgacaccagatccatgcgccctcgatttattttatttggtgttttctccactccgtagcggtctttatcagctgcttgccttctgcagagaaaaaaagaaaaaaaacagctttccatcgttcacccattctacatacatcctacatcttcatgttgttcatttcgctcacaaagtaagaggaagcacaaaccaatacaatttcatggccgacttggccctcgccggcttaaggtgggcagcatcgccgattgtcaacgagcttcttactaaagcttcagcttacctcagtgtggacatggtgcgtgagatccaacgactagaagccactgtcctgccacagttcgagctggtgattcaagcggcccagaagagcccccacaggggcatactggagggatggctccggcgtctcaaagaagcctactatgatgccgaggacttgttggacgagcatgagtacaatgtccttgagggcaaggccaagagcggaaaaagtctcctgttaggagagcatggaagctcctccactgcaactactgtcatgaagccttttcatgctgctctgagcagggcgcggaacttgctccctcaaacagaaggctacttagcaagatgaacgagctcnaagcaatcctgaca

SEQ ID NO: 91592 - DNA, 331 bp, Zea mays
  Clone ID: MRT4577_183529C.1
ttcctcggtcgacccacgcgtacgctctcccagaaggaacgaactggagagcacattaattcctctgtttatttatctatactgtatgtgaatcttgctcgggcggaacaaaaatttactgagccactccaccgtgccgcttctttttaaggggaactaagaaacctcttggaaccttcttatctttatatctaacttatgttgttgatctgctattctgcttccaaaaatgcatctgtttttcgaactttaaacatcttaccattcttttccatcattctacctccatatcatttttttacacggcacttgcttgtgtgcccttttcaac

SEQ ID NO: 91593 - DNA, 2666 bp, Zea mays
  Clone ID: MRT4577_18352C.1
ggagcggactcttgtcggtggtcgcgcgttcgagatggcatggacgaaggtgggaggcgtccaatgcatttcaaacggagagtgagtgtcagacatccccttccccgtttcaatcgcgaccacgcgctcgcagccgcaatcgactcgacccggcccgaccgagctccccgtgcccaacaaaccctcacaattaccagttccccatcgccgacgccgtacaccggagctcgaccgctccgcgtggtgtccgattctacttcgtcgaagactacaagcggcctcctagagttccacctcaactgcgcaggggaagggaggctcccaacgcatccccgccgacctcaacgccgacggtcctttcctaacccgcagccgccggccgcagtctctctcttccggtccagtgggggctgctatcttccaggaatattggagatgtgccttcaacactctagggctcgattgtctccagatgagcaacttgctgcagaaaaaagttttgccttgtattgcaagccagttgaattgtacaatattatccagaggcgagctattaaaaatccaccttttgttcaaagatcccttctttataagatacaggcaaggagaaaaaagaggattcagataactgtatcactttctgcaagtacaaatacacaagcacagaatatctttcccctttatgtacttttagctagacctaccagtaatatttcgcttgaggggcattctccgatatatcgattcagtagggcttgtttgcttacaaattttagtgaatttggaaataaagacaaaactgaagccacattcatcatccctgatgtgaagaatttatcaacctcccgtgcttgcaaccttaacattatatttattagccgtgggcaagtaggacaaattattggtgaagatagctgttccgggaatgatgtggaaggatcttccctccaaaagcttgaagggaaatgttcctggggtaaaatgccgactaatttacttgcgccctctttggagaaatgtgtgactttaagtacaggaaatgctgtggatttgacttctacagttacaatgaacccaagcttcttagagccaaaatttctggaacaagacagttgcttgacattttgctctcataaggttgatgctacgggttcataccaattacaagtatgcatatccgcagaagaggctggcgcaagagaattacttttatctccttattattgcaattactcatataataatgtcccaccttctctattaccagaaatcataaggttgagagctggaaatgtactttttaattacaagtactacaacaatacaatgcaaaagactgaagttactgaagatttttcctgcccattttgcttggtaccatgtggaagcttcaagggcctaggatgccacttaaattcatcacatgacctgttccactatgagttgtggatatctgaagagtgccaggctgtgaatgttagtctgaaggctgatgcctggaaaactgagtttgtggcagagggagttgatccaaggcatcaaacattttcctactgctcgaggtttaagaagcgtagaaggttggaaaccacagctgagaaaatcaggcatgttcactcacatattatggaatcaggttcacctgaagatgcccaggcagggtctgaagatgactatgtgcaaggggagaatgggctttctgtagcaaatgcttcagttgatcctagtcaatctttacatgggagcaatctttcaccaccaacagtgctacagtttggaaagtcaaggaaactatctgccgagagatctgaccccagaaaccgacaactgttgcaaaagcgtcagttcttccattcacacaggggacttcgttgtagccaatgccattggaacaagtcctctcagatcatgatagcgaagacgaggttgatgatgacattgccgactttgaggatagacggatgctcgacgattttgttgatgttacaaaagatgagaagcttattatgcatatgtggaattcatttgttcgaaagcaaagggtgctagccgatggtcatataccgtgggcatgcgaggcgttctccagatgccatggacaacagcttgtacaaaaccctgccctgctgtggggctggcgtttcttcatgattaaactctggaaccacagccttcttgacgcccgcgccatgaatgcttgcaacacaattcttcaaggctaccaagacggaagtgcggaccccaagtaaatctacaatccagagaaatcgttggccagcgtgtgtaagatctgccggttccggcggttatttctgaaccccaaaacagctatgtgaagaactggaatggggccatagcggcatttgttttaaggtttagggttactccatttttccaagggaggaaactaatttcccttggaaaaatgaaaatccattgggaaaaatgagtttcccaaactagccattaaaagggtagcttcctcccacctagggggaaaaaaactaggagggaaaagctggatccttggccgagacaatcatcattgcttcattcgtgattcggttgtatttatcggtaccagttgttgttggcatgtggagtttgtatggatgataatgataaatgaagtgattcactgcagcccttaaaaaaaaaaagcggcc

SEQ ID NO: 91594 - DNA, 270 bp, Zea mays
  Clone ID: MRT4577_183530C.1
cacacgggcgctgcgcacagacacttcaatctgttgcaccaatggcttactaccaggaggtggactactgctcggaggaggtgaggtcgttgtcccctgccggcttctgtcgtcacagtttcggctttcagcactacgttttcaatgagaagttcgaggaggtcgacacggtcttacgcgccggtgccaaccaccacctccaccatggtcaccacggctgtcacggttttctggtgcgccgagaccaggttctaataggacattaacacc

SEQ ID NO: 91595 - DNA, 302 bp, Zea mays
  Clone ID: MRT4577_183531C.1
atcggtttctcaactgatgagggacggggggtctctaagtggattgatacgggatctatgtcgattgatcgggcagaggctcaatgtacgaccattacgaaggagatcacatgcagaattaggatgacatgggaggaccgtaaaccgctgaaggacctggagatgaaggtagcaactacgcagatcatggtggtgcccttatagatcctgtggacctcgatctggcacaccgacatactcttctggaacgccaaagagcaaactacatgactaactacgatctttcgcccatactgtggacg

SEQ ID NO: 91596 - DNA, 396 bp, Zea mays
  Clone ID: MRT4577_183532C.1
atttcggttgggggcctggggccccacaaacgggtttccgaaaacggttgaaagaaagagttcccgggccctgtgggttagggctccaattgaaactgtactgagtaatggagtttctccctgaagtgctagtactaatacctaaagtgatggaagaaagacttaacttgcgtcgcgctagttgtttaaacacaacataggaatctgatgttccgactttaaatgggccactgaaaagaaacaaactacgcttgaatctacaaagaaatgtagcgctgcaggctttacttagatctcgtccacgacgtgttataattcgtcaccggttcctattgacgtacaacattcatctgaatggctccaaagtagatctctgctaaaaaccggtgagaacta

SEQ ID NO: 91597 - DNA, 519 bp, Zea mays
  Clone ID: MRT4577_183533C.1
ggggaccattttttaatttcattgggcaaaaaatggtgggaacaaaaaccctggtcaatttttttttggctcggttcatagggggggccacccaagggaacaacaggggtcccacccctaatccaaagggggaacgggcccttaccccggggccgaagccaacgggaaccccattcttttgattggaaaaaaaacccgggccaaacccggatgggcccacacattaatcccttcaagccgcggcggcacccgcggcgtaagcggcaacggcacccttgggccaaacccggaaccggcaaccgcttcgtaagccgcggcggcaacttttggcccaaccgcgtaacccccaaccgcggcataacccgcggtacggggccccgcaacataaaccgcggcggcggcgggaacggcggcgtaaacaacggcggcaccggcaacggcaagggaatgggcccgggtaaccgggaagttaccggccgtgagctccttggccgtcatgttttccaaagcggccaacat

SEQ ID NO: 91598 - DNA, 350 bp, Zea mays
  Clone ID: MRT4577_183534C.1
gccattttatcaattagttctcaaggtgccatcttccaaaaatggtcgctgtctaccgtcaacaacatcggtagaactcaggtgtttgacctcggttccactccgagcggtctatcctgtccttctcccatccttggtaactaccaaactgggtggagtacggatggacagtgttctgtcaggctgtgtggtttgacggacccttgcgagagcagagctcaattattccacaatgcacctaccaatggttttgatggagaggtttgctctactgtagtgacatctccagaaactgctattggagcttgcaatcctgcaggtggtcagtggttgaaacatccttgggtttg

SEQ ID NO: 91599 - DNA, 305 bp, Zea mays
  Clone ID: MRT4577_183535C.1
acggcttctttaagcctgcggttaggggggcataacctcaaccggagaagacggccgagggctacgagctacgtaatcaaggtccggctagccacggattcaaggtccttgacagcgctcatttcccatccgcgtactagggggtgaggacgcatctgacaccgggacctaccaagcattgagacaagcgccgccaaaaggaagctctggcacctgttgactcaagcccaaggcccactggcgggctccactctgccatttacacacactgccgattaggctggtttaaggaggaaagggagtgg

SEQ ID NO: 91600 - DNA, 337 bp, Zea mays
  Clone ID: MRT4577_183536C.1
gggggggggggggggggccgggcggggggagggtaacgaggattagagtataaattaccaagactggcaaccgaataaaggtggatatagcggggtgactgtaaaaactagaaattgcatgcgagcacaaagcactaaagatacgggcggcgtgtaaatgaaaagagaatacggataattcaagtcgctcctttaaagggcagtacaagggtgtacggtaccccccatgcatggttgtgaccgcaattatcctctgtcgtagtggtcggcggctttggcccctggccctgttcagtcgtttgtccctgtccctgctctttaggccttataccctgat

SEQ ID NO: 91601 - DNA, 583 bp, Zea mays
  Clone ID: MRT4577_183537C.1
acttcacacccagcgactccgagctcgatccctctccctctcatcgagagaatcctctcatctcacccacctgtcccgccactttgttcaggaggaagacagaagagaccaaatgggagaaagcgatccttggatccagtggatgtgaaagacactatctcgtatatctgccgctcacatcattacatccttctgtagacaccatgatatctatctgtgatatgctagtcacgctgactataagtacttgcctatgtgtgatgagatggatagcatgagcgaggctagaatatattcgtcacgagtgatatgcttgatgtttatcacggctgaccaaggtgtgatgagaacgcctgacgtgactgcacattgagatgcattgcaccaggacgagactagacgaagacatgtagaactggcgcacactgtgccatcaactggtcagtactaccaggaagaaactgctcctactgtgacatgtgctgcatgtgctgcagtggcagcaatcgcatagattgcgaaactgtcagaaggaaactgttacaaatctgagcagctagagataccacagatctgggcacta

SEQ ID NO: 91602 - DNA, 762 bp, Zea mays
  Clone ID: MRT4577_183538C.1
cattgggtacctcgaggccggccggggcgcaacacgaggatccaatcgaaccaccagtccaccacctgattgactagagcaaaagcacaagccgcccacgcatctcgattgcagcagcagcagaagcggcgcgcagagctcgtgacgagagcaaccttccttccgttcctcgatcgccatggacaaggtgctggccttctcgatcctgagcgcgtcgccggccgacctctcctccacgggcgccggcttcggcgggagctgggcgcggctgtcgtggcggcggggcgcggacgaccagcgtgcgccgcggcgggagcagcagaagcagcagcaggaggaggacagggagaagcgagacttgcgctcccgcgacggcggagcgcacgcgagcggagggggagcggcggcggcgccaccgcggttcgcgccggagtttgacggcatcgactggttcggaaccatcgtgtcgcgctgatcaacaatccgggctcggccgacgcgccccccgagttaaccacgtgaccaatcctgtctactatgttttttttaccttatggtggattaattgtcccaacacagataattgggactccgcgtgttgtacatacagggaactgctcaattaccaggtgggatggggaacatttatttgttcctgtcctctgcattttttttctgtaccgaaatggatggatggtctccaattcgaaaaaaaaaaaaaaaaccccaggtaatctggcggtggatgaacccaagccgaac

SEQ ID NO: 91603 - DNA, 295 bp, Zea mays
  Clone ID: MRT4577_183539C.1
tagactgttcaatgcttgtcatggatgatgcatactttctattagctccatagttccatccgtctgtggaatcacttatgtgaggtccttccacctattctgcatctttttatgttatcatcatcctctcctgtaactttcattgaattcatagataaatatactcctataccttattttattaatctaatgtatttactttttcttttttttttcacactttttttttctttttttaataaatgcattaatttcattgtctgaatactctttttttataactttaattttattc

SEQ ID NO: 91604 - DNA, 340 bp, Zea mays
  Clone ID: MRT4577_18353C.1
ccatggaccctggcctcgtgtgcaacatgacggtcatgggctacgtgccggagctgtgggggctcaactacaaggacgatcaggtgaacaggatcatctacccggagcatacggtgtcgttcgcgaagctgtcaaggatcaaaaaggacgacctcatcgagacgtccatcaacgtcatcctcaagcagccgcccttcatcgcgacggcgaaccggtctgtcgcgaacgtcagggctgtgagctcggcgtagaccgtggtggtgtacgtccatgcgacggtgacagtggcagtgaccccgtcgaagaagatgttcagagtgtccaaataggtcgggtactc

SEQ ID NO: 91605 - DNA, 294 bp, Zea mays
  Clone ID: MRT4577_183540C.1
acggccactcgtacgctcactcttgcactgaccattggtcatgggctcgtcgtagagggtggcgtgtgattgaatgcatcctaacaacgacactaacgctcactttaatcaagtatgagtctccattcactgagattgagcgtgctcgttgcgataaacaccacccatgcttcgaacagcatttaacacgtcttgcttatataattttattggaccactatgtccaataatgacgtgattatacaccagatcatgattggtattcatactattctctaagccgaaacaatatat

SEQ ID NO: 91606 - DNA, 700 bp, Zea mays
  Clone ID: MRT4577_183541C.1
gaggttcagccgggacctctcttgcctctcccacgcccacgccaccccaccgcacgaagagagcgagcgcacgaacgggggagacatggcccactcgccgtcaggatcgcacgtagcggcgacgtcggtcgggaacgaggccttcaccgacgcggtggctgaggacggcggagactccaagctctccgcgctcctcttcgacgtgtcgcagcaggtgcaggacggtctccagagcatgctcaagacgagcagcgagatcgcgcggtgcgacggcgagatcgacgcggagctggagcgcgcgagggatgccgtggcggagaatgcccgagcgctgcacgacgaacgggagagagtccagaaggccgccctcgccgcgctcgacatcctcagcggcggccgttgcgtcatctgaagggatgcccgccgcatgccggcgccaccgacagtctgcccccgacctcagatcacgctcgattctcgcaagattcctgctccatttgtgaatgtcaccgtcggtgttacccttttgcagtagtagtaatattcgcactgatgctggcattactagtaacttgttgcctgttgaactgcaataatagagtttagaatttgagatgtgcacgatatgatcgatggagattggtctggactagtgcagaaatgacccataaatggtgacgttgagggtgtttaaggaact

SEQ ID NO: 91607 - DNA, 627 bp, Zea mays
  Clone ID: MRT4577_183542C.1
cattgggtacctcgaggccggccgggattttgtgtcacctgctccagcgatgccaccacgtcaatctatatcaacaagcttcatggattgactatggtcatcaaggcatgtactggcggcacccatctcatgtagtacgtccgtttacttaagaggatattttgtacttggatccgcctcttgagtatgatcgcgaggcgcatcctcgttggtccttcttccatctcctgtggcgcttgctggtgtttcccacactatgtccttctcatctgcggagttatcatgcttatgaacttgcacctcaaacctgaacaatattgtattgattattacgacatctccttactaggcacaaaattgatggaagctttgcgattgccaaatttgtcatcataaaaacctcacttctctcaatgtctatagaggcttctggttaccggatttggatgcacatatatcaaggcccagtgcttctcactatcaggttttacaataagctgattctcccatgaattctcttcttgagaagacttgtaatctgctacacaactttcctgaatatatggatgttatgagtcaatgaatgctaagatgactgatggccgacactgccttgatgctttctct

SEQ ID NO: 91608 - DNA, 793 bp, Zea mays
  Clone ID: MRT4577_183543C.1
gggcacacctctcttgcctcccacgcccacgccaccccaccgcacgaagagagcgagcgcacgaacgggggaggcatggcccactcgccgtcaggatcgcacgtagcggcgacgtcggtcgggaacgaggccttcaccgacgcggtggctgaggacggcggagactccaagctctccgtgctcctcttcggtacgaccacaccccccgcggttcgcttctgcagtttgcttgacgtgtcgcagcaggtgcaggacggtctccagagcatgctcaagacgagcagcgagatcgcgcggtgcgacggcgagatcgacgcggagctggagcgcgcgagggatgccgtggcggagaatgcccgagcgctgcacgacgaacgggagagagtccagaaggccgccctcgccgcgctcgacatcctcagcggcggccgttgcgtcatctgaagggacgcccgccgcgtgccggcgcccccgacagtctgcccccgacctcagatcacgctcgattctcgcaagattcctgctccatttgtgaatgtccccgtcggtgttacccttttgcagtagtagtaatattcgcactgatgctggcattactagtaacttgttgcctgttgaactgccataatagagtttagaatttgagatgtgcacgatatgatcgatggagattggtctggactagtgcagaaatgacccataatgggtgacgttgaagggtgtttaaggaactaaaactgttgattaaggggtctggtttgattatagaagctaaagtaaaagtggctaaagc

SEQ ID NO: 91609 - DNA, 450 bp, Zea mays
  Clone ID: MRT4577_183544C.1
aaaacaaaaatggttttttttttggttttacccccccaggccgacccccctgcaaaaagcccggggggcgggaacgagttttaccctttttcccccgggaaccaaatagggggggattaacaaaaccaaggggcttggggggcaaagcaacaaaattctggaggggtttcccccccgggccagttggaaaatcctcctaattaaattggggaacccgaaaaaaagggaaaaaaaaaaagccggccggaacccgaaaaaaaaaaagggggtccctttctcgttttggaaccgaattggacgggcctccccggaggaaccagcccaaaggctttggcccgtggaatgggattaaaaataattacttttggccaaaatcggcccggaagggccccctcaatcccagttttttggcataattaacctcccccacacccttaagaaagttttggg

SEQ ID NO: 91610 - DNA, 294 bp, Zea mays
  Clone ID: MRT4577_183545C.1
attattcatggccggacgcttgatgttgtctagaactccatgtgcagctcgcatactgggacacgaggctctccgacaagggtgaacgggctggagctgatcgagatcgagatatccgatgatgagtacggttgcttggtaaggagtctgaacagggacactgacacacactctttctacatcgtgagcagaacctactggaaagggcatgactgcaggaggatcacttacaggtacactctaaggtacgcaggatactacttcgaggcgagcaccactgctgacgcgaggcac

SEQ ID NO: 91611 - DNA, 295 bp, Zea mays
  Clone ID: MRT4577_183546C.1
caaaaagctagacgcgatgcactcgtactaactcgaatcgctcgggggaaatcaaacaagcacacggcggggcggatggcgtttacacaccaccaccaccacgcatccgcggacgcccggcgccggggaccagctggaggaataaggagcagaccgtgctgcccatccacgtcgccgatatgaagcaatctgcgccaacccaatctcaagggccaagagacatgcagagtgcgtgtcagttcatacttctcacggcgagcctcgacaggccacagggaacgcagacctaacgcga

SEQ ID NO: 91612 - DNA, 650 bp, Zea mays
  Clone ID: MRT4577_183547C.1
attcaaaaataaataaaggcttgtctttgccaatgaaaaaataaaaaaaaaaaagataaaaaaaaaaaaaaaaaaaaaaaaaaaaaaaaaaaaaaaaaaaatttaccgcagcagcagcagggcggcagtaaaggctcgtcgtcgtccctgagcctgataactatcgggttcggcatcgtgttccccaccgtggcggccgggctcttctccttcctgttctacgcgctcaggaggcgccggccgcagcacgtcaagaaaagcaccagcagcagctggttcaagttgccggcgatgttgtcgtcgtcctccgccccgtccgacagcgagggcctcgacgaggacgtgctcatcccgggcctgccgacccggttcacgtacgccgacctggacgctgcgacggacggcttcaagtggcaaatcggctccggcgggttcggctccgtgttccgcggcaagttccccgaccggagccccgtggcggagaagcggatgaacgggctgggaacccagggccggcgcgagttcctgacggagatcgccttgatcggcaacgtccatcacgtgaacctggtgaagctccgtgggttctgcgccgagggcacggggcgaaaattgctggtgtacgagtatatgaaccgggtctccctgga

SEQ ID NO: 91613 - DNA, 382 bp, Zea mays
  Clone ID: MRT4577_183548C.1
attacaaatctgcaagtagtatatgaatcgtttacagagttaccttacacaaaacatgtgtgcacaccaccatcgtattttgtcgagtaggtacggcagtgtacagtaggaaaacagcacacgtattacgtatagtatggtgtccgtgctccatgacgttttactatctacgtacgtttgtacatcgtattattgtgatgtatcctggtgggctactgtttattcggtgccgtgcatgcgtacaccgtacacatgcatatgcatgcggctcggtcggctagagctcggcggtgaggcctttcacctcgagctgaaacttctccatggcgtccttgggcaggcagatgggcacgacggtgccctccttccccttggcgttctt

SEQ ID NO: 91614 - DNA, 276 bp, Zea mays
  Clone ID: MRT4577_183549C.1
atccaagacagatgaaaggcccagagtttgcagcaactagcagtgggtacacgaaggaggttgatgccacgctcaaagtgctatctgcgtcgatggtgtcctttattaggaattggcctgtgattgaaggccattcgccgggaacgctgtgggctcagcgtgtgcttcggacacattgccaggttacagagtgcttggaaacacgtggcgtgagtgactctcaaggcgtggaaagactggactggaccagaggatctgtccatagactccaaggag

SEQ ID NO: 91615 - DNA, 1217 bp, Zea mays
  Clone ID: MRT4577_18354C.1
ccacgcgtccggaagatttctcttgtccattttgctatgtacgatgtggaagcttcaagggtctaggatgccatttaaactcatcacatgatctattccactatgagttttggatatctgaagagtaccaggttgttaatgttagtctgaaggctgatgcttggagaacagagctttttgcggagggcgttgatccaaggcatcaaacattttcttatcgctcaaggtttaagaagcgtagacgatcaaagaacacaatggagaaaatcaggcatgtacactcacatattatggaatcaggttcacctgaagatgaggcaggatctgaggacaactttgtgcaaggggagaatgggacttctgtagcaaatgcttcgattgatcctgctcaatctttacatggcagcaatctttcaccaccaacagtactacagtttgggaagacaaggaagctatctgagagatctgaccctagaaatcggcaactcctgcaaaaacgacagttcttccattctcacagcgcagccaatgcaactggagcaagtgttctcggaccgtgatagtgaagatgaagttgatgatgatattgctgacttcgaggatagaagaatgcttgatgattttgttgatgttacgaaagatgaaaaacttattatgcatatgtggaattcatttgttcgaaaacaaagagtgttagctgatggtcatataccttgggcctgcgaggcattctcccagttgcatggacgacaacttatacaaaatcctgctctgctgtggggttggcgtttcttcatgattaaactttggaaccataacattttagatgcccgcactatgaacacatgcaatacagtccttcaaattttacaagaagaaagcacaggactaaagtaattttgatgcttctgatgaaaattcaagggaagaagatttctttaccatttccaagaagaaagcatagaattggagtaactttttattgataatttcattcatatctattgtcaattgtattaatggtttttaaaagagacaaatcatgtctaactctcacgctgtaatattctaagtcgtacgtgaatttgatgaatattcattgttgttttaaaaaaaaaaaaaaaaaaaaaaaaaaaaaaaaaaaaaaaaaaaaaaaaaaaggcccctagggcaaaaaaaaaaaaaaaaaagaaggggccgagggcgaaggattcaaa

SEQ ID NO: 91616 - DNA, 252 bp, Zea mays
  Clone ID: MRT4577_183550C.1
cgggctgggggaaccgagctagggcacaacagtctcggtgacgtcgtgctacctgtgatcaaccaagtaggtgtggcaaaacctttatccctcctatcagcagaaccagtttctttctttcaccagctgtctacatggatccctggcgctttattagcaaggggggggggttacccttttagccagcttagctgctggctactctcagcaaccacaacctcttcctctaagcaattgggccagcttggatcc

SEQ ID NO: 91617 - DNA, 883 bp, Zea mays
  Clone ID: MRT4577_183551C.1
attcggctcgagccccagcctgcatagcgcgggcaagagtcaggtgtcggcgctgctcctgaggtgcctctttagggtgtccgggccgggcaaggccaagaagttccagcagatcctggtgctgatggggaggcggtgggtgttcatgcagacggaggcgagccgcgttctcggcatggacctggaccgcggggacaacacgcacaccttcatacgctcggactcgccgccactgctcacccggaacagcatcaaccagagtccgaagttgctccaccccgtgcctcagccctgtctccaaggacttcgagcacaaggactgcagcggcctggtagagatgctctgctgctccatcagttgtgcctagaaaaagaggcaccaccaactagaaattgttctatgtggaagcagcaagttgttgtctcatggccacatgcccacatggtcactgctgttggtttccacaacggttatccagggggcaaggtgttcgtttctgcggaacagtctgttccaaatttggcagttaggtcatggagattactctgcctcacgcacaaaagtatttcgcatggtgaatactcttggagtcaacaatgaagccaagcaaacaatacaagtactgcaagctgaactaaatgaaacaaaagagaggctgcacacagttgaagaactgaaaggacaaactgcacattatttgtattgttcatgaccctatggatttctgttttaatttatttccatatgtagaaagttgtttactacttctgtttactgtaatctacaatgtatttgcgtcgctatggtaattccttgtagttataatcgggctttgatcatgatacataaaaaaaaaaagatatgttggttcgagtttggtcg

SEQ ID NO: 91618 - DNA, 587 bp, Zea mays
  unsure (1)..(587): unsure at all n locations
  Clone ID: MRT4577_183552C.1
gtcgcatggcaaacgcgtnaacgtaaagnnncttggaatncctnctaagaagcggcacgccactttttttatttttttttttttttttttttttttttttttttttttttttttttttttttttttttaatttttttttttaattatttttttttttttttatttttttttttttttggtttttggtttttttttttttaaaaattttttggtcggggggggggtgggggggggcgaccggaaaacggcggggggcccccagaaggcgaaacaggggggggggggaggaggaagaaaaaaggggggcagaaggaggaaaaggggtgccggtgggggggtaaaattacccccaggtgccaacccggaaaaaattaggcgggggggtaaagagaaaaaggggggatgcaaaaaaaagaaagcggcgcgtaataaagagggggtgcccaaggggggccgcgggggggacaaaccgcctgagccggcggaaaacgtgcggccccaaccccgtgggaaaaaggggggggccaagggggcggtggggaccgcgtaaaaccccggaaggggggggcccctcaacagggggcccc

SEQ ID NO: 91619 - DNA, 474 bp, Zea mays
  Clone ID: MRT4577_183553C.1
gggcccgaaagcagccatggcttgtgcagtccttggctgtttgatgtaaaccacagctggggagcttggttggggtcacgtgctgggctgttctatatgcatggtacttgagttattctgcactactacttacgttactaaattggagccttggagtctggagcaaaaaaaaagtggctgtattctcaaggaacatgagaccaccgagctctggagtgaatgaagggcgtcgtctttggaagttagacatcacctagagctagggtgtccagtcttggtaggaattagacatgtttctcctaggaagagagtcttgagattgatggacgcatgcatcttcaattcctgtgtattgtattactactcgtacaatctgtaatgttacactgatgatgaattgatgatggctgatgagcaaacaccagacagctctgtcgaagcctgttgctgacggttcaacatttcagcaacatc

SEQ ID NO: 91620 - DNA, 324 bp, Zea mays
  Clone ID: MRT4577_183554C.1
aattcggcacgagggactcacttacattccacaccgccagctcaacagacatggcccaactgggcggccttgactctcgaggcacccgcctcgggctccctcctgctggaggacccgggacaccggattggaggcctcgtgcgctactctgcacccgggttgccgggcgcgctcctcgggcgtgacacacgcccgcagcgccaggatcacgcggaccacgcccggggccttctgcgctgctgcggtcaggctgtacctcggggcttacctatgcgggaaccagcgcgtagacttttaaacttctcctcccccgagggtagtgac

SEQ ID NO: 91621 - DNA, 362 bp, Zea mays
  Clone ID: MRT4577_183555C.1
attcaaggagggggggggcaagcccaaacaaacctttctttaaacgcacgcgaggaaaacaaacctttccatcccgccggttgatcgttattgaaaaccaaccaacaaacattgctagcaaaacggactttcctaccaaccaacaaaaggacgggcatcgggcttcctttttttttacgggcggcaatcaaaaaaaaaatgggagggcaagcccccgcgcaccctttttttttggtaggacaaacaagctaacagcctgcttatgagggtggttttgatggacggggttgagtgagtcccacccacccgtggacggacgggtggatccgccaattaattaccggcccctgcctgcaggccaa

SEQ ID NO: 91622 - DNA, 382 bp, Zea mays
  unsure (1)..(382): unsure at all n locations
  Clone ID: MRT4577_183556C.1
tttttctttttttttttttttttttttttttttttttttttttttttttttaacaaacaaatcgggtttatggttcccacaaaaatattcgggggaaaaccctcaaaagggcccaaaaggccattatggccctaaggggcccaatggtataccaaaaaataaaccttatgccccaaacccctgaaaaccatcacccgcttaaaaaaacaccaaaatgggctatggggaaatcattgcaacaaaacccacacggaacgctcaatgaccaaaggcaggaagaaacccaggggccccatcttaccgcctctgatgatgcaaaaaancaaccccccgggctaaattgaggattngagggganaaaaanaaaangccccctacaaaa

SEQ ID NO: 91623 - DNA, 985 bp, Zea mays
  unsure (1)..(985): unsure at all n locations
  Clone ID: MRT4577_183557C.1
gggtgggtgggggggggggggggggggggggggggggggggnggggggggngggggnggggggggggnnnggggggggggggggggggggnnggggggggngggggggggggggggggggggaggggggggggtgttgttgacacgtgttagttacgggactctggacagacgccgaaaccggcacgggggtgatggcgctcggtggagccgcgcaagccaggagtttgaccaggtggaagtgctggacctgttgagagaccatgtggtgggagagactgatggcgggcaagcagggtggtggtggggttaccaggcagaggagtgagctaggcacgaggggtggtggtgagaagagtggggggttgcttgacgggcgggggcttggaggggggggcacggtgggggtgggggggggtgttgggtggggtgggtgggggggtgggggggtggggggggggggtggggtggcggaggggagggtggggggggggggggggggggggggggggggggggacgggggggggggggggggggtggggggggggggggggggggggtggggggggagggggggtggggggggggggggcgggggggggtgggggggggggggggggtggggcgggggggggggggggggggggggggggggggggtgggtcgggggggggggggggggggggggggggggggggggggcgggggggggggggggggggggggggggggggggggggggggggggggggggggggtgggggggggggggtggggggtggggaagggggggggggggggggggggggggggggggggggggggggggggggggagcgggggggggggggggggtgggggggggggggtgggggggaggggggggaggggggggcggctgggggggggagggggatgggcgggggggggngggnnngggggggggggggggggggggggggggggggggttgggggagggggg

SEQ ID NO: 91624 - DNA, 373 bp, Zea mays
  Clone ID: MRT4577_183558C.1
gggtggttgtttttttttttttttttttttttttttgggaagacagaaaaccagttttagacgttttatccatttattccagctacaaaatccgaaacaaagccctatttattttttttttccggtgggaatttgagacaggtttatggacacggtttaaatcccagctaaagggcgctactgggggtcctaaaaccggttatccccccgatgctccagctggtgccttggggtccttttcgtcttggccttggtcctccttcgggaatacctggatcagctcccggtgtttagacgaaaaattttcggggagggtgacattgaaagggacattttgaactccgtagtacggagggttttttggcttgacccc

SEQ ID NO: 91625 - DNA, 1473 bp, Zea mays
  Clone ID: MRT4577_183559C.1
attgggtacctcgaggccggccgggatactacgtctctgcagaagcttcctagggttttttaggcgtcgcagataagagatcccctcactgcattccctctgagcgccgccactccctgacatcgagaccggctgcccgaccccggtccggcgatccctctgcacccctttctttgcgctgccagccccaatctctcgcatccctgtcaaccatggcggcgtcagcaggcggaggcgcggtgcgcgcgctgtcccagaaggagcaggacatacagatgatgctcgcggccgacgtccacctcggcaccaagaactgcgatttccagatggagcggtatgtctttaagcgtcgcaccgacggcatctacatcatcaacctgggcaagacatgggataagctccagctcgcggcgagggttattgttgccattgagaacccacaagacatcatcgtccagtcggcccgcccctacggccagcgtgctgtcctcaagttcgcgcagtacactggcgcccatgccatcgctgggaggcacacccctggtaccttcaccaatcagctccagacctctttcagcgagcctcgcctgctcatccttactgacccaaggactgaccatcagccaatcaaggagtctgctctagggaacatcccgaccattgccttctgcgacactgactctcccatgcggtatgtcgatatcggcatccctgccaacaacaaggggaggaacaacattggatgcctgttctggcttttggccaggatggttctgcagatgaggggcactatcctctctgggcacaagtgggaagtaatggttgatctgttcttctacagagacccagaggaagcaaaggagcaggaggaggaagctgctgcggcccctgagtttgctgcagtcactgattaccaaggagctgatcagtggggtggtgaccagtggacctctgatgtggctgcaccacctgttgctcctactggtgctgattggggtgctgcaccagctccggttcctaccggtgatggctgggatcaaactgtggcccctgttcctgtggatggcactgttcctccagtggtcgctcctactggttgggaatcagcagcccagcccactgcccaaggctgggaataggcgttgaggcatcactttgagacgtcttgtgcgggattattccaaagtatgaatgcccgaagtcagacgacatattttgtagctaatttgctatgctttgtgcacttatgtttttagggctttctagttgaaccggtgcccctgttctgtttttaaaattgatgctatgaaagagcctatgaagtataagtactagcccctttgttttctgtcgaccgcattccatggtttggttcgaaccgttcgatgtcgtagttctatatgataatacattcagttgattttgatatatggatattaatattatttgtcaaaaaaaaaaaaaaaaaaactc

SEQ ID NO: 91626 - DNA, 2569 bp, Zea mays
  Clone ID: MRT4577_18355C.1
cgcggcgaggccgcggggcgcccgcgcccaaacgccaaaaccctagctccccacccacccaccccaagcaccgcggggccgccgcgcgctcgcccacggtcgccacggatgcgcgcggcccgctcgcggacctcgacgacaccccgctcgcttgccgcggctgttccgccatggacgagcccgagaaagtgaggggcagggaggatgcggcgtcgggccgcgaggatggcggcgactcagacacacgagacaagtaagctgtccaacacaacttcctacagacagcttccaggacatagcactgagtcagcgaacctgctggctctggctctggcgctggcgctgggccagtgctggcgttttcccggattcaagagccgcgccggcgcacgggggccaaggccaaggtgcctttccacgatccaagcattccccggccgcaggacgtatacaaaatcagagtggataactacaagccattcgagcatgtctggctggagcgcagcgaagacggcacccgacgtgttcacccgctggaaaacctgcctgttgaacagttcgttgacagaaatgttcctgacagagaaccagtgaagccagctgatttagaggatacaccatttacgctggttcaagatcacaaaggcttaacagaattagctaagaagttgaagagcgtaactgaatttgctgtagatctggagcataatcaatataggtcatttcagggcttgacctgcttgatgcagatttcaacaagaacagaagactttattgtggacactcttaagctacgcatatacattggtctctatttgcaagagcctttcaaagatccaacaaagagaaaggtaatgcatggtgcggatcgtgatataatgtggctccagcgggacttccacatctatgtgtgcaatctttttgacacaggacaggcttcaagggtcttacagatggagagaaacagccttgagcacctattgcttcatttttgtggagtaacagcaaagaaggagtatcaaaatgcagactggaggtcgagaccacttcctgatgaaatgatcaagtatgctagagaagatacacactatctgttgtacatatatgatttaatgagacagagactacagagggagtcaacatttgaaaatgatcttcttctagaggtccataagcgcagtaatgaaatttgcttacagttctatgagaaggagcttctgacagatacatcctatctccacatatacgggttgcaggaacatgaactggatgcaagacagctggctgttgttgctgctctacatgagtggagagatcgtatagctcgtcaggaagatgagagtactggttatatactgccaaataaggctttaattgagatagcaaagcagatgcctacagatgttggacatttgaaaagaattgtgaaatcaaaatatccatatgttgagagcaatcttgagctaattgcttacactgtctggaatgcacttgagtattcttatgccttcgaaggaatagctgagcaactaaagaaggaacggctggaacaggtggcactgaaaagtggtcagaccagtgatgaagtgactcctttggatgctgacattgataggagtaattttgattcatctgatcagtctgcaaatgtcaatgttgcttctggtagtagggctggttttatgagtgaagcagctttgatcagcagcatccacctagaggacaaaactcaaaccatgtcctcagttaagacctctcagaccttgctaggccagatcagaccagtgaataaggatgtcctgagcaataatatacatcagcaggctattcaggacctgagtctcactttaaaagctctaaaaggaaacttggcatctggaggagagtcaaatgagcaggctgggatcaacgtggagaactttagatcttctgtatttccttcccggcagttgtctggtgaggtaaaaccattttatccaaatcctggaatgcacagtgagaatgtttggattcaaacaactcagacaaacgagacaatgaagctgtgcaacacaacttactacagacagcttccaggacatagcactgagtcaataaaccaaagaagtacaggaagtttccagagttcggtgagacgtcaatctttcccaccttcaagttacaagaaatgagattcataccagtagccgtcctgatgtatagcagaaagggagaaaaagatgaacccctgtcattgatccttgttgtgctagtgcacatattgactgtagagaacaaagacttggggctgttttacttgccctctgaatgcctctttggatttttggcattcggttaactgaaaggtgaggaacccaatattgactgtaggtgcagggtatcggaagtgccatctcattgcccattggctcatggaatgggtggatgggactaacaaacatgttctggttcaatgatgaatactggaatcgcacaggaaaaatatactgtgacattgcgacagtgcaacacctaaatacaaagacttggaaacaaacaacttgctttgttctgttctttttccctcgat

SEQ ID NO: 91627 - DNA, 331 bp, Zea mays
  Clone ID: MRT4577_183560C.1
caggccctttgacgctttcacaggaagaccgggggccatccagagatacctgaacctcgcgagagctatcagctattgctagcggcatcctgctaccacgagtctgctgcccatgccgactgcgatatagctcctggctcaaccaggagatctaccacactgcgcgggctgaggccgcgagcggtccccgacgagcttagatcctggacagccgggattacgtcccatgccgttgcgatgggctagctcagcgggcggtgccccatcgcctggtacgccttggtagaagtgcctgggacacaggcccaacaatgccacctgtgacttgacg

SEQ ID NO: 91628 - DNA, 615 bp, Zea mays
  Clone ID: MRT4577_183561C.1
ggcgatgagattgtcacgacggtggtaactgaggattgatctccttgttaaaaaaaaaaaaacaagctacaacaaaaaaaaaacaaaaaaaaaaaaaaaaaaaaaaaaaaaaaaaaaaaaaaaaaaaaaaaaaaaaaaaaaaaaaaaaaaaaaaaaaaaaaaaaaaaaggggggggccgtttaaaagaaccaaagttaactaccccggccttgcaacgaaaaacttttttaaaggggccccaaaaataaaatcaagggcccgggtttaaaaaacgtgggaacggaaaaaacccggggttccccaaattaaatcccttggaaaaaaatccccttttcccaaggggggaaaaaaaaaaaaagccccaaacaaatcccctttcaaaaaattggcccaccctaaagggaaaagggaaccccccttttaagggccaataaagccgggggggggggggggtaaccccaagggaaaccgtaaaatttgcaagccccttagcccccgtcccttacgttttttcccctccttttttcaccaattacgcggtttttcccctaaaagttaaaaaagggggcctctctaaagggttccaattaatggtttaacgggccctttaaccc

SEQ ID NO: 91629 - DNA, 638 bp, Zea mays
  Clone ID: MRT4577_183562C.1
ttttttttttttttttcccttcagcgattttctaattatcttatcgtaaaaaaagaagctattccgttgccattgccgctttaatttcccctcgtctgtcgccccacttggtgtgtttgtgtgttataaacatcgctcaactcattcaaacaacaaaaggcgtcggccggcagtgtaactgctttcgtttaaccgaagacaagcttgaagatgtcgttgtagacgaagtactggccattcgcatcgcgggcgagctggaaagactggctgaagttcatggggcgctgctcctcatcgacaaggagagcaccggtaatgaggataatgacaccgccctggtcgttggagggctgggcatcgagggtagagacttggtgcttgaccttctcaaaggggaggccagcaagcttctcggtaatggcttgggtgccaaggacggaagcagactcgaaagtcagcatagagtggtctcggtagagagcagcgagacccttgcgatcactgtcgaaggtgttgtagtagaactcaacaaactgcttggcaacttcctcaaagtttccggccattttgaagtatggggacctgtcctggtcgtttaatcgctgttgcgtctagaaaggggggatcggaaggtttta

SEQ ID NO: 91630 - DNA, 395 bp, Zea mays
  Clone ID: MRT4577_183563C.1
ttttttttttttttttaaagatccaatatattaaatcaaaatggtgtagcacacgagaattttacatgctaaaaggaatacatgtgtgatgacctaattgacaagcatgacatataagatcatctgtgcgcttattacaaaaaaaatagcattggacctaatgagcttgcatagggcatcatgaccaagatgtaccaaggcaacgatgctagagggaggaggaggacacgatggtggaaagtgcagtgatgctaaccggtgggaagaatgggtagagaccacatgtgctattgcgcctggcaatcatgctccaagtttgtaagtccttgacccagccatcatgaaccgaaggttcgccggaggccgagagtcacaggccgccgggagtcacaccg

SEQ ID NO: 91631 - DNA, 303 bp, Zea mays
  Clone ID: MRT4577_183564C.1
catcctctattcgtgcagtcgatctctctccgtctccagcatgtaccttgcagagccgttactccgagcacgacaaggatggttgctgtctaattagagtgcatggcctcgctcggaaatgatcgacgctctgtctgaagatactgactgatctatgaggattcaggtgaataacattgtgagaatgaaaagaattaactactgctataacaaatgagtgtatagtacctcacctcagctcattgccgctcgcaaagatgaacttctgtctctcgcgtgcgatgcacgctcacatcttccgct

SEQ ID NO: 91632 - DNA, 1418 bp, Zea mays
  Clone ID: MRT4577_183565C.1
tgggaccctcgaggccggccgggccgggatcttttcgatagtcgcattcaccctgcgtgcgctctcttttgctctctctctctctctcgtggcaacgactgcgcgagcgccggcgcctacgccaggtgcccaggcctccgtcggtcatttcgccaggcattcgtcgcgggctcttcgccggcgacgagcacacccaccaagttgagggttggtcctttacgagcatgttataatgggagagaacggagttcagctgacactgacctccactttgaagagcacaggcaagccacggatcaatgcggacgggctgaataatggatcacatactaccaaagagaagcatgaacacggtggcactttccaaccatcaaaaggccagaagcagcagctgtgcacaacatgtgcaaaagggcatacttgtcaatcggtcatcaaccggacaagacaaatgcgagctctaatcgactcaaagaagccttaccaagcacactctgtattcaagcacttaatggatgaggggcacaagccttcattggtcacatacacaattctactgaccgccctgacgaaccagaggatgtttgagtcgattccatcactgcttgctgaagttgaactagctggaattaggccagactccatcttcttcaatgccttgataaatgcgtttgttgaggcgaagcggatgggcgaagcgataaacacattctggaaaatgaaacattctggctgccacccaactacaagcaccttcaacacactgataaaaggttatggcattgtaggcaaacccgaagaatcacagcgcgtcttcgacatgatgggcgttgaaggatcagtcaggcctaacctcacaacatacaacattcttgtgaaggcatggtgtgatcacagaaatcttgaggaggcctggggtgttgtgggcaaaatgcaagcaggtggttttgagcctgatatgtggacttacaataccatagccagtgcatatgccaataatgacgagacatggagagcagaagagctcattgtggagattcagactagagtgcgcaccagtgagcgaacatggggcataatcattggtggttattgccgggagggcaggttggaggaagcattacgatgcgtccagcaaatgaaggatgcaggaagtgttcctaacgtcgtcatcttcaacacactgctgaagggctttcttgatgcaaatgacatggctgctgtcaataagatcctgggtctgatggagaaatttggcatcaaacctgacatcgttacctacagtcaccagttgaacacattcagctcgctgggccacatggctaaatgcatgcatgtatttgacaaaatgatcgaagcaggaattgagccagatcctcaggtatacagcattctcgccaaaggatttgttcgtgctc

SEQ ID NO: 91633 - DNA, 134 bp, Zea mays
  Clone ID: MRT4577_183566C.1
atttcactcgttttgcacaatgtttattagctgtttgatttgataccctaatttgcatgtagttcctactgatagaatttttggttgctcactattatatatagtttctgtcttcccattggttcattttcact

SEQ ID NO: 91634 - DNA, 349 bp, Zea mays
  Clone ID: MRT4577_183567C.1
acaaaactcataaccatttatcccttacattcgatgttccataaaaaaaattaagtcttaataccatcaccgtttcaaccaaagtaataattcttcattaccaggcaaacattgccatcataaattacttgttcaccccacaacttcaaggatttcaacaaaaccagatattttaagcttccacgaggtaaccaacaagcaagcacagcaccagccaaataaatcattttttcttggcaacaaccttcttcaccagccaaataaatcatttcttcttggcaacaaccttcttcacctttgctccaattgggtccttcttctccacactttttatgactcccacaaccac

SEQ ID NO: 91635 - DNA, 353 bp, Zea mays
  unsure (1)..(353): unsure at all n locations
  Clone ID: MRT4577_183568C.1
cttctgcttgctctggggggggggggcgcgcgcgcgcgtgtgtgngcgggtgatcttgtngcgtggctcgtcggtggtcctcgctcgatgntgttggcggtgttctgcgggctggtggtggtggtgccggcggtgctggtggcggcgggcctccggccgccgtctcccgggggcggggcgtttttttttttttggcgcttcctggccgcgtccgtgccggccgtgtccttgctgctcggcgtcctcttgtcccttttctactcccccgcgcgcccggcgctcctccgccccttgtctttcgctgccttgggcgtggtgttctgcctgttcgccggggtgctggtctccctggg

SEQ ID NO: 91636 - DNA, 245 bp, Zea mays
  Clone ID: MRT4577_183569C.1
atcatgagttgagagatcaggctctgatcatcatcacagaagctgataaagctgcggcagagactggttttgcactgagaacattagccattccagtggaatgagtgcaacaaggaacatttaattgatattccaaggactcaagttgtgtcacctatggtaatggtccagacatatatgattactgtctttaccttgtatcatacaattaccttgttttatattctttctcttatctgtattaa

SEQ ID NO: 91637 - DNA, 186 bp, Zea mays
  Clone ID: MRT4577_18356C.1
ctcatataacaaccggagaatcaaatctcgagcatgtgtaaaagcctcatcctttgccttcatgaagaacgcccaagaatagcgagaaaagtcgtcaatgaccacaagacataccacatcccccaaacgagcaaactcgggctagaccaacattgtccatatgaagcaattcaccgagttctgaag

SEQ ID NO: 91638 - DNA, 363 bp, Zea mays
  Clone ID: MRT4577_183570C.1
cccaattccacattctcaagaaataaggcggcagaaatgccatatatgaattgaacactatttgttggcttattaggcactatcctggagccaaaggaaatgagatcggcattcctcggggaattgcaattccacattttcaagaaataaggcggcaaaaatgttcatatatgaattggaattatttgctttcttattaggcctatcctgaagccaaagggaatgagatcggaatgtctgggggaattccaattacacatacgcaagcaaatatgtgagccaaacatgttcatatatgacttggaattattaggattgttattatgcctgtgctgaatcccaaggaaatgaaatcggaattcc

SEQ ID NO: 91639 - DNA, 349 bp, Zea mays
  Clone ID: MRT4577_183571C.1
aaggcgaacattatttttttgggaaagggaaaattttatacttttaaatttggggatggatacaaaaagtaagggttgctttgcatcacacacaacacatgggccacaggagctgtattggtacgctcctcggctgatttttattttaatttgcaaagaaaaaacggcccctgtcggtggtgggtataaagctttccaaaaaagctaacgcttattcctccgttacagcaattttttttttaagggtcttgaaattgcccaccaggtttttcttgctttccttgaaagagaggtaggggtacacgaaccaaccggtttttgcaaggacaacgagtttctagatatttgg

SEQ ID NO: 91640 - DNA, 528 bp, Zea mays
  unsure (1)..(528): unsure at all n locations
  Clone ID: MRT4577_183572C.1
acggccgccagagngtttttattcgccctttccatcggcgggggggaggggggggccataaaaaactgtgacttcttcccagcggttcctgtaagagtgggccttggtggcgtggtatgactcccaccatcattgggctgctcctctcaacagacggggaccatgcttttctttctccctnccatcgcgctggtcgatgggcagctcccnctccacanngcgcanccactctgcgggggggggggggtcacacagatgagcgaacgttggtggatgacctctcatgagttcagcccgcttgtctctgggcttgtggggcctctgccgctgaggtggggcctgctgctgctgctgctgctgggtggcggccaangtctggccgtttgcttgaactgcctgngtctgcctcggacccatctgctcgctcgacatccggggcggcggcggcttgtgctgttgctggggctcctcctcctgttgagcggctcgctcctgcctggcgcgccttcctcctctgcgcctgttctc

SEQ ID NO: 91641 - DNA, 131 bp, Zea mays
  Clone ID: MRT4577_183573C.1
aaacccgctttgtcaatcaaaatgcccgggtttaattttgagggggtcggaaacggttccacaagggggattggaaggtccatctaaaaccccgccgaagggttggccacctttccttccttgtttccatt

SEQ ID NO: 91642 - DNA, 255 bp, Zea mays
  Clone ID: MRT4577_183574C.1
aggaacgccacggaggcaaggaccactccggaagagaacacgccggcctcccggctcaacaacaagcaagagcaaaccgcaccaaaggaggggaggcatgccagcttcgagaaagggaggaatgggaaccccaccacggaggcattagagaagaagatgagcgcactggagaaagcaaagtccaccgcgtatgcggcgccagggatgcacgcagctgcggatacgctcagcgcacatgcccctgctggcgggcac

SEQ ID NO: 91643 - DNA, 175 bp, Zea mays
  Clone ID: MRT4577_183575C.1
gacccactcttacagtcttcctccactatatcactcccctttgttattcttctactagtactatcttcggcgcgagattttaatatacaacttctccccctactacacaccttctcttatttacccaccaccatacttctatcaaaccacctcttctttcttcaagcctaccacc

SEQ ID NO: 91644 - DNA, 1428 bp, Zea mays
  Clone ID: MRT4577_183576C.1
atggatcctaaaggcaatgtgatgatgatcaatgacaaagagaaggagaccctctatgttgatgagccaaaaggtgacaagctcacttactcaggctcaaacaacaagagaaaggatggaaagaagaagaggcgcatcaagaagatcatttactacaacagtgacacctcctcttcttcaccaagggaagacgatgacgaagactcttcgtcgaaaaagaaaacggttaatcaaaactactcttttgattattctcgcatcccttataattcaaatgctcatttattatctattccactcggtaaaccccctcactttgatggagaagactattctttttggagccataaaatgtgtagtcatttattttctctccatcctagtatttgggaaattatgaaaaatggaatgcaatttgatagtagtggcaatcatgtattgattaatgaacaaattcataaaaatggccaagctactactgttttgctagcatctctatgcagggatgagtataacaaagttagcggtttggataatgccaaacaaatttgggacaccctcaagatttctcatgagggaaacgatgtcactatgattaccaaaatggaattggtggaagaagcaaggtacgttgatgacgtcgccaacggacctctcccactctacgagccgcggcctgttgctctcgaggcaacaagcagcaaggagacactacctaacaaggtggcacaagtggaggctgtcgggctcaacgaggaggaaatgacgcttgtaatcaagcatttcaagaccgctttgaagggacgcaagaaggacaaatcaaagggaaagcgctccttcttcaaatgtgttaagttcggtcattttattgcacaatgccccgataatgaaaatgaccagggacaagaaaagaaatggaagaagaagaagaactataggaaagcgaaaggcgaggcacacattggcaaggaatgggactccgactgttcttcatccgactccgacgatgaaggattagctgccttcgacaagtcctccatctttcccaacaaacatcacacttgcctcatggctaaggagaagaagttgaataatgatgttgcaaaccttaatgctcaacttaaaacttacaaaaatgattatgaaaagctaaaatttgccatggatgcctacaccattggtagacacccctccattagggatggacttggtttccaaaagggaaccaagaacttaacaagccaaagggcctccaatctcatcaaggagaaagggaaggctcctatggctagtagctctaattcttcacattacaaaagaagcatgcctatctttatactcatgttaagaatatttctaatgttgctcatcataatcatgctgttttttctacccgtcatgatactgcttttgattcacatgtcatga

SEQ ID NO: 91645 - DNA, 191 bp, Zea mays
  Clone ID: MRT4577_183577C.1
actcaaaacacaaaggcatgtcataacctgaacattcaacatttgactgcaaaatgagtatggggagcagctccgtcagcagtatgctactctgcattagcgaaacgctgatctcccggaacgctgtctgtgacatgatagacattaaagcggatcgccttggagaagcaaccttcgagctttatgaaaac

SEQ ID NO: 91646 - DNA, 522 bp, Zea mays
  unsure (1)..(522): unsure at all n locations
  Clone ID: MRT4577_183578C.1
gagttgaggcgcttacacaaactttcattccggcctcttgttccatagtttttcttgcatgttacatctcaccgatgaataaaatgtatgtatcagacttgtctaaaaaaaaaaaaaaaaaaaaaaaaaaaaaaaaaaaaaaaaaaaaaaaaaaaaaaaaaaaaaaaaaaaagaaaaaaagggggggaggaaaaaaaaaaaaaaaaaaggagaatacaaaaaaaaaaaaaaaaaaaaagaaaaaccaaaaaaaaaacaaaaaagccaaaactttacaacaaaataaaaaaaaaaaaccctgccgaaacctaactaaatcgccatttaaaaaatactacatttcgccaccttgtttaaaggcgaaaaaaaccgcccctaaccgcccaacccaacaatccgccaaacctaaatggaaaatggaacgcaccctgtatcgcccctttaaacgcacattaaaccgcgcatatgcacagctaaaccgcaccctcgccagnccacctacccccgccttttccctttttt

SEQ ID NO: 91647 - DNA, 599 bp, Zea mays
  Clone ID: MRT4577_183579C.1
gggatatattcagatgcctaatcccaattggcattggctccatttaattttcacttctaagactgcacgagctaatgtaggagtgagaaactgtcccttctgatgatgggctctccattccatttcttttggcacataacagcttttcagcacttcacaacttctatacactaaatttgcatgaccaccaacgaatttatgctcacagccctattaattagcgcttgtttttgccaagatattttgtgtgagcattttgaccttgagttcctaactgtttgtctaggaaattctggtggagaacttacttctttcatctttttgcaatttaacgaaggaatggcttcttgcattctttcatcttttcatagtcctttagtgaacgattccaagaaatgcagtgtttagagaagtttgaagcaatcatttgcgaagtttaatttttgagtttccaaaaatccttttctagagggtggtatcacaatgaatatggaatcctggataagatctttccatatctcgaatctcaactaaagctgactacggaatgaggctggctcacgagaggagagagccacaccattaccattagattatgt

SEQ ID NO: 91648 - DNA, 428 bp, Zea mays
  Clone ID: MRT4577_18357C.1
ggatgaacccatcacgcacgcgtacgcatggtcggatgcctaggacgcgcgccacccaatcattttgtttcttttacatatttatttatataaatatacataaatggacagatatttatgaaccaattcattttggaccgaatcttgtagctggggatgatacctggatgtatccgacctgatgttgtgcatttggatactagctgctatgctcgggggtgcattgttatatatacacagaccgactgagaactcaactggctgatacagctaaagctcgacaggcataacgcctcgtatgctttaccatagtgtgcaacttgacacatgcactcatgatcaaaccaatagaacttttagagtaaaaacagccaggctctgctataatgtcatgcagaacagcccccgaggaccttctcaccgagaaa

SEQ ID NO: 91649 - DNA, 592 bp, Zea mays
  Clone ID: MRT4577_183580C.1
cgttgctggcgttcattgttaagagtagcgatctctccatacatactatgctagtccctctagagaaatttcagaagttaccaattgagacctaaagaccgacctgaatcatgcatccattggagctcttcctggtggtcttggttaccaccggtgccgcctctgcggtgtacagccatcctgccgccgctggtactccagcggcacggttttgggaggaggccctccctggcacacccatgccggaggccatcgccgacctcatccaacaaggcattgaccattcccctctcgtggagcatttcacttctagcggccacacccctgtcatgaacataaactacggctacggggcctacgccggcagctctctaatgaacgcagcagtgcccccaggctccttcttcctccagtctcagctgcgcgtgggaaccgccatgaccgtctcctccgagtcggcagctaccgtgccacccatcctcccacgcgacgtcgcccagaaggtcccattcagcaacctagcggacgtgctcgccgcgttccacatctcgccaagctccgccgaggcgacgacggtgagcgacaccctgag

SEQ ID NO: 91650 - DNA, 278 bp, Zea mays
  Clone ID: MRT4577_183581C.1
attagctctaggctctagctagccgctccactccttcgtgtagccatcagccttctcatctccactaattgtcactttcgaggtccagaccccgatcgtcgtggcggccgtcgaagcttccttggtggagatcccgctgccggctgtcgtgctctaggattctgctctcgccgacgacttggacgaggtctaggctgttgttcctgcttatctcttagatcttctcgcttccgagtagcaggcagtcgccgatgctgatggtgcggcacttgctggtt

SEQ ID NO: 91651 - DNA, 257 bp, Zea mays
  Clone ID: MRT4577_183582C.1
cgacgaaaaaggtgtgcattggtcgggggcttaccagaagaggagctgggcttccctcctattggaagcggaccccggggcctccggaggctggccagggccagccgcgcctcttaaacttggcaccaaaaaccccggaatttttccgaggggaataaagaagaacatcagagatcatgggcgctctcagggagaacaaaatccccgggacggccacctgccagaaaaaataaagcccttccagtttatgaatggcg

SEQ ID NO: 91652 - DNA, 509 bp, Zea mays
  unsure (1)..(509): unsure at all n locations
  Clone ID: MRT4577_183583C.1
gcggcggggggggggggggggtttttaaagaacaactgagttgctttataggggtgaacatcggggaagtgctaaaatgtgacaaaagtggcgcgcggcaccagccttnatagccagaggcctggggagaataagtcataattcaaacatacaaggggtgggggtggggtncgcccgcgggatgctatccctatgtgtgagtacatgtgtaaatatcttcatccaaacattcttacataggggagggggggtgtccaggtccccaccctggacggagggagngcaacatgcctagtcnaacagagcactaactcattttttttttactaaattcggatgtggggcacctctgagtgcgaggggcgacagtgcaaaccccaagcggtgggcgttctgtgcctgggaaggagggttagtgggctgggagcaagcccagcgagcgctttctgtgatttgagctggttcacgctatacaagggcgatagagttgaagccggcttcattaattt

SEQ ID NO: 91653 - DNA, 673 bp, Zea mays
  Clone ID: MRT4577_183584C.1
cattgggtacctcgaggccggccgggaacatctacaacaacctgcactactacagtattctcctcctccgtccgcgaaggtgtctttttaagccatgacggggcgctaaaaaggaggtaacgggctgggcaacggctatccctatcgccaccggaagagagctgctctattactatccagcgcatcacaacagacggcgatccgtacgctggcacagtacgggtggtgcgaagacgcatttcgtggactcatctcacgacgagacccgcggcgagctctagatcatcctcgagaacgtcatccggcgactgcatcacctacaccgaggcacgtcctcctcaacaccgtcaccgtcatggatgtcgtcaagacgctgaagcgacagagccgcacgctctacactttcaggggatatcggcggctgccgtttgatgattggatgtgaccgacgagggctactagttgactagttagccgatctacagaactccgctatggatcttctggacaagcgcgacaaggatgaagcccaccttgtgttcactttacagaatgatgagccctgcgacgctctctatttctatgtctcacagaggcaagcccacacgggtgctgtgctgatcggtgtgcttgatgagctgggtgtcatccacgagtcaacagctgcacctat

SEQ ID NO: 91654 - DNA, 311 bp, Zea mays
  unsure (1)..(311): unsure at all n locations
  Clone ID: MRT4577_183585C.1
tagtgagtcgtattaaacancgcgacacaagatgtaggacatttggatgttagcctgcacgtcttctggcgaccagacaaggttttccccctgggggcttgtggtggagcttgttaggctcaccttaccttgggtagtggacgtgagccaggaggtatacgatttggaagaggagagaggataattttaattttcatcgcgcttggagtattattgagttatgtttgtgggtacgaaacttgaatttgtttcagcagatcgagttcacaaaaagacggccattactgggtgatggttctgaactgcaggtg

SEQ ID NO: 91655 - DNA, 657 bp, Zea mays
  Clone ID: MRT4577_183586C.1
atctcattctcacaggtagctagtgtagatatcaataatctcttcttcgcctcactagctaccacgggatatcaggtcgatcgctctgtcctgcataatggcagctcgatcctcctccctctctttgtccgcgtcgttggtcctggcagcggcgctgctgctgctggcggcgggggccgccacgccgtctgcgatggcgagctgcggagaggtgacgtcgtcggcgacgccgagcctcgtctacgcgatggtcagcgcgacgacgccctccgcgtggtgctgcagcgcggtgcgctcactcaacagccgcgcgtcgtcgcgtcgcggaccggcaggtcacctgcaactgcctcaagagcatgacggcccggctcgtggatgccgtcagcatgaccaacgccgccaacatccccgggaagtgcggcgtctccgtcggcgagcccatcaatcccaccgacgactgcaccaatatcgactgatccataaccatagcgaatgcacctcgatcgttgtatggcatcgtacgtggccatcagcagcatgcagtcgtcgacgaatacagagatgtgctagctacgtgtgtgtcatgcatcagactgttccataataaagaagaatgtcatgcacccgctagagatcacttcgcctagagtgcct

SEQ ID NO: 91656 - DNA, 1490 bp, Zea mays
  Clone ID: MRT4577_183587C.1
cccacgcgtccgccaacttccgggcaggcatctgcatccaaagggcgctcgattctctagctagctaggatctagcaacacaaacccgtctgtccatatattatgggttggtaacaattaattagactgaagaagatcatctaacgaggatggacgcaaagaaaccatacatgctggctattactacagtagcaatctacaccggcatgtacgtggtctcaaaggctgccttcaaccagggaatgaacagcttcgtcttcgtcttctaccgccaggctgctgcatcgcttctcctcctgcccatcgcacttgttctagaaaggaaaaatgtgcgatccatgtcctctgggttgatcctgaagttgttcttgcttgccctaatctggaacacgttaggcatgaatctgtgcaatgcaagtgtgacgctcacgtcagcaaccgtggcgtcggcaacaggaaactctactcccgttatcaccttctgcctggcactgctactgaggatggaggtggtgaagttaaggagcgtctctggcatagccaaggtcaccggcgtagcactgtgcctggccggagcgttggtcatcgccctgtacacggggccgtcgctcagcccagtcaaccgccatcaccgtgcctctggcggcgcccatggcttcaaagctccaacccgtggggggacatgggttacaggcacgttcctgatgcttctgtccaacgtcacatggtccctgtggacggttctgcagggcgcgctgctaaaggaataccccaacaagctcctcgtcacgacctcccagtgcttgttcagcaccgcgcagtcgttcgtcgtcgcagcggtggccgagagggacttctcgaaatgggcgctcaagcttgacgtcagcttgatcgctgttgcttacaccgggtttctcgtaactggcgtatcctactacctgcaagcttggtgtgtgcagataaaaggacctgtcttccttgctgtctggaacccactctgctttgtgctaaccatattctgttcctccttcttcctcggcgagaatgttcacctcggcagcattgtgggtggaatcctcttggtctgtggcctttatagcgtgttatggggtaaaaccttggaggttcatcagactgtggaatctggtgataatacggtcggtgaagtgcaaaatggacaagaagagaagaatcatcaacagaaggtgctggagaagggacgccaagaggaagcatcaatgacagcacccggtgtagtgtgatcgattgcttgattccataaagctagcaatctatggttcatttatgtcatgtctgtggttcttgtacaaattgcctgtgagtcacaataattgtttcaagatctttaaattgttacatgttttaaaggccaaaataaataaaatttaggtgataggcaaaagtaggatgatttttccaactactccagtactcctgctctacaaacactacaccaaaactttgaactt

SEQ ID NO: 91657 - DNA, 237 bp, Zea mays
  Clone ID: MRT4577_183588C.1
ctacgcggacgcatgagtcaatccggtcctttttgatgaaccatcgaccctgattgtactggggacggttgaataagaccgaaggattcatctcatgttcaccatgtttgtgaatcatttcatagacgatcccgtcttgatgaattactgtgaactgtaacatgttgcttatatcagtttcatctgtacttctaggcctgttcctgatcttggcgttcttcttgaaggattatactg

SEQ ID NO: 91658 - DNA, 1381 bp, Zea mays
  Clone ID: MRT4577_183589C.1
ctcgattctctagctagctaggatctagcaacacaaacccgtctgtccatatattatgggttggtaacaattaattagactgaagaagatcatctaacgaggatggacgcaaagaaaccatacatgctggctattactacagtagcaatctacaccggcatgtacgtggtctcaaaggctgccttcaaccagggaatgaacagcttcgtcttcgtcttctaccgccaggctgctgcatcgcttctcctcctgcccatcgcacttgttctagaaagtgcttattatatattaccgaattcgttcctcccaatcatccggcgcggccaggaaaaatgtgcgatccatgtcctctgggttgatcctgaagttgttcttgcttgccctaatctggaacacgttaggcatgaatctgtgcaatgcaagtgtgacgctcacgtcagcaaccgtggcgtcggcaacaggaaactctactcccgttatcaccttctgcctggcactgctactgaggatggaggtggtgaagttaaggagcgtctctggcatagccaaggtcaccggcgtagcactgtgcctggccggagcgttggtcatcgccctgtacacggggccgtcgctcagcccagtcaaccgccatcaccgtgcctctggcggcgcccatggcttcaaagctccaacccgtggggggacatgggttacaggcacgttcctgatgcttctgtccaacgtcacatggtccctgtggacggttctgcagggcgcgctgctaaaggaataccccaacaagctcctcgtcacgacctcccagtgcttgttcagcaccgcgcagtcgttcgtcgtcgcagcggtggccgagagggacttctcgaaatgggcgctcaagcttgacgtcagcttgatcgctgttgcttacaccgggtttctcgtaactggcgtatcctactacctgcaagcttggtgtgtgcagataaaaggacctgtcttccttgctgtctggaacccactctgctttgtgctaaccatattctgttcctccttcttcctcggcgagaatgttcacctcggcagcattgtgggtggaatcctcttggtctgtggcctttatagcgtgttatggggtaaaaccttggaggttcatcagactgtggaatctggtgataatacggtcggtgaagtgcaaaatggacaagaagagaagaatcatcaacagaaggtgctggagaagggacgccaagaggaagcatcaatgacagcacccggtgtagtgtgatcgattgcttgattccataaagctagcaatctatggttcatttatgtcatgtctgtggttcttgtacaaattgcctgtgagtcacaataattgtttcaagatctttaaattgtt

SEQ ID NO: 91659 - DNA, 418 bp, Zea mays
  Clone ID: MRT4577_18358C.1
gtcccgctgtatcggctacggaaagagcccatccgctccacctatagctcctccactcccccgacctactgatggcgcaggcgagaacatgctctttcaacatctcgacctagttgtaaattatattggcagtagcgatgtccagtctgaactaaatcctcagacaaggggggaagtcagctcaagtgccaaggtgcctagaaggtcgttacaggggcgtggaggattggtcctctattcaaacagatattcttggtataataataaagaaagcttccacccctgattacattagaatccgcgccgtgggcacatcttggtacaatgtctggaacgaagggtcatacatggccaagggtggacccatggctgatgctccccccaaaccataatacttttggagcgcaagttttttgca

SEQ ID NO: 91660 - DNA, 693 bp, Zea mays
  Clone ID: MRT4577_183590C.1
ccacgcgtccgcggacgcgtgggtgggctttgtccaagattggcggtgatctgctatacctgccagagatggataggatagctgatgtggccatggccaaggttcaagacttcaatgcacagaacgttgccaatgttgcaggagcgttcgcttccatgcgccaatcagcaccggggcttttttcagctctggccctgagagcagcacaactgctgcaaacattcaaggagcaagagcttgctcaattcttatggggctgtgcttctctgaacgagtgcccatatcccttgcttgatgcactagatactgcttttcaaaatgataccagttttcaatgccatgtaactgatataaaatcaagcgcgcattggagctcagcagaagaactttctggtggagaagatggtagtacgagcagtgcccgtactctgaacttcaaccgagatcaggttgggaatattgcttggtcctatgctgttattgggcaaatggaccgtccattcttttcacatatgtggagaactctaagtcgcttcgaagagcaacgggtttcggatcagtatagagaagacatgatgtttgcttcacaagtatatcttgcaaaccagtctttgaagcttgaataccggaatcttggactgtgcttaagaagtgatcttgagggggaaaatagcaaaagctggaaagagccaa

SEQ ID NO: 91661 - DNA, 836 bp, Zea mays
  Clone ID: MRT4577_183591C.1
aaggttggtaacccggtgggaatctttcaaaaaagactgaagccttaaaaaacaagaggggacctcgcggtttcttgaaggggaaattggcaaaatgttgtgtgttattccaatttgggctaataaacttcttgttggtggggaaaaaattgctttccggttcaagtttttgggaaacaaaaggactcggaacacggtataaatcacaaagccatttgaatatttaatggtaaaattcgcggttgcgttttagctaatttactaagcctgaaattctctcgggggaatcaggttccatgacacattgcctttgcaacaggaaagcctgctgcctgcatcttggtgcaagtagtttgtttttgccatgagatgtctgagtctgatcctttttggcattaataaatgtgttgttcttggatcacaaaaaaaaaaaaaaaaaaaaaaaaaaaaaaaaaaaaaaaaaaaaaaaaaaaaaaaaaaaaaaaaaaaaaaaggggggggaaaaaaaaaaaaaaaaaaaaaaaaaaaaaaaaaaaaaaaaaaaaaaaaaaaaaaaaaagggggggggcccttttaaaaaaacaaagtttacttccccgggattgaaagttaaaagtttttttttagggcacccaaaaaaaaattaacgggccgggttttaaaaattggggaacggaaaaaaccctggcttacccaaattaaatggcttggaaaaaaatcccctttttccaagtggggaaaaaaaaaaaaaggccccaacaaatcccctttcaaaaaattggcccatcctaaatggaaattggaacccccccttttagggccaataaagccggggg

SEQ ID NO: 91662 - DNA, 288 bp, Zea mays
  unsure (1)..(288): unsure at all n locations
  Clone ID: MRT4577_183592C.1
ccccccncccctttttttcncgacggctccggggcccccccgcctnaacaagagccccggggcccctttcttncccanaccccccccccttttaacgcnnaacccaaggnggctactctgccctttttcccaaattggagtcaaaattacccttttttccctccccgcnaacccatggacaaatacttggcggctccccctcctggcttgggttcggcccccccccccccgggcgccggnctaagaccccttctttggcacccccaaaatttcaaagtcttaggcaaa

SEQ ID NO: 91663 - DNA, 308 bp, Zea mays
  Clone ID: MRT4577_183593C.1
ccggaaccgggacccagcgtcggacgcgggcggcgtcgtcctattatatactcttctatccggccggttcgctcaggtgtcgcttacaccacgttcgtttgctcgcgggcccgcagccgcctgctgctcctctgaccgccgcggacgcgccgctctagtctctgggttacaccgcaacgtctgccacttcgcaccgccacacaggctgacctcgcacggtcgcgcggggccgcgggacatcaacgggttatggatccacgcggacccggggtctcggatgcggcctcggtgggcggctgtcggtcagc

SEQ ID NO: 91664 - DNA, 627 bp, Zea mays
  Clone ID: MRT4577_183594C.1
atccgagcctcccaagcgtcaaggcctttgcaaacaaagagatgttcatcggatcgtactgctgccctggcgacacatgaagggatcgtaacgcgctcgctgctccggactgttccaggaagagaggcgtcacatcactgcgactgcatccagaatcgtgaaggacaagcaccccgtactactccaaccgtttaccagcaggtacggctaacttccatggcgtactcacgacgctcgtcgccgacctccacaatgacgggcaagccacaacgctgatctgcgacaaaggctactcccggctcggggccaatgaacacgatccacaaccacaacaacggcggcgatgacgtatacgagacagccattgtcatcaacccaggactgagagtcatgtgccctgagaaacacaagacaacttcggcactcgctgcacggggcgttcgcgcccgaggtctacgacaacagggacaagagctacgaggtgtggagcgagatcatcggcgaccacacgctctacatctaccttaacgagcgcgactttatgcagaagctgggccgagaggaaagcaatgaaagaagaatgagtatgcatctagaccatcccggcatgacgcatctactccagcg

SEQ ID NO: 91665 - DNA, 400 bp, Zea mays
  unsure (1)..(400): unsure at all n locations
  Clone ID: MRT4577_183595C.1
annnnnnnnnnnnnnnnnttgttttttttttcgtggaggggggccaaggttgtttttttttttttttttttttagggacaaaagctcgggagccgagtttgataataataaattttttttcacaaaaatgggctttggaatggccgggtccaaaatacacaggcggggggttatttttaagctttataattaaagaacaaattgaggggcccaaagcaaaacacccaaatgggccgggtgccgaaattgatgtcccccatagagattgaagaaactccgcatggatgggcaaattgccaaaaccactacttgggtgaggggaagcttttggaccattaatacaaaaggtaattccccgggagattagccatttttgggggcaagaagcccaacaagcttt

SEQ ID NO: 91666 - DNA, 898 bp, Zea mays
  Clone ID: MRT4577_183596C.1
aaaaaatacttttcttgctcacttattaaaaccatatatacttataccattgtatacaaatataaccctcctcacctgatctaatgacgtttttacttttaccaaagggaaggaaaatcgttcaccaaatccactctaaacaaaggcaaatggatgtatgcagaaatgagcctccatctaccatagcaataaaagtgtctcatacttgttggagaaaaaatatctagccgaaggtccaaatgacaaaatcagtgtttcgaagatttttcataccaagggaaattcatattgatcattgaaccttctttggattgcttcggaacatgtgaacgagccaaaggttcatggagccgaaggtatttcaagcaaggccttggtgtcgataaagaggacctttcacaaaagatgacgcccaaagagtgcttcggagaatagatacaagaagcctcttcgaagagaaagacgtgtgggatacatttgcgtggtgaaataacacaattgtactcccgagaatgcgaagaatcactatttaataggaagaggcaaaaaggtaatttcatatgaaggtgtacatggactcgaccctataagggctagtttggcaactccattttcccgagggattctcattttcccaagggaaaatgaactaatttcccttacggggtgtttagatcccggacgttagaggaattgaaattcactcaataaagtaacttatttagtttggaatttgacattccaacactttccaaagttcatatataagcctatcttaaattcaaagggtgcaggatgggaaatgattttatgcattaatataatttgtttctactctgtaacttacacggcactcttcgaatcactcctctatagtaaaaatgtagcacataaataa

SEQ ID NO: 91667 - DNA, 264 bp, Zea mays
  Clone ID: MRT4577_183597C.1
ggccccagcagtggcaactacgccaacgctgagggcaaggacgccggtgggggcatcggcggaggtgccgacggcgcctacggatcaggagccggaggaggcgtaggcaagggccagggcgagagaggcgtggcattggcaccgtcgtccggaggctactacaatggcggcgccgctgatgctaccggtggaggatccggcgcaggaggaggacgtggcggtggcgcacaggagctccaagctacgggacaggaggtggccttg

SEQ ID NO: 91668 - DNA, 320 bp, Zea mays
  Clone ID: MRT4577_183598C.1
gtgaaacttgcacataaagcgcaagcttctactccgttgaatgaacctgtatacacacctgcccgatgatcatggaaccgaggggcattactattaccagctgcatgacccttagaagctagcggccggatggtggcccatctcgccatccaagcaagaaccacttgaaggtcaccttattttgaaactcaccggactaggcctttacccctggtatggacgacaaccttaggtccgactcgcctgtcttggggctaaatcgacttcaaccttaccctgtccataatcctataggcctacaatccgttggaagaaaccga

SEQ ID NO: 91669 - DNA, 328 bp, Zea mays
  Clone ID: MRT4577_183599C.1
gggaaccaaaaaccgctgctggggcgcttggatgggtcctaggcccctccgagtaaggtgctaaccaccggacggtcctagcacagggagaaaccccagtataagtgagggtctggtgctagcacgtgtacaagccttgccctacgtgcctgcgctccccgctcaagcggacacccgctgccgccacggggtatgaggcccgtgacataagccaacggtcggagcctgacgtaagggctgtaaagccgaatgatctatgcattaattgcggagaggacacaccacctaccaccatgctgacaaatgatgagccctctcagaatttaat

SEQ ID NO: 91670 - DNA, 125 bp, Zea mays
  Clone ID: MRT4577_18359C.1
ggcccgcacacgcgtgtacatcctggtgttcttcatagccgccaacaaaacagggggaggtcccaaggtttacgtaatgtataaccacggaaggcagcaccataacagaacgccaacacgcccaa

SEQ ID NO: 91671 - DNA, 259 bp, Zea mays
  Clone ID: MRT4577_1835C.1
atcaaccacaggataattagccttgtggaaaaatggaaccactcagaaggaaccccacaggtacctttttttaaacatctgttatattgctttcgaacatctgttatctttttttttaaaaaaaaatgttaccttataaattactgtaacatataattagctctgttcgtcagttgtgctaccctagttggatattgctcaaataggacaaaaccgttgaataagatttgatacacgaagccatcaactgcagtggcca

SEQ ID NO: 91672 - DNA, 684 bp, Zea mays
  Clone ID: MRT4577_183600C.1
gccgctttgtttttttttttgtttttgctgataagggaagtgctgccagcccccctgatattagcgcatttgcttataggcctatgaaaactgttgcttctgatcaaggcaaaaccacaggtaaaactacagacactattgatggccctcctgatctgggcttgcttgcatacacatctactgtctgctgtcccgagcggagcaaacatgcaggcaaccctcctgatctaagcacatttgcatataaacccgtgaaagctgcagtcggacgtttgaatgggagcagattcagagagaccgcaccgaaagcaactggagggacttctaggagccagttcaaatagaaccagtgccgttggctctctaaatgctgtggtgaaaggaaaacaacccctgatcagagcatttcctattcatcatcgaggaccctggaggaccgttactgcctgctagtagcagctcgttattttgagctcaccttttgtgctgcttgtcatctcgtgttcaaaccaagcctactgctcatttgctttccctgcagcagcagcccctactgttgcatcggagaaagcaatctcatttgcgactgcgttgaactgtagttaagatacttgttgtccatccttgtaagtattgaggcatgattcgaacggaaaaaaaaaaaaaaaaaaggcccctagggcc

SEQ ID NO: 91673 - DNA, 449 bp, Zea mays
  Clone ID: MRT4577_183601C.1
tgtgaaagctgcagtcggacgtttgaatgggagcagattcagagagaccgcaccgaaagcaactggagggacttctaggagccagttcaaatagaaccagtgccgttggctctctaaatgctgtggtgaaaggaaaacaacccctgatcagagcatttccgtttctgagcatcgttgaagatagttggcattgggcccccggaggacctcgaggggctgcagaggttcctttgcttcagagcccctctgtacctattcatcaacgtggaccctggaggaccgttactgcctgctagtagcagctcgttattttgagctcatcttttgtgctgctcgtcagctcgtgttcaaaccaagcctactgctcatttgctttccctgcagcagcagcagcccctactgttgcatcgaagaaagcaatctcattagcgactgcgttgaactgtagt

SEQ ID NO: 91674 - DNA, 259 bp, Zea mays
  unsure (1)..(259): unsure at all n locations
  Clone ID: MRT4577_183602C.1
cggacggtggngcggacgcgtgggcggacgcgtgggttagaaacgggagaagaacagcaggcgaagatcgcgagattggtatagcgatcgattgatcggtggtggggggggnggacntgggcggcagatggcggcgtgccggggcttcttcgagtgcctgctcaggctggtcaacttcatcggcaccgtggccggcctcgccatggtcggctacgggatctacctgctcgtcgagtgggtgagagtatctgnggacggc

SEQ ID NO: 91675 - DNA, 347 bp, Zea mays
  Clone ID: MRT4577_183603C.1
gaattttactaacatacatgtgaattgcttatatagttacctaaatgagataacaggaacgtcattgaacacaccacgccttgtcaggatataacagcatctaatcaagcacgatgctccacaaatggacaacgcagacacacagtgcatactaacacagacacctggtgaagaaaagttcatctaggattggatcgcgtcctttccatgtgcttgcccgggcactacgttgaacatgttctggctgtgtgacaccatgaggtgctgtcgtgaccgcttcacgaacgggaaccactggttcaccgggctaatggcccccatgtcgaccaccttccccttgccccttt

SEQ ID NO: 91676 - DNA, 508 bp, Zea mays
  Clone ID: MRT4577_183604C.1
cctcgaggccggccgggtaatacttctctctatacactcttagtgacggaatttagggatgtacattattttttcgtcactaatcctacttcacaagattagtaacgaattttcaaaagttatatataaaatatttcgtcactaaaatttgttgaaaattttaaaaaattatgattgtttcatatatgattttataattttcaataaatttaaactaatgattaaaatgtgttaaaaggagtttattgtagagtgtcttgttgaaacttcttgcatgtttgtatatttcttcttcttcttccactgttgttattgtacgtgtaacttgtgtacgaattggtcactagatgtttgtattttacgttttgctgtagaaatgtgaaacagacgaaagagtctgagatatagcaaaactacaagatgcaacatgtagattaaatgtaattgagctacgatggcaataaaatttcttgtttcaatttggaaaaaaaaaaaaaaaaaagcggcc

SEQ ID NO: 91677 - DNA, 370 bp, Zea mays
  Clone ID: MRT4577_183605C.1
ctccgcgctcctgccaaccgcggattccatcctcctgcaatcgccaacgcgccccccgtgctcctgctatccgaggaaagccttccatccatggcgcctttactgcaattccccccgtgatctgcgctccctccattgccccacgacaccgccatcccaggaaacccttccatccatggcgcctccccacgaatctctgctgtcaatttttatggagaaatcgcgcctcgccagggtgcccttccatccatggcgtcgttgctgcaagtgccccgcaatcaacgatccccttccaccgacggcactcaccttccatcgcaaaactgctcttcctccattccaccgacggcactcaccctaaaccctcacc

SEQ ID NO: 91678 - DNA, 302 bp, Zea mays
  Clone ID: MRT4577_183606C.1
cctgcatactgtttgtgatatctcattttattgtttctattcatttttttttttgtaggaaattttttgtttttttacacacccaaaaataaaacagttccccggactttttgaaagggcacaaacctttatttttttaacaccaaccaatgctcaagactgaaacctttatggtacatctccgtacaaaacaaaaaaggaaaccctttttcttacaatgggaaacaggccaatccccctgtaaacaaaacccctaaaaaggggaaaaaaacaagaggggaacccctggataaaaataaacc

SEQ ID NO: 91679 - DNA, 352 bp, Zea mays
  Clone ID: MRT4577_183607C.1
ccacgggagtggtcatgcagacgaccacacacgaggggtctacctcctatactgataacgggctgagtctgtttatccagataacaacacagttgacattgcgtcacatgaccacaagcagtacctatatttcttgcccaagcgcatacctatcctgttgtggctaagcttatcaaaacctgggagaggtacacctacgcctttgtgactgagcgggagatcgagagatcacccaggacccgcgggcccgtggaatctacatatcgcgcaggaaaccacgacgaaccacatcctgaagttacaatgcctatgttgcagaggtacatccattacttctgatcttgagaatccg

SEQ ID NO: 91680 - DNA, 645 bp, Zea mays
  unsure (1)..(645): unsure at all n locations
  Clone ID: MRT4577_183608C.1
aaagcagctttcgaaatatcaaccacagcattaaacattgaacatagtacattccaaagttaatacggataaatggtatataatgcaataatgccacagttattccatgcgtgtgtcaaggctgattctaaacttgaaaaactatttcctcgtttataagctggagatttcacttcttttgctacctctctgctctatggcgtttttcacctctgtttgtttttttgttttttccttttttctttgttaacgccccaggatgtacagataatccccacattccatacctggaacttttcccccctctgtcaggtttttcaaatgagaccaaactacaatgacaagataatgttttaccgaaattccacagacataggtcagttaatccatgacacgtcatttcaacgcttcctttaggatttatgaccttcccgaagcatttaaaatcttgctttaagctgcacagacaggctggctggtggccgcacagacaggctggctggtggctgcacagccaatgcgcaggcacaccggccacagtgctcatggaccgcacgtgtttcccgtgggcgtgggcatccngcattcttaggttccccgcctacctttgcgaagaaaggggcaaggccctgcttttccttttcc

SEQ ID NO: 91681 - DNA, 255 bp, Zea mays
  Clone ID: MRT4577_183609C.1
attcggctcgaggtagaatcgagctgccatatctttattctagacttaacaggagatctcgagaccattcttaacctactcatctaaccggcgaatgtgggaggtgccgctgcctccattgcgctggcttaggagtcgtcaaacacctctggaccatacaactagaggccatatacgagagcacttgctcatacgaacactatactgaagacgcgcgttccaccttgcccctacgctgagtactttgcacaagat

SEQ ID NO: 91682 - DNA, 435 bp, Zea mays
  Clone ID: MRT4577_18360C.1
tttctgtagacactgccaccgctgcgtgacaggaactctgctctctctctgtctctctctctctctctctcatggcggactccccgagccccgggacgaaaccccaacggagaaccggtgccgacgccacgcccctgcgccgcacactcccctcgccgcagtgagccccgctgcaagaatttgctccgcgtggcgcaggttcttgtatgagagagccaggggaccaccgctcccactacggtgggcggtatgggcacgggtagccgtcaccaagcccatacgcaccgccacgccctggacatggggaaaggtatgcgagacagtctagtgggtactaccgccagatccctaccatgcactgcaagaactgtgggatggggactgtgacctaccatcaccatgggtgcgcctgttcccactggctgcatgggcaga

SEQ ID NO: 91683 - DNA, 394 bp, Zea mays
  Clone ID: MRT4577_183610C.1
cgcctaaccctcacgcaacccaaagcggccggtatcttaacagtaggagcgctcacaatatcacaccctactgtctctctgaactgctcaataagcatttgcgtacaacacgacgcacttgactatgtcgccgaaacaccaaaacaactacctctacacaccgtatagcttccttaatacgcgccatccaacaccgacgggttggcacatctaccccatggctaagtctcatcttttctactttgttacgccttcggtatgggaaaccatgctccaattgctgcaacattgtttagatattcatcaccactacaagctgatactataccattaacacttccagcctagataacagaatgcgtcatacctctcttttatacaaaaatcccatatt

SEQ ID NO: 91684 - DNA, 496 bp, Zea mays
  Clone ID: MRT4577_183611C.1
cattgggaccctcgaggccggccgggagggctatagttctcatcgacgacgtctgccgacagtgctcctgctcctgttcctccttctcggccgccgctcgagcttggtgagatagtgtctcttcttctcgaagacctgcgaggagtcgtcgtcatgtgcgctgatgatactgttgtcctcaaggttgctatggcatgtgatggctgcgccgactcgttcttaagagtgctctccaagatggtaggagttgaaacctttcacctagaactcaaggatctgaatgtgacagtcaaaggcaatgtcaagcctgatgacgtcttccagaaggttttcaagtacagaaagcagacctcgttctcggaacgaaaatacacttccccggaccatgcagcatctgctgaaaacgttaaacgtgacaactacaaggcactggctgctggtattgcttgccctccattttagaatttccggccctggtttttctcccactctcaaa

SEQ ID NO: 91685 - DNA, 230 bp, Zea mays
  Clone ID: MRT4577_183612C.1
ggggttgggcaacataacaacgataaggttgcttgccttcaaaaatggttactaggtacacaaaactattttgaccggtggaagccacgaatgtgatagagaaatctggttcaaactcatacttgtaatagaaaacgacagatagggtccctatgccacaaattgtacaacgagtcacgaacaccttatggtggtggcacaaaaatggtttactggtataataactgtac

SEQ ID NO: 91686 - DNA, 230 bp, Zea mays
  Clone ID: MRT4577_183613C.1
gtggaggtggaggatacacaccgggggcgccacgacgaacgccacgccgaggtcgtttccgagaagattatactggaggacgcgccggcagttcttgcggataccgctggcaccccccgcaccacggaggtggaggtggagtccctcaggaaaggagcggcgccggttccagtactcatcctcgttggcgccgcagtggacgacgtggtggccgacaacgttcctggccg

SEQ ID NO: 91687 - DNA, 1078 bp, Zea mays
  Clone ID: MRT4577_183614C.1
cttaccaaattttacaagttacaacaagtttacattgtatttatcggagtgattacaaaagtggttcaaaggaataactttgagatgttataaattatttgtaagtttgaaatatatgctagctcatgtgaccatcctcaataagaagtatagaataattacttagacttataagaaggccgagcccaccggcacttaacaccatcaacagcagcacaaaactataacctggaagaaacactaggttagtgtttgttagacgtcgatcacttgacgctcagcctttgttccagtacttgcttcgtctgtccatctttaggttcgtccattagcatcaccttgtggagtagctcacgctttacaacatcatggggtcaacttaaattttgtccttcgcatcacgtgatcaattaacgtacctaaatgatatgcataatgcacatgtatgaacataaggaagaataacacaagagattacgatgctacgcaaaaaaagaaataaaacacttaatggcgaggcattacaaacactaactatcgatatattgttacttacgacaatcatgctcctccaacataaccagatataaatcaaactaacatcacaagatattatgattaacatccatgtgtgaaagcatttttttggttcctaactttttattaactcttctaacatcaggactggttaagtgcatccgcatccgctatggtttctaaagactatagatagacttgggctgaatggaataatcattcaacgtgttctacaattagtacacatcgaagaaaacacactggagacgatgacctacttaatagatacttatcttacaattatatagaagttggttgtttagtaatatgcaggattaacagtgcaatcagtggagagtagtaatagaccatcaacttcgttcctttgatcatataactacactttgctaatgttgattgaaactaaaactacttattatgctttaacgtattaattcattaactcagtgagacatgcaccaaaatcgggaaatctagactagacatcaatcaacatacaattaattggccggcctcgagg

SEQ ID NO: 91688 - DNA, 566 bp, Zea mays
  Clone ID: MRT4577_183615C.1
gtgactgcgtagatgagagatcatctctggcgcactggggcgctctcgctcctcccctccgctgatgggtccattcttgcctgccccggctgcttgcttggtgccgaggaagacggggaggagaacgttggggggttcttggatgcattcacggcgttcaggctatgaactaagctgagcagcttcttgcgttttaattgagctctcttgttcttgctcccgcgtcccctgcatttcaggaaactgatatcggggagcaagcaaggcaaggtttctctcggaagaagcattacagtgccccacttcggcctttctgatttatttgctttgctagtcctcgttaaagttctgcccattttggtggcttggaagtgataaagtttaccaattcactaagccaattgagaaaggatagtgctaactgagctccaatggcttggcaccttgatatccttgtcatggtcactacttgtttgatttttttctcgataagcgagcaatcttcacagagcgagctgctgcagcagctcaggaagcagctggagtaccctaggcagctggatgct

SEQ ID NO: 91689 - DNA, 213 bp, Zea mays
  Clone ID: MRT4577_183616C.1
acctccaggcggccggggagactttcaacaaagagctcctctggctttgctttcccaaatatcgcacgagacacgattgactccaagtacagagcagtacagcactgttgtcctgatctggatccgcggaacagagatgggtagggaaaagattgtgctcaagttgcatctgtatgacaacgcgcatacgccgaagggcttgtaggcagctgg

SEQ ID NO: 91690 - DNA, 298 bp, Zea mays
  Clone ID: MRT4577_183617C.1
gagagagcggcccccgtgaggagctcccacacctcgactgctggcctgctcgcgtggcctcgcccctatgtcgccctttaacttccagcacgccaacctaaccagccaactgaggaattcaggaatgaagaagatggaggacaccatcaacgctggcatcaactggcttgacaccaaccatcttgcctaagcctatgaattctattacaagattaaagaactttagagcctttgcaaccccattatcgtcaatatttaccaaggctctgtttcctacatttgaagcttcttctgcatt

SEQ ID NO: 91691 - DNA, 673 bp, Zea mays
  Clone ID: MRT4577_183618C.1
tccctctctaagcccctcaactccctgcgattcctctcacctcgcctactcatctcctcctagccatatacgacggagaggaatcgaacagacgagcatgtcatcccacatattgatgcctaggacaacaagaaggataggagccacacccccaatgtacccctcctcagcgtccataacagtgattacttccgcaacgagaagaccatgaacgtgtcttctaagtggcaccatatcactctaaccaagaaggatcaggccatgctggctgcctcctctatcgacaacatcgtgaacaacatcgaactcgactaggagcctgttgatgctcgtcagcaacacgaacaataactgtagccctggtcgaattgttgacaatgaacacgctgctttcctgtgatgatagcgcatccacaaagagattcgccgtctatctccaaagtgggctaaagaagggcacgaaacggtcgcaacccctgcaacatcacaggtgatcctcacgagtactcaactgacggagagagaacttgaactgagcgctccatcgctactccgactagcacgactgcaagtcccactacactactgctgccaggagaaccatatccaacgctaatccagaggagaaggcacattacttgctacacatctaaagaagaactccctaaatgtg

SEQ ID NO: 91692 - DNA, 393 bp, Zea mays
  Clone ID: MRT4577_183619C.1
caatgccttactctaggcatgaacacgcagcgggcggctcctcgtgaaggatgcctagacagctgacattgtgggtgggactgccctggggcacctgagagataaagacaccggtcacggtatgcaattggacgctgccaaagaccgacaggtaatcggcaagcatactggagagccagtgctgatgaatgaccggctatatgttactacaagatgcgcaccagacagcagacaggtatgccaaatagacaagccacaactgcatagaacaactgctacctataccagaagaagtatcctagcctcatgccaaacacccagccaggccattcaggcatgactggatttccctaactacataacgtgtatgagtgcatgacctaccaccactaa

SEQ ID NO: 91693 - DNA, 334 bp, Zea mays
  unsure (1)..(334): unsure at all n locations
  Clone ID: MRT4577_18361C.1
ccggccggngatgccactgcttctcatctgcgtacccggaactccctgcttcctgcaatcccccacagtgaaacatgaggcagctgagcagngagaccctctgcccttgggcgaagcgatgggccaggccatagctgcggaggtcaccgcgcatcccaaccgcagatcgaccattcggcctttgattgtctgcccctaacaccctcaagatcgtgcccttgaggctcccgaccgaccggccttatgatgcccgcgtgcccatgaacgcagtggacatctgcggcacctatgtgcactacctcgggcagtcgcacttcgcgcacttcgtggtgaa

SEQ ID NO: 91694 - DNA, 234 bp, Zea mays
  Clone ID: MRT4577_183620C.1
aatacactccttgggatggggccccgggggccggccgaatcccgggggcccacccccggtcggccgccgggggaaaaccgcagaaccgcttgtcctacccctagacgcagactcgagggcctcgggtaagaggaggcccggcatgcgcatgagcgcgcaccttgctgcgcgggccggccttagagcaccttgccatcgcatccagatccagggtgcatgatctgtttagtcctt

SEQ ID NO: 91695 - DNA, 497 bp, Zea mays
  unsure (1)..(497): unsure at all n locations
  Clone ID: MRT4577_183621C.1
ggcttataatgaaaggcgacagtatggagatgaatggaaacatacttggtttaaagatggagagtaatggcatcagagttatagaaccatttgacatggtcgtgaaatattccaatgcgtctggaaagacaaatttgcatctactagtttctgaaatatatatgaatttttccttcagtattctcagactgtttttagcagttgaggaagaaatttcagcatttcttaggatgtcgtcaaagaaaatttcactggtgtgttaccagtttgacaaagttgcaactatgcaaggtaatgctaatgatcaagtgttatctttctggcgaccgcgtgctccatctggatatgccatttttggcgattatctcacaccaatgaacgagcctcctactaaaggagttcttgctctgaacacaaacattgntagggtcaaaaggcctttatcgnacaaactagtgtggcaatctggttctccaagaacaaacatttttcatcag

SEQ ID NO: 91696 - DNA, 444 bp, Zea mays
  Clone ID: MRT4577_183622C.1
ggccgatccaagcaagtttacataacttatccaccgcaaaaatatttactagtacagtacactagtccaaagcgaaagcgagagagagaaagggggaaaagataaccagagaccaatacgccaagccctaaaataaaagcgaaggataggccctcgctctcgctcacatgtatcacatcacgaatgagacaatctcggacactctcccaccgtccaccggctccactactccaccacatgttgactggagcgagctcaggccggcggtcggcatccgttctccgcgcgggcgcgaacaaaaattcacttttttcctcggtgatgctacagcacatgcgctgcttaacaacccggaagctaatggcgattaacaaggtagctaatggtagagtagagtagagtagcagcatgcgctaattaatcagtcgattattaattagtact

SEQ ID NO: 91697 - DNA, 251 bp, Zea mays
  Clone ID: MRT4577_183623C.1
ttttaatagaaatgagacctctaacataacatataaatcgacaatacgcggtaacaaacaaatttatcagacacgacttgacttgtttataaagacaaccaaacacgacttgacttgtttaaataggctaggctaaacccgttccaggagttgcaattgtcctgtccgtttccgatcctgttttgagacactcgtattcctttcctttttcctgctatatacactgggaaaaggccaagaaggcaagcaag

SEQ ID NO: 91698 - DNA, 485 bp, Zea mays
  Clone ID: MRT4577_183624C.1
acgactcaattagggaatagctggacccctgcaccaccggtccgggaacgaccgacgcacccgggcgacccagaccaacattttgttatagcgacaccgcagactccagccaagccacacaggaagacagagaagagagccatccggagcagcgaggaaccctgggcgagtatcgaacaccaaacaatgacacaagacgacggggtcatccctatcactcacaacggaagaacagacacctcgcctgatgcatgcacgccaccctctgtcgatcatctgagcacagtgcatgagagccagaagataccacccagatccatggctccctgcataagggccccgtaccaagcccgtgcggtctatggggtcagaacagatgaaacagccatgcacgaagagctatctaacagaccggattacgatcgggtctttgggaccgaactaaagaggctcggcgttcaggctgctgctgggcatccacttac

SEQ ID NO: 91699 - DNA, 407 bp, Zea mays
  Clone ID: MRT4577_183625C.1
gcggaagtccggtcggaaaaactgccatgatatatgctgtcctggggcttatcataaccgcggacaacatgatgtattcccacggactgatgtttcttccagtctcgaccttttcgctcatctgtgctagtcagttggccttcaacgtctttttctcatacgtcttgaactctcagaagctcaccggtttgatcatgaactccgtggtgctgctcaccttggctgctttactccttggagccaaccatgaaactcatggacctattactggtggtgtctcaggacgaaagtaccttctgggtttcctgttgacagtaggagcatcaggcacctactcactcatcctttcccttatgccacttacattcgagagtgtgaacaagaaacaaaccttctcagcggttttg

SEQ ID NO: 91700 - DNA, 186 bp, Zea mays
  Clone ID: MRT4577_183626C.1
gcggggaagggggcgaccaaacagttcattcaccagctgaaaaatgttttcaaatcgggggggaataaaaaaccccggttttccaaagtagactggcacaaatggttactgaacatttaaaagaacgattgcccgtcccccaaaattgaggacaagaggggggggtctctcagctttcgcccgggc

SEQ ID NO: 91701 - DNA, 625 bp, Zea mays
  unsure (1)..(625): unsure at all n locations
  Clone ID: MRT4577_183627C.1
natcgataataacctagctctgcacaccgcccagccaccagtggcagcaggagcagggtcggaacagaggtgggtggacgccgccggaggacgcctcgtcctcgacggcgggctggccacggagctcgaggccaacggcgccgacctcaacgacccgctctggagcgctaagtgcctcctctcctccccgcacctcatccgcaaggcaaaccactcccctcaaaccctgctcttcgtatgacgcgcattcggccgccgttccgcgcttcctccctactagaaagttggcgggtacttcgtggcggtctgctggatctccgccctctgtccttcgagcgagggagaacccaagcgcgcacgcggcgatgcggccgtgctgctccttttttttttacccacccttcttttgtttcttctgtattcggaacaggcgagtaacaaacgacgagccgccgagaccttgacggggtgagatcgacgcgtcactgcttgttaagacgtactactagtttattactgcaaggtagtagtggggaggctttctttttgttgtcatggtccgagagtattggaatgaaatatcgttgcagcaaaagaaatctgggagcgtccccaccaggcacca

SEQ ID NO: 91702 - DNA, 1102 bp, Zea mays
  Clone ID: MRT4577_183628C.1
cgtcaacaacagacagtacagaggtaaattggaaaaaacatctgtgttaaaagcagtatgctctgggtttgaggagacaactgaacctgatgtctgtttgcgcgaagatatcgagacaaatgaatgtttggagaacaatggtggttgctggttagataaggctaccaatgtttctgcatgcaaggataccttccgtggtcgtgtctgcgaatgccctattgtgaatggtgtgaagtttatcggtgatgggtacaaccactgtgaagcttctggccttggtaggtgccagatcaacaatgggggctgctggaatgagactaggaacgggaagagtgtgtctgcctgctcaaaccaagaagctaaaggctgcaagtgcccagcaggtttcaagggcgacggagccaacagctgcgaagatgtggatgagtgcaaggagaagcttttctgccagtgcaaggactgcgcttgcgagaacacgtggggaagctacgagtgcagctgcggcggcggcaactcgctgtacatcagagagcatgacacttgcatcagcaaacattccagctcgacgccgggctggggcttcctgtgggtcgttttcttgggccttgccttggccggagcaggagcgtacgccgtgtacaaatacaggctacggagctacatggattcagagatccgcgcgatcatggcccagtacatgcccctggagagccaagacatgccgagccaacaacaccacctcgtccccgtcgaccgtgcagacgtctgaaacggctaggcttgtttgcatgacatggatcccatcgcatcgtcggcagagaagagaagtcggcggcaccggcatcatatcttcctcccttggtgcgcagaatatggatgctgaaaaatcacagtttcacggagcagattaggatctctctccgcagtttagagcccgtttgtcaggtttagagctcgcagtcgtgctgtgccgtgcgtaaaagtaatcgtcgagtgttctgtaaatattcctgttgagacccaacgctgaagcgcgcgtctgttgctgtgctgccctgaataaaagaaacatattcctctcatcctctgtacttttattcag

SEQ ID NO: 91703 - DNA, 189 bp, Zea mays
  unsure (1)..(189): unsure at all n locations
  Clone ID: MRT4577_183629C.1
acaacatgnnaaagccgccacaatgtgttgaatttactgcgtcagggaattcagttggtcgggactgcagttcagattgggtgtagtattcaatgcgagtaagtgttcgtggtaaaattaccactcattacgaggtctgagctaatagcatgacaattaaattgccgtggatatattacatagctttgc

SEQ ID NO: 91704 - DNA, 181 bp, Zea mays
  Clone ID: MRT4577_18362C.1
aggcctgcggacagtggtctgctcatgctcttcttgaacgcgaaccgcataaaccggcttggggcatacaaccgttctgaaaagggagactcataaacgttcctgattgcatgctaccatacatgcgcaaaaagcaatggatcactggcggcacaacattcaatcccttccaatgcacctt

SEQ ID NO: 91705 - DNA, 286 bp, Zea mays
  Clone ID: MRT4577_183630C.1
aaaacccttccacaacgggctggcccagcactggcagtagccggcggtgcgccacagaattcacaaattacacgccactagaaaccccaccattctactgactctcgacgagcaatgtagcattatccttcacacatgggaaaggagatcactcacatcaacattgtgctcactggccctgtcgaccctggcaagtctaccacccctgacccacctgacctacaagcctggaggtattgacccctgagtgcccgccaggttctagaacgaggttgccgaggtgaac

SEQ ID NO: 91706 - DNA, 666 bp, Zea mays
  Clone ID: MRT4577_183631C.1
cctcgaggccggccggggcaggcatccctctcgcgccgtcactcgacacaaaccacacagtctcagccagcctcaaggcgcgcgcaacgccgctcctccctgcgcttgcgtgggtcgtcggcatggacaagcaggatgagaggaagaagccccacgggaaaacagaccccaagaggggcgacatcatgaagcggatcataaaggacctcaccggcggcggcaacgacggcggcggcggcggtgccagtgacggtggtggtaacaacgacaacgacagcggctccggctccacccccgctggcgccgactgacgcacatggcgcgtgcgtacccagttacgacggcaggggcgagcggtgagcccccgtgaatccgtgatggtttgtgtagttgttgctttctcgaatctggttatctggcaaggctagctagctgccggttgcgtctctctcctctttgctgaatctctcctcgttgtcgttactattcacgtggtaattattatattttttttttgtctccccacgaacggattaattcgtgcgtgttaattgtatccttgagactttcaccacctcggatcgtgattgcatgcatccgtaattcgttccgggaatatatatacctctttttgttgatgcgaaaaaaaaaaaaaaaaaagcggcc

SEQ ID NO: 91707 - DNA, 253 bp, Zea mays
  Clone ID: MRT4577_183632C.1
ccaacgctccccacaacttcagaatttccgagactaccgcattttggagttcaactccagacccaacaccctccttctccccaagcatgctgatcctgattacctcatcgttatccttaacgggactgccattctttgcttggtgaacaacgacgacagagactcctagagacttcgatctcgtgatgccctgagagtcccctcaggaaccacatactatgtcgtcaaccctgacaacaacgaaaatctcaga

SEQ ID NO: 91708 - DNA, 289 bp, Zea mays
  Clone ID: MRT4577_183633C.1
attcggctcgaggctgaacgaaacactttttttttacagatgcttccaacgaatcgggggagcgcgccaaccgaacctgcaaaagctggatgtggaccttatgtttatgaaattaatgctttttcaggtggttaatgaacaaactatccttgccttacaacggcccctgaggaagttatggtatcagataactagacaaacgtgatgtttttttatcaaaccacactcgggacagttttgagacccatacgatggcatacgaatagctaccgtaaaagagcatcactga

SEQ ID NO: 91709 - DNA, 1029 bp, Zea mays
  unsure (1)..(1029): unsure at all n locations
  Clone ID: MRT4577_183634C.1
ttgggtacctccgagccggccgggaggccggccgggggccgggtggcgtctgcgatttggccggccgaccacgctgcagggatcccactcgcgccgtcactcgacacaaagccacacagtctcagccagcctcaaggcgcgcgcaacgccgctcctgcgcttgcgtgggtcgtcggcatggacaagcaggatgagaggaagaagccccacgggaaaacagaccccaagaggggcgacatcatgaagcggatcataaaggacctcaccggcggcggcaacgacggcggcggcggcggtgccagtgacggtggtggtaacaacgacagcggctccggctccacccccgctggcgccgactgacgcacatggcgcgtgcgtacccagttacgacggcaggggcgagcggtgagcccccgtgaatccgtgatggtttgtgtagttgttgctttctcgaatctggttatctggcaaggctagctgccggctgcgtatcgtacgttagtgtagggggcggtcagcgttcggatggcgggatgggtggtgtgcaatttaagactgtgctgtgtaacacttgtgctcaataattgtggatgatcaaatcgatggggccgcacgcccgcacctatttgcgtcaaaaaaaaaaaaaaaaaggcctctcctctttgctgaatctctcctcgttgtcgttactattcacgtggtaattattatatttttttttagtctccccacgaacggattaattcgtgcgtgttaattgtatccttgagactttcaaaanaaaaaaaaaaaaaanaaacccacgcctcctccagtccttcttcgtaagccttcaaaccgacgaatttgagcaactgcacccagagcgcgatccattgccggggaagaagcaacttgttgcgagcctcctctatggcgagctccgaccatggttccaccaccgcccccagggacgtgccgggcagctacggcctgccgctggtgggcgccgtgcgcgaccgcctcgactctactacttccaggggcagg

SEQ ID NO: 91710 - DNA, 599 bp, Zea mays
  Clone ID: MRT4577_183635C.1
gccggccgtgccgggatcccactcgcgccatcacccgacgcaaaaaccactcagtctctctcagccagcctcggcgcgcgcaactccgctcctgcgcttgcgtgggtcggcggcatggacaagcaggatgagaggaagaagccccacgggaaaacagaccccaagaggggcgacatcatgaagcggatcataaaggacctcaccggcggcggcaacgacggcggcggcggcggtgccagtgacggtggtggtaacaacgacaacgacagcggctccggctccacccccgctggcgccgactgacgcacatggcgcgtgcgtacccagttacgacggcaggggcgagcccccgtgaatccgtgatggtttgtgtagtttttgcatttctcgaatctggttatctggcaaggctagctgccggctgcgtatcgtacgtgtacgtgtgtgtagggggccggtcagcgttcggatgggtcatgggtggtgtgcaatttagactgtgctgtgtaacacttgtgctcaataattgtggatgaacaaatcgatggggccgcacgcccgcatgcccgcaacaaaaaaaaaaaaaaaaaaggccccta

SEQ ID NO: 91711 - DNA, 1221 bp, Zea mays
  Clone ID: MRT4577_183636C.1
aaaaaaaaaaaaaaaaaaaaaaaaaaaaaaaaaaaaaaaaaaaaaaaaaaaaaaaaaaaaaaaaaaaaaaaaaactttgtcgagacagtaggctgtgttgagcgcgtctgtgatttggcactagtagtagtagcactagtataaagaagccccccgcccgacctacgcaggcatcccactcgcgccatcacccgacgcaaagaccactctcagccagcctcaaggcgcgcgcaacgccgctcctgcgcttgcgtgggtcgtcggcatggacaagcaggatgagaggaagaagccccacgggaaaacagaccccaagaggggcgacatcatgaagcggatcataaaggacctcaccggcggcggcaacgacggcggcggcggtgccagtgacggtggtggtaacagcggctccggctccacccccgctggcgccgactgacgcacatggcgcgtgcgtacccagttacgacggcaggggcgagcggtgagcccccgtgaatccgtgatggtttgggaagttgttgctttctcgaatctggttatctggcaaggctagctgccggctgcgtatcgtacgttagtgtagggggcggtcagcgttcggatggcgggatggggtggtgtgcaatttaagactgtgctgtgtaacacttgggctcaataattgtggatgatcaaatcgatggggccgcacgcccgcacctatttgcgtctcaaaaaaaaaaaaaaaaaaaaaaaaaaaaaaaaaaaggcatcccactcgcgccgtcactcgacacaaaccactcagtctcagccagcctcaaggcgcgcgcaacgccgctcctccctgcgcttgcgtgggtcgtcggcatggacaagcaggatgagaggaagaagccccacgggaaaacagaccccaagaggggcgacatcatgaagcggatcataaaggacctcaccggcggtggcaacgacggcggcggcggcggtgccagtgacggtggtggtaacaacgacaacgacagcggctccggctccacccccgctggcgccgactgacgcacatggcgcgtgcgtacccagttacgacggcaggggcgagcggtgagcccccgtgaatccgtgatggtttgtgtagttgttgctttctcgaatctggttatctggcaaggctagctagctgccggctgcgtatcgtacgttagtgtagggggccggtcagcgttcggatggcgggat

SEQ ID NO: 91712 - DNA, 336 bp, Zea mays
  Clone ID: MRT4577_183637C.1
atccatttgtagaactgctcgtacagagcggcgctttcagtactgaggaaggcgcggccttgtacacttgcgtcgctgtaaaagaaaatgaccctctaactgcttgagaacattatccgttacggcggtaacgcaaacagctcaatgtaagacggaaccactccgttggaccccgcggcctgtgacgggaacgcacatatcgtttagattttgttggaacacggagctgtcatggactagtactacaacaatggcttgtcggttagagctctaccttaccagcaagggcaaaaggacattcagtttttctttcgatcgccgaaaacacatatgcag

SEQ ID NO: 91713 - DNA, 590 bp, Zea mays
  Clone ID: MRT4577_183638C.1
gccctctctcgagtttttttttttttttttttttttttttttttttttttttttttttttttttttttttttttttttttttttttttttttttttttttttttttttttggcaaaaaaaaacggggggtgttttccccttccctagacaggaagttttaaaaaaaaaccccgggggagccccaaaaaaaaaccaaccggggaaaaaacctttttttgttgttcaggcaaaaaatttttgaccccaaaaaaactttgcccacccttactttcccaaaattttttttaacaaaccccgccggtttgtttgggaaaacaaaggttaacctatttccccccaaagttccaacccctcaaatttgaaaaggtgttcattttaacaaaaaccggggggaggggaaatcccaaaaacccttttttttttcccccccttcctgaaagaagggctttttttttaaaccttgagggcctgtttgagccccctttccaaaaaaacatggccccaagtggggggggaaggcccccccttttttttccaacatatggggcaggaaaaaaagggttcctggggaacccctttggaaggctttt

SEQ ID NO: 91714 - DNA, 607 bp, Zea mays
  unsure (1)..(607): unsure at all n locations
  Clone ID: MRT4577_183639C.1
atgcgttcggtctccgacgacgaataaaggtatgtgcggtcaagttcaagattttttcattcatgaactaattgttgatgcacccttgtttgtctaggatctggggtgaagccttggataattgcagtgtctgtagcacctcctgtggcggtagtagcattctgcttcatcctttacaaccgtaggcaaaggataaggttcagaagaggcagatctaaactacgacaaaagcatcctcgcaacaacttgaaaggagacaaactagattgggaaatggaaacagagctctcagagttttctgtttttgacttccatcagatattggaggctacagataacttctctgaagaaaataaacttggggaaggtgggtttggccccgtttataagggtcagtttcctgatggaactgagatagctgttaagagacttgcttcacattcagggcaaggttttgtagagttcaagaatgaagtacaactcatagcgaaactncaacacacaaatttggttaggctcttgggatgttgctctcagggagaggagaaattttggtatacgaatacttgtcaaacaaaagcttggatttctttatctttgatgaaaa

SEQ ID NO: 91715 - DNA, 350 bp, Zea mays
  Clone ID: MRT4577_18363C.1
atagagccaagagacccatcaagaggccgcctacaggttaatcaatggcgacggcggctagatgctgtcaccggcggctcatcctcgcgagcgccggcctgctatccgtgctcgcggctgctagcgccagcgccgggacctcctgcgtgccagggtgggccataccggacaacccgctccggagctgccgatggtgcgtgaccagccggacctgcggcatcgggcccagcctaccgtggcctgagctgagcaggagatgctgccggtagctggccgacataccggcgtactgacggtgcacggcagctgagattcctcatggacggggcgatcctgtcgagcccggactc

SEQ ID NO: 91716 - DNA, 474 bp, Zea mays
  Clone ID: MRT4577_183640C.1
catagagcaactggaatagcaggtccaacaaaagcccaacgcaccagcaggaatggcgtatagacgactcttctacgacgacccctacgactactactacacctacccgtaccactacgcctacccatattaccggggccagcaccccgatccgtcccgcggagtccgaggcttcttgccggccgccgcaaaagccgagccggaggcggagaaggtggacccaggggccacgggcgagtcttcgaggtcggactgcgttcccgtccgcttcggaagatccgatccggaaccggagcgcggggcgagacagaatgccacacgccgctgtgctgaagaagctggcgccgtcgtcggaagcaggagcgattaggatgcaagccgatgggcgcgggttcatgggcaggaagtccgtgcgtgctggtagtgacgagaagcgtgacgacacggaagacagagagaaagttgcgcgcaagg

SEQ ID NO: 91717 - DNA, 212 bp, Zea mays
  unsure (1)..(212): unsure at all n locations
  Clone ID: MRT4577_183641C.1
attcccgggtcgacccacgcttcagacgttgccttctcgtacacctactctatgcttctcatagaaatccancacactatgaaggcacgttcattatataactttacgatgaacatgaccaactactactgcatcaacacatctaccatcttctacatatctctcctattcatcacctacactgcctatttcaacacctttccagtgaactt

SEQ ID NO: 91718 - DNA, 319 bp, Zea mays
  Clone ID: MRT4577_183642C.1
ctgacgcatgagctcacggcggaccattttatcgactaccagatcgacgggtccaagggggtcttcaatatcttctgcaacgacctaaactagttcttcacgaccaacttgctgtacactgtcatgcacttgcttttgaaaaagtatacagaggctcagctcgacgacaaaatcaacgaggtagatgctgatgtaaacgacatcattgatgtgcgagataacattaatcttatggctacgaagaataaggtcaccgtctctgacgaatagctcatggatgccttccgtatgtttaacaactaccaatacggattcattt

SEQ ID NO: 91719 - DNA, 352 bp, Zea mays
  unsure (1)..(352): unsure at all n locations
  Clone ID: MRT4577_183643C.1
ncgtagcgttgcgcatgacgtaacccgaaagtgcgtattgcacaccgaggagattttaatgttacccgataagaaatcaaaaggggcggactgtttacagtattcaaatttacttacgcgtccatctcaactatattctgccaaattaacactcaggaggtgctctccctatgcgtggatctaacaaatggcatatctcgaaaaaaggggtcgtatccaatttaactgccctgggagcacatcctattttttccgcatgctgaaatagcaatggtgcccgcactgatgcccctcactaacagtggcgcatgttgaggtgacactcagactcaccttgtacttgccattaacc

SEQ ID NO: 91720 - DNA, 160 bp, Zea mays
  Clone ID: MRT4577_183644C.1
tgctgttcttcgccgccacgccctgcccgaccaagagccaaagccccgtccaagccgccccagccggacctgacgccgccgagcgcgtctccgcctggagccgaccgagcccgtgctcgagcccctgcaccaaccgcccatggagcccgcgcccagctgc

SEQ ID NO: 91721 - DNA, 847 bp, Zea mays
  Clone ID: MRT4577_183645C.1
cctcgaggccggccgggatgaagtttcttactgtgccaatcacgcctcctatttaataccattcctctcgctctttctccttctctctctcgtcctctcttcctctcttgaacaatcaacacctctacatacactcaccggtcaacgttcaaaatgctctccaacactttcctcgcgctctctcttctccccctcactctcgctcacttcaacctcaacttccctccaacgcgtggcttcgacgaggacaaggagggtaatttcccctgcggaagttacgaccaggtctcagataaacgcaccgatttccctatcagcggtggccctatccaattggttctaggccacccacagacaaatgtcgccgtttacatggcgattggcgacaaccctggaagcggattcagtgtcgttctgaagcaacagcttatggtcgagggtctgggtaacttttgcctgggctcggttagcattccaaaagacctaaacgtgactgctggcacaaaggcatctatccaagtcgttaccaacgcgcacagctctggcggtctgttccagtgcgccgatgttactcttgtcgacaagcagctctcccagtcagaatttcaagacaactgcaagaacaacacgggaataaaggtggctcaagagaatatctctggtaaccccaactctacagctacgggtacgggtggctcagacgacgacgatgatgacaagcccacagcgtctggtagcggtagcagtagtgcagcgaagcccacagcggctagcgcagcgacacatgccccaagcattttcatgggttgttgggtgcctgtcgtcttgctggaattgctatgctttg

SEQ ID NO: 91722 - DNA, 687 bp, Zea mays
  Clone ID: MRT4577_183646C.1
cattgggtacctcgagccggcgggagcgatctgaagttgttctctctatcgaacgaactcttggtccgatgacgatctagttgaggacgacgatgattgctgtgatgaacatgcagtaatacgccgcggagctgcggctggcctgcgctggtggcggcggcgctgctggcttcgtccgcttcgacggcgatcacctgcggacaggtgcggtcgtcgctggcgccacgcatcccgtactctacgacgaggaccagcgggctctccgcgtcgtgctgcagtggcgtcaagagcctcaacaggacggcgcggaccaacgcggaccgccacgcggcgtggctctgtgtcaagagcctcgtcaacagcgtcaagagcgtgaacatgggcaccgtcctcaccatccccgtccagtgcggagtctccgtcggattccccatacagcatggccaccgactgcagccagatcagctaacatacaacaacccacctagtaagcctaccgaacgtacacgcacaccccgcgcgctgaacgagtgatgaatgcagtgaagagataaaatgaagctaagtgtattgccacgagcagcatgcattatttatcgatctatatatatatatactgtactgcagcactctattatatatgtatgtgtggcctgcactgctaggtacgtcgatccacctacttgt

SEQ ID NO: 91723 - DNA, 426 bp, Zea mays
  Clone ID: MRT4577_183647C.1
gggcaccaccaaagatgggttgttgtttgggggcggctcggtttgtcaaagcaagatgtttgtttgggagcaattgttgcagaagaaagagggggggggccccccgcgcgggggggggggggaacaacaccggcggggggggaaaaaaaagggggggggggggacaccagttggcggggtgaaaggggggccccggggtgggggcaagggggcgggaaaacgcaaacctggggggtgggtgaaagaaagaaatgggtgccaccccacaacagggggctgggggaatggtagttggtggtgttaaaaaaacgggggagtgttcagcgcccctagggggtagagggaaaaaaacgggggggggggaaaaaaggcaggggggaaagggagcacagggtggggaaaaaaaaaagccctggtgtttggggc

SEQ ID NO: 91724 - DNA, 721 bp, Zea mays
  unsure (1)..(721): unsure at all n locations
  Clone ID: MRT4577_183648C.1
attgggtacctcgaggccggccggggaaccctctaggagtcgagcaccaccataacatcgagtcgccagctagtgtagagagagagagagagtgggtgccgccgcgcgcggaacctggagtggcgccatcgttcattggatttcaggccggggaagatcggcaggtgctacccgcacgtgttggtagtctgtccgagtgggggaattggctgatgtacctgcgagttctcgcctaagtccggctctgccgtggaatttctcggcatcgacgatcggctgtgtcactacctcagattttgagaacgaggaagaaataagtgttgaagaagaggagattgctccttcaacagaaaatccacctgccgggaactgtttttactttgacatctgtggaacagagcccgactctcctacaacacaaggtgcggaaacagcagacttttgttgtttttgctctaaggtggtgcccaaagaagaacctcaacagtgaagtcgcgggaggatgttggtctcccatttggaaaacaatatacttttatgtaggaggggtttttgcctcctaagtttgtaataataatacttatgcactcatataccctggttttgtaataactataacactctctttatattttgatgaatgtanattaagttatttgtattcgcttccactttatcgttccctccatgtgatgntataaaaaaaaaaaaaaaagcggcc

SEQ ID NO: 91725 - DNA, 4126 bp, Zea mays
  unsure (1)..(4126): unsure at all n locations
  Clone ID: MRT4577_183649C.1
gtgagagaggatggaggactttaagaggccaggagtggatgctttcttgacatctcggggaggttttatgaaattgcagtggtaacaacgcagagtacgcgggatgttgatccggttgttgataggctggatccaaagggcaatattcgacataggctatcaagagttgcaactaagtatgaaaatggaaaacattatcgggatttgtcgaagctgaacagaaatcctgctcaagttctttatatcagcgctcatgctaaagagtcaagtctgcagcctgaaaattctgtggaaattaaaccttggaagcttgaaaatgatgacactcaactgcttgatcttattccatttctagaatatgttgctatggcaagaccttctgacatcagggctgttcttgcatcctatcaaagtggtgatattgctgccgagtttattgagcgctctaaggagcaccagaggcgcatgcaagaacaaaagaaatcaggacgcatatggaggcggtgaggactaaaagttggaaggaaaacataccaatgattttgacgcttcaatccgaatgaagtgaatggatccatcaaggattacaattttgtcatcttttgccttggcggttaataaacatactaaacgttatttataatcattcagaagacgccataccggctgaagtatagcgcttgctgtttgtatttttaagggtaatgaaagtattaatgcggcggttgctgctttgtttcaagagtcgcgatagtattaatgtggtgcttgcgttttttatggattttatgatggtactccatcaccatctctttcaaaatactatagcctgttctaaatcaaacatggctaagtttaacaagaaatatatcaagatttccaaaaaaaaaaaaaaaaaaaaaaaaaaaaaaaatcncacaattctgaatagtgcgtgagttccagactccatagaccaaacagggctcgagttccggactcgatagaccgtctgatagtcatctcatccctcccactccgctgctacgccttcttctacatcgcaatcacgcgcccgtccggctctcccccttctccctcgccctcacgcgctcacgccctcacctcagtcctcatcgctctcggccgcctgcttaaaccctccgctcgaaccggaacccaaccaagaacagatccaaaacgcaagccgcaccatgtctcgtgtcgcgggctcgcgcctcctccctaggatctctgcgctctccttctgcaccgcctccccggcaaccgccgccgcttcctcctcctcatccacagcgggcggtggcagcggcagccgccaccgcctccgaggcttcctccaccgccggagacccatcctcccagccgccccagactgcccgcaagccgtggggcgcgctcaagttcgccgccttcgccgccgtgtccaccgcggttggcggcacgggctacgtcagctacgcttattctctagaggaagtggatcagatgacgcgggagctccggaagaagtcgaagcagcccattcctgaggatgcttctggctttgagaggtttcaggctatggcttattcagcagctatgaaagttcctgttgccgctattgaggtatacatggatgtgaggagccaaattgaagatcaaattcggggatttagcgaaccagtatcagacaaacttcttccagatcttgctcctcaagagcagcatgtattgactctagttctggatctgaacgagactcttgtatactcagattggaagcgtgagagaggatggaggacctttaagaggccaggagtggatgcttttcttgaacatctcgggaggttttatgaaattgttgtgtattctgatcagcttagtatgtatgttgatcctgttgttgataggctggatccaaagggcaatattcgacataggctatcaagagttgcaactaagtatgaaaatggaaaacattatcgggatttgtcgaagctgaacagaaatcctgctcaagttctttatatcagcgctcatgctaaagagtcaagtctgcagcctgaaaattctgtggaaattaaaccttggaagcttgaaaatgatgacactcaactgcttgatcttattccatttctagaatatgttgctatggcaagaccttctgacatcagggctgttcttgcatcctatcaaagtggtgatattgctgccgagtttattgagcgctctaaggagcaccagaggtctgtggatattttcctatgttctatcacctttttatacttaattgatggcaatctgaatgttgatgtaccaactccacttctgtgaaattataagttatcatcagtcatgattatgaacaccatgagttcatcagtgtctacaataatcaataatgtttctgttcatctttaatatggacagttggtgatttggcatgccttgggaaattaagtctcagctgagagaaatagtgtattggtcgtcgaactaaactggatatagtttatataatatactgatgtattagtgaatcccactgtattacaagacaataattgattacttggaacaaaaaacacgaacaatcttgctccatgtctggtgataacaatcttgctccatgtctggtgatttatcctttgtttctcccttttttgctataacaaaaagtagggtttcctgattcatattgctctcgtgacaaaaacagtaatagatttaactgggtaaaagtcattgctatttctataatctaataggagaataaactttgatctcgatatgatggggatatgcagttgtaactttgtatcttctttccttgttagcttacacagtataattggtgcacattaagataaggggttttccatttggccattaaatactccgaattaacaaagctgcccctcaaataaagtaatttgtggaaactatgccacttcatccagtctctcctgatgctttcttttgtgcaaatttttctacgttggcgtgtagaacaatctcattcatttaagtatcttgattattctattcagcaatctgttttgtgttgagtggggctaaaaactgttgtctcactcctcaaactgtgcttgatctaccaatttccgtacctctgggatcttgtcgcataaacttcataatctagcacattttagttgccagttattatgtttgatggcaacctttctgtcatctgcaaacatgatgggggcctatttctggttatatttatagccattttttttcggttcaaccattcattgcttgctactaagctgccctttcttaaacaatttgattggtgttagagcaagacattttttttgccttttgtgtgggctgtgttgatttctttaagtacttctgcttgcaatagctgtacgactatatgcttcctggccactatatgcgtaggaaaaaagtcaaacggtcttatttttgacaggaggtagtaacatactaacatgtgtaacctaggtggtagtatagaaatgctctagtgtaccacgattatggattgtcaattttgcttaacgcttattcacatggtatcacttgtcgatttagaacttcattaaagctttttagcaccaccaatatcaccttttgcaggcgcatgcaagaacaaaagaaaccaggacgcatatggaggcggtgaggactaaaagttggaaggaaaacataccaatgattttgacgcttcaatccgaatgaagtgaatggatccatcaaggattacaattttgtcatcttttgccttggcggttaataaacagaccaaacgttatttataatcattcagaagacgccataccggctgaagtatagcgcttgctgtttgtatttttaagggtaatggaagtattaatgtggcggttgctgctttgttttaagagtcgcgaaagtattaatgtggtgcttgcgttttttatgggttttatgatggtactccatcaccatctctttcaaaatactatagcctgttctaaatcaaacatggctaagcaagaaatatatcaacatttacaatgtcgaattagtttcattaatatatctcaatagcgtatttttctaaaaaaaaaaaaaaaaaaaaaaaaaaaaagtactctgcgttgttaccactgct

SEQ ID NO: 91726 - DNA, 469 bp, Zea mays
  Clone ID: MRT4577_18364C.1
gggtacctcgaggccggccgggcaccaacgtcgatgctgcgccaccccataccgccgcctcctccgctagggttttggagtgaggatcgccgatgtcgacggctcccaggcgccccttccgaggacgcggcgccccgcacccctggcaccggatacatccgccgcgggcccgcccctgacccgggtcccgtcgacggagacgagaccctgtgcaaggccgccttcaccagcgccgaccatctgcgaccccagacgtacggacacaccctaaccggccgcgatatatcctaccgaaacgacctctaataatgctcgactatgcatcggacatacccgggtttgagagagactcaaaagaagaagaaccggcatcgagctcggcatcgtgcgccactaacagagggaacttgtgaagctagatacaaccgtgatcatacgtgatgctaggattgacatgttcaagggtacc

SEQ ID NO: 91727 - DNA, 774 bp, Zea mays
  Clone ID: MRT4577_183650C.1
cctcgcggccgggccgggagcggtagtagagactacatacatcaacaccacacacacacatgctcctccacacctgaaacatttgcaggctcgcatcaggcatggatgatgacttcactttccccactcttcacgcaggaggccagctcgttccatcagcgttccccccgcaccagctcggcctcggcggctccccctcgcggtggttcctcgccaccgttgctggggaggaggaagaagaggaggaggaggagaagatggacatgctgtgggaggacttcaacgaggagctcgccagcgtgccgccgctgtgcccgctgagccctgtgatcaacaaggaacggttggcgatgagctggctcgacctcgacgacgacgacaagatggtcgtcgtcgatctggagaagcactgcaagggcaagcatccccaccacccacaggacggcagggtggtccggcgccggaagtggagcctcatgctgatgctcaggctcctcaagaagctgttcctcgtcaacaagtccaggaacccgaggactgcgcccatctgatctcatctgatctgatcctcccaagaaatcagtggcggatgagatgagtgaaacaaaacatagtagtgtgtgtgtgtgtctgtgtgagcgtacaatgctctatacaagttttaagttcacttgatgtttctctgtcagagtttacttgatgtccctcttcaaagttgcgtttttcttgctatcgataacactatcctaacgaaaaaaaaaaaaaaaagcggcc

SEQ ID NO: 91728 - DNA, 497 bp, Zea mays
  Clone ID: MRT4577_183651C.1
ggccgcttttttttttttttttttggttttttttttttttttttttttttgtttttttttatttttgttttgtctttaacaatagacaaaaaactatattttgggaaccataactcataagaaaaaaaaaagagggcaccaccaatgacgggaagaagacagaaagaaagacgcccccgacaaagggggggggggaaaggcaggaagggttgcacccccaagagggggccagcggaaggcgcagcgggcggggagaacggcaacaattgtgggggggacaagaagggagcagggctcacaccagcgagcgggctgaaagggaggaggggttgccgccgcaaataagcaggagaggtcaaagctggcgggggggtgaatggaagaaaaagctgggggcaggcagcagatagctgggtgaaaggaagggggggttgccgccaataagaggcagagttgaatgcagctaggtgggtgaatggaagaaacagttgctgccg

SEQ ID NO: 91729 - DNA, 176 bp, Zea mays
  Clone ID: MRT4577_183652C.1
tgtctctctgcttgcttcttgttggtgtaactaaggaacaaagattgcttcttcttcccttttgttttcaaatttcaatttttcatcgggttctctgaaatggagagagatttcatgggtctcaactcaaaagaacctcttgctgtggtgaaggaggatatgcacgtttatggctt

SEQ ID NO: 91730 - DNA, 1932 bp, Zea mays
  Clone ID: MRT4577_183653C.1
ccggggtctcgccctaatcttcatccggtgtgcccccgctcccgcagccccgcgccggcgctccccccactcgcgctcggcgcagcgcccccgcaacttgtgctcgtccggtccagagcgggaaggcggcgacgccccccatgcgcggcacagctccgccagccgtccgccagtcactcgcgcaaggttcgcatcgtaagggtatacgcataggcggccagggaagtctgcagccgttgggtcgcctgaccctcgcctctcctctgcagtcgttgtccccccgtagctcgatccaggagcaaaagactgaacctgtggaggttaggttgattttaagaagtacagtgtggcatagtaccataattgattttgcttttgcaaacgaaacgtagactatggcaacccgaatcctgtcgcgtcaaaatctgagaaagttggcttcatgcacgctcccgaatatatcccagaggcaaatagttaagcattatcctccagctctcagatccactattgcttcccccagcaaattcccgagcccctcctacctgtcagggcattccttcgctgctgacagaggaactctatgggacaggaaatctagtttagagtgatgatcgtaaccacctgctgcaaatagggacgataatatcccgctacaaagagaaggttccgcacatagaggcggctgctgctccttgcgatgtgggttcacaaggcgaggacgccggctattctgtatgtcccacggcgcctctgcccctggggtctggaacttataccgtgagtgcccgctcctgaagcgtggctaaaatataagatcgagaaggccaaactaaaggaagctaggttggtagaaaaactaaagaagtatgagattgccaaagcccaaggccctatggctaaagtggatgatcttagcggcgaagaaagattttacttgaagaaggtttcacagaaaaaatcaaattatgtccctgttggaaggcgaggagtgtttggaggcgtaattctgaacatgcatttgcattggaaaaaacatgaaactgtgaaggtcatatgtaagccctgcaaaccagggcagatccaggaatatgcaaacgagatagcccgactgagcggtggcatccctgtcaacgtcattggagatgacaccatagtcttctatcgaggaaagagctatgttcagccagaagttatgtcacctgttgatacactgtcaaagaaaaaggcacttgaaaaatcaaaatacgaacagtcgctggagacagttcggcgtttcattgcaatatccgagaaggaacttgagctttattaccggcatgtcgcactttatggaatttcacaatcccagaaatctgatcttgtttgcggtgatgatagagaagcttctttgctcaaaatggagggattggatcgagggaagggccaagagcctcacctggctacgaatcatttctctgatcttcacattggtgatgtttctgaatccgacgaggaagatagttccggcagtgaatatgatgctgacgacgacgacaacgagaccgaaagcatggccagcgtttctgaagacgctagctaatgtttctgatcatggaggtttagccaattggggcgggcgaagtgtggttaccttgcctcacataatgaccttgttggctagaaatttgccttggaccgagccacctcatcataacatgcttctgttgtcagctgtaattaagcttcttctttttttggtgtggcggtttaccttgaaggacttgatgtatgccagtacaacaaattcagccaaatgtggccgtgtatctaacatatccttgtaataaaattgctccctccttgctgtcagaggagctgggacagacgtgacagctgtggaagagtactatacattaccagggaagaggtactataatattgtgctgctcc

SEQ ID NO: 91731 - DNA, 452 bp, Zea mays
  Clone ID: MRT4577_183654C.1
gttctagatcgcgagtggccgcccttttttttttttttttttttttttttttttttttttaagccccttccgatcggtttttttataataataacggcaacaactcacaaaccagtcacacgccttttggcagcccgttgatgttaaacattacacgagctgaataatcacacagggctccatttgatctccacgtgtatcatcccgttcctggagttgatgagggggtacttttggttgatccggccgttgttcaccacatccaccaggtttatattcacatgccccagggattccttggtggggaagggaagcccggggggtttgtttttgacttggatggggatcttatcttccaccggaggctcgtctaccatgaactggaactcctcgctccattttggctctcttgttttccttatcacctgcaacggcagggcacatagggttca

SEQ ID NO: 91732 - DNA, 567 bp, Zea mays
  unsure (1)..(567): unsure at all n locations
  Clone ID: MRT4577_183655C.1
ccggtaccggcacttcccggggtctcctcctnccgcatgcaatccaagcacgcacatctacgactgcgtgtccgcctcgcgctagacatatattcagggatggaacacaaagtggcctggtgccagcagcccaagggcccaatcctatgcatcaataactgtggtttctttggaagcgctgacaccatgaacatgtgctccaagtgccacaaggagatgatgatgaagcaggagcaggcccacttggctggctcctccatcgatagcatttggaatggccgctataatgggaaatgacctgcaattgctgcaactgtggctgtcgcagttactcatgcactggagaagactatagtcgcgcatcctatgcatgtctctcaaaccatcgaggctgctgctgttatctctacagccaaagaatgaccaaaccggcgtcgcatacctgtgagaagcgtgattggttgacgggttctaactgcagatgcaggaacacgtactgttcgatgcaccgctactcctacaaacacgactgccagttctactattgaactgcaggtagggacgcta

SEQ ID NO: 91733 - DNA, 418 bp, Zea mays
  Clone ID: MRT4577_183656C.1
aattgtatcaatcatattttttttttttttttttttttttttttatatcttttttatttttttttttttttttttttattttttttttaaactattttttttgttttttttttttttttttaaaaaggtgcccccaaatcctttttcccccccaaaatttcaaaaaattggtaatttgggccccaatcctttggccccaaaaaggaaaaaaaaaaggcgggcgggaaaccttggggtatttgggcaaggacacctcccttctttctgagcacccccgggggggttcccccccgggggccccggtgaaactccaaagccagattttccctcacctgcctccccggaacaggggcttaaatattttaacccgcccaaaaaaaaaagggggatattccaaccggccccgccgaaaattttc

SEQ ID NO: 91734 - DNA, 514 bp, Zea mays
  unsure (1)..(514): unsure at all n locations
  Clone ID: MRT4577_183657C.1
gacaagctactattatttcttttttttgtttgattccttttttgatggtgccgactatgatgtcaccaatgacgatggctagtatgatgccgccgatgatgacgccaagcatgtatttcaccaagnccatgcccagtgggggggggggataagccgaccatgacgccaccaatgatgatgccggggatgatgccaccaacgatgatgccgagcatggcgtcaccaatgatgctgccaggccacaacacggaggccacattgctactttgggtctaacgaacccatgtttcaacaacatctctgccacctgagccacttcccgctggccagtgcttgctccccgtgtcggtgcactgttccatgacactggcggcttatgtccactctgcctccccgctcgtcctgcttcgcgcgctgttctaaagctggccatgctcttcttccagactctgctttcgggctgttaaagaagtgctcccttggaagacagaccccaatttgacgcaaatgcatc

SEQ ID NO: 91735 - DNA, 265 bp, Zea mays
  Clone ID: MRT4577_183658C.1
gtcagtgagaaacccattaagagcctttttcacgcccctcagcttctcgcctctagacggccaccccacgcagatatggcgacgcgaaccgtgagcttcccctcctttgcggtctcttaccagtgccgaggtgcgaggaggatgcatttacgttgcgagggacatgagaagttgcgagtagccgtcactgccaatgcgactttcttttaaagaagttcactagcttttatggacacttgaaagtcaacttataaaaaaaatccat

SEQ ID NO: 91736 - DNA, 498 bp, Zea mays
  unsure (1)..(498): unsure at all n locations
  Clone ID: MRT4577_183659C.1
cacccgaggagacttagtacgacctgctggagctcgaggatgtttgcgcgctgcatgctggcacaagctacgtccgcacgatagcccaccaacgctagtagaccgagctcagatggctcgtgtatgagccactgatgagaaacagtcgatgatcgtcacattgtgctaaactcaccgcccccaatgtctcgagacaatgcctaaaggtagggtttatcaaggggaatgcataaatcgcatcactcaacgacaaaccgcagaacgaggcctgaggacaaacacagagatacataaaactcgaaagacgcattttttatcagagacaggcatggctagtgataccacaccagggatctatgcgtcattcangagcgataagtagtaactcagagaggtcttgactccacagcccatgcacagacggacagtcaatcatagacgcaggacgatgtatgcatagacatgacacagttgatagagtcaagaggctaagtagtc

SEQ ID NO: 91737 - DNA, 1409 bp, Zea mays
  Clone ID: MRT4577_18365C.1
attgggaccctcgaggccggccggaaaaaaaaaaaaacaacagacaatctaccccaccacacgcacatacacacatcctcctctcaactcaaggtctcaagcagactcggaccaccccacctcatcgcgcgcttagcctttctccctttgtctccactcccgaccgcgatcgcgcgcgcggcgttcgtggccacagacccagcaagccttgcactcgttgcaccaccagccggcggcgaccgcgcgatgagggccaggaaggcgaagacggcgacgtcgtcgttctggaggtcgctcctgggcggctgcctgggcggcggcggcggcggagggcgggcggcgggggacaggcagcggaaggtgcggccgggcggcgggggcgggcggctgtcgttcacggacctgagcggcgccgcggaccaggacctgtcggcgtcgctggtgggctccaacctgcacgtgttcagcgtggcggagctgcgcgaggccacgcgcggcttcgtctccggcaacttcctcggcgagggcggcttcggccccgtctacaggggcttcgtcgccgacggcgtcaagaaggggctcaaggcgcaggccatcgccgtcaagctctgggaccccgagggcgcccagggccacaaggagtggctggcggaggtgatcttcctggggcagctgcggcatcccaacctggtgaagctggtgggctactgctgcgaggacgagcaccgcctgctcgtctacgagtacatggagcacggcagcctggagaaccacctcttcaaacagattcctgccgtgctgccctggtcgacccgactaaacattgcagtaggcgccgccaagggtttggcgttcctccacgacgccgagaagccggtcatctaccgtgacttcaaggcctccaacatcttgctcgactcggactacaaggccaagctgtcagacttcgggctggccaaggacgggccggagggcgacgacacgcacgtgtcgacgcgcgtgatggggacgcacggctacgcggcgccggagtacatcatgacgggccacctcacggccaagagcgacgtgtacagcttcggcgtggtgctgctggagatcctcacgggccgccggtccgtcgacaagacccgccccagccgggagcagaacctggtggactacgcgcgcccgtgcctcaaggacccgctcaggctgggccggatcatggacccggccatggagggccagtactcgccgcgggcggcccagagcgcggcgctggtcgcgtaccgctgcctcagcggtagccccaagaaccggccggacatgtccgccgtcgtccgggcgctggagccgctgctcgacctccacgacgacgtgcccgtcgcgcccctgggccacgccggccccgtcgtgctgttcgtagc

SEQ ID NO: 91738 - DNA, 568 bp, Zea mays
  Clone ID: MRT4577_183660C.1
gctcgaattccgttgctgtcgccgttgctgtcggtatgaccctagaaatctaaacttttggggctattcaggtgcatgtacatctactaacagtcatttaaaaacttataatattttagtcagattagattacatatgcttttagcatttgttttattgtttaagatggccctagaactcattcagtttgatgccatgtttgatccttatgttaaatgtatttcttgtatgtttgtaatatatttggtcatactgatagataaagctaaaatttattctccatccatagtgaagtagatagcattgatacaaccaatcaatcatacattaataattggacacttgcagaaattactaaaataaatggtaatatcccctaggtagctaaaataaatggtaataaaattcatctaagatttgtgcagccaaccattagggttttgctatgcaaataaaattcatctaagattggtggccactgtaaagggctcgagtctggtactagcaaatgtgaaggttttgtagtttcttgaggacttcattatatagcatagagtcgtaccttgtg

SEQ ID NO: 91739 - DNA, 821 bp, Zea mays
  Clone ID: MRT4577_183661C.1
gggtgcacacgaggacgacatcgcccaatatgaatcttatgagcgaagtttgagtgttttggcttgtcgttatgttgatgaggtgatcattggtgctccatgggatgtttcaaaagacatgattaccacattcaatatttcgttagttgttcatggaactattgctgaaaacatggactttacggaggatgatttacacccatatgctgttccaatggctatgggcacttaccgccgactggagagtcccttggatatcactacaagtactatcatcaggaggattgttgctaaccacgaagcctaccagaagcggaacgagaagaaggaagcaagcgagaagaagtactacgagagtaaaagcttcgtcaacggggagtgaagttacgagtagcagaacttggatgaagattgctgcctagaccgtttagcaactgcaacagttgggcgatctacagactacagccgtaccttttcttcggtatctttgatgttccgctgacatagcttaggaagcatgagcaaaaatgactaggcagaggagatggcgagtctaggagcatttccatcgtttccctagcgtcttcagccaattccctgcccccgctgtattgtatgtatatgcgccttccagctgagttgcatttgagatctataggcttttccacccattgaaactatgcgccacagtatgaaaaccctgaatgttagcgtggttgacaactattcgctgctggtgtttctttcccgtatgcgctggcaggcagtcattttcttgaaaatctggttgggttccgctgtgttgctgaacttgaatgaac

SEQ ID NO: 91740 - DNA, 160 bp, Zea mays
  unsure (1)..(160): unsure at all n locations
  Clone ID: MRT4577_183662C.1
accgtccgaattccccgtcacccacctcccggaccgtcctttccattgtctctacctccaacgacagaaggggnncccgcagccgtttttcctgtcccacgactcccncactggctctatgcgcgccctccttctgtcttctcaacccttcacaataccc

SEQ ID NO: 91741 - DNA, 207 bp, Zea mays
  Clone ID: MRT4577_183663C.1
gtctttctgtgagggtgtttcgacgcgctgggcggtttgttccttcatcgcattcgttaacaggtcaaaatgcaaatcttcgtgaagaccctgaccggcaagaccatcaccctagaggtggagcccagtgacaccatcgagaacgtgaaggccatgatccaggataaagagggcatcccccctgaccagcagaggctcatctttgcc

SEQ ID NO: 91742 - DNA, 176 bp, Zea mays
  Clone ID: MRT4577_183664C.1
ggtagctttcctgagtaacaatgtatcggtttatctactttaatggtacgtgaacattaggagaatatggaacattttactgcctttttcatccactgcatttccactgaatcacgtcacaaaatattttttcttcatgattcatgcataattcctgctttccaacctaaaactat

SEQ ID NO: 91743 - DNA, 260 bp, Zea mays
  Clone ID: MRT4577_183665C.1
cgtcggcggcgcagattgaatgccaaaaccctagctcgccctccccaattccccatttcggccacaccctccttgcctccacggatccacccctgcttcaggttacctgtggcagcgactcccaatgaatctcctgaacgtattcgtctcgctactcaccgtctccggcgacccccagtgcgcgacccctccacctctactacttaaagctcctccgatcagcctctcagttccgcgtggatctctcctgcccccgacaa

SEQ ID NO: 91744 - DNA, 348 bp, Zea mays
  unsure (1)..(348): unsure at all n locations
  Clone ID: MRT4577_183666C.1
cccccnccccgccccacaagggaaggagccacacgcagggcacccagggccaccaccaccaccaccaccacagcacacgcccaccgccaccgcaaccgcaaaccacggccaccncagcgaccccgcagcggaaccgccagcccaccgcgcacgcggcggcgacggcggccccgccgaccacccggcagcgccgcacagggcgcgcccgcccgggccgaaccgggccgccgccggcagcggccggggagcaggncccaacggagcggcaggagccgagggncgaggagcgggcgggcgggnacagganccncaaggagaagnaccgggcggggcggaacccgcaagaga

SEQ ID NO: 91745 - DNA, 1270 bp, Zea mays
  unsure (1)..(1270): unsure at all n locations
  Clone ID: MRT4577_183667C.1
gggggaccctcgaggctcgtccgcagggctttaccatgaccggcaagagagaagggatttccttctaatctcttgcttatcttcaattgatacaatccctctccttattagagagggttacttgacccctaagcactagatctaatcttatcccaaactagtttatctttatctaaacaaccttaggggtgtgctcagtgcaccctactgtagtgggccctcttgggccctgacagattttattttgggttgtgattcatgatatatattcacctagcacggaatactaagatgcctcgtttgctcacattatttatgcaatatagctattaccacgaatatatattttttagttcgggaagatgagcaaaaaacacatttcataactatcatagatttaaaataataataacaaagaaaaaccaaacatagaaagagagccctattccttgtagttgcacaaaacccttctggtgtactactaatgctgctagttctttttttctgttcttcaaccttaggccttatttatgccatatgaccacaagaataccacaccaaatggagcatctgcacaatcgatgcggncagtcttagagaatttgaaccgtcgccatttccaagatagctgcctagttgggtcaggtgggggatcaaggtggagggtctcgtttttggtctgcaggagctaaggacatatttccggcgattcttgctgtcaacattcctgttgatgttcatgttctgcgcgcggatatcaaagaacagaaacagagactcaggtaacttgtttgacccttgaatgaagtaccaaagaaagcatcggtggagtgcaagagcgatcccctcagatcagacgaacaaagcgatttgaaacattcagagctggaacacagctctgccttcgcacccctggtattcggagctggacgtcccgtatactttggacatgaaggatggtggcaggcagtgtctgtttaggttacaacagagacgccagacgatgttgctaattgtttaacaaaattgtagctgtaaaaatcgcccatgccagtttttttttttttggtgatgcataggttttactactacattttgatggaaggttgttagtgcacccaacccttggttcggtgccatcagttgatgtaacatctcactgatcgagtggtttatgtggaattgtgttggctcgaaattattatgggttataaaaaaaaaaaaaaaaaaaaaaaaaagaaaaaaaaaaaaaaaaaagcnccctaggtcc

SEQ ID NO: 91746 - DNA, 466 bp, Zea mays
  Clone ID: MRT4577_183668C.1
gcgtgtctataattttttccatactgagccaatagctgtggtgaaccctgtcgactacttgcaacagcagatgcttgcatgcaacccacttgctctggcaaacatagttgcataccaacaacaacaacaattgcaacagtttgtaccagcgctcagtcaactagccatggtgaaccctgccgtctacctacaacagcaacaactgatttgatctagccctgtgggtgtggttaatgcacctacatacctgcaacaacagttgctgtaacagtattgtaccagctgtgacttaactagctgtggaaaaccctgctgtctacttgaaacaggtggtgccattcaaccaactgactgggtagaactgtggttggtgcctacaacagcaacaacagttacttaatgcactagcggtggctgacccattggtcattggcttgctacagcagaaacaatgggtgtcatacaa

SEQ ID NO: 91747 - DNA, 150 bp, Zea mays
  Clone ID: MRT4577_183669C.1
ttacgatagcacatactctctttattataaccagttattttaccaataatgcctctttccggacctggatgtaccttgccaatctccttctaacgctcggaactctaaaaagtgcgaatattgctgaggaatggttgccaggaagcttat

SEQ ID NO: 91748 - DNA, 734 bp, Zea mays
  Clone ID: MRT4577_18366C.1
agaagcattccgtcttctcagatggggctaagcctgaggatttcaggaggatggagtacctctcacaggtcatcgatgagacgctgcgtctagtgaacatctcttacgtctcgttccgtgaagcgaccaaagacgtctttgtgaatggctacctgataccgaagggctggaacgttcagctgtggtacagaagtgtgcacatggatcctgaagtttatcgtgactccaaagagtttaacccatcaagatgggagggttatacaccgagagccggcacattccttccttttggacttggtaccagattctgccctgggaacgatcttgcaaagctggagatctccgtcttcctccaccatttcctccttggttacaagctcacgaggacaaatcctaactgccggatacggtaccttcctcatcctaggccggtggataattgcttggcaaagatcaccagggtttgagatgaacaatatggtggcctcaatcaaactgtttctccaacccagcaaaaaaacacttgttaatgcttctcggtgaaagctttgtctcgtcatcacaaataagcttaagtggtctccaacatatagatgatttgcaacatcttcttaggtttgttcatgcaatctcaaatactaagggcccacttgatagggttataatttgtaagaaaaatagatcaaatcctatctaaagtaaggttttgatgtttaataattaacatgactatt

SEQ ID NO: 91749 - DNA, 595 bp, Zea mays
  Clone ID: MRT4577_183670C.1
caagtggtgcatggcatttctcattctcttcgaggaagcctgcgaaacctgcgagacgcgcagatagtgtcgcaaggcacgctggaaaactgggtcccaattggaggagacatcgtcgagataaatgtggagcggaagagcagcatccgtgagaggaggaagctggaaggcctcgaccttggaatgcaggagctaaggacatatttccggctattcttgctgtcaacattcctgttgatgttcatgttctgcgcgcggatatcaaagaacagaaacagagactcaggtaacttgtttgacccttgaatgaagtaccaaagaaagcatcggtggagtgcaagagcgatcccctcagatcagacgaacaaagcgatctgaaacattcagagctggaacacagctctgccttcgcacccctggtattcggagctggacgtcccgtatactttggacatgaaggatggtggcaggcagtgtctgtttaggttacaacagagacgccagacgatgtggctaattgtttaacaaaattgtagctgtaaaaatcgcccatgccagttttttttttttgtgatgcataggttttactactaca

SEQ ID NO: 91750 - DNA, 203 bp, Zea mays
  unsure (1)..(203): unsure at all n locations
  Clone ID: MRT4577_183671C.1
acgatatggcaaattgccataaacgattcgcgattataagatcaagaccccgcccaaaagtgggatcacggatcccctttctacacgaatccatagagaaacgggtctggaggagcggaaacactcacactgcggcgaggaaggccagccatttgaggaaggaggtgnnccgaaccccagccccgcccgccgaggacgaatgc

SEQ ID NO: 91751 - DNA, 1991 bp, Zea mays
  Clone ID: MRT4577_183672C.1
gggtacctcgaggcccattgggcccctcgggtttggccggggacaaaatccatccactctttctgtattctcaacgtaaagacaggcagggcgggcacgaagcgaagggaccagccagcgagcggctcgccggcgacgaccctctccccgccccaccccgcccacggaagcacggagaagatgtccgccgcatatcctcgtctcctcctctgtctcctgaccctagctccggctctcgcaggggccgccgcgggcaagatctcggccccccgcaccccgatctcgcgcgacatctaccactccagtgactctcttctgcgtgaaatcaaggctttggttgctcggcattccagcaaattgagcatggacactatcaaaacaagcaacaaaggctattctgcagagctgtttgtagttacatttaatcacgtgaaggagcgcatggataatggctcaaaagttcatatccttctgaaaggttcattgtcttccagagctttgggcagcatggcagagaacttatcacctccgaagttgcattacgtcttctctatgttttaacggagaagcctaagatcgctggtgtggatctttcatcctttgagaaactgctggagaaccttgtgatcaaagttgtgccgatggaaaatatgaatggtcgcaaacgtgtcgaagaaggggagctttgtgataggagaaatggaagaggagttgatctcaacagaaattggagtgttgactggggaaagaaagaaaaagactacgacccatacgaggagaatcctggtattgctccttttagcgaacctgaggcccagatcatgagggaattatcaaggtcgtttaaacctcatatttgggtgaacgtgcattctggaatggaggccttatttatgccatatgatcacaagaataccacaccaaatggagcatctgcacattcgatgcggtcagtcttagagaatttgaaccgtcgccatttccaagatagctgcctagttgggtcaggtggtggatctgttggatatcttgcacatggtacaacaactgattacatgtatgacattgcaaaggtgccaatgccgttcacctttgagatatatggagatgagaaagcatcttccgatgactgcttcaaaatgttcaatcctgttgacaagaaaacattcgacagagtcgttaacaagtggtgcatggcatttctcattctcttcgaggaaggcctgcgaaacctgcgagacgcgcagatagtgtcacaaggcacgctggaaaactgggtcccaattggaggagacatcgtcgagataaatgtggagcggaagagcagcatccgtgagaggaggaagctggaaggcctcgaccttggaatgcaggagctaaggacatacttccggctattcttgctgtcaacattcctgttgatgttcatgttctgcgcgcggatatcaaagaacagaaacagagactcaggtaacttgtttgacccttgaatgaagtaccaaagaaagcatcggtggggggggccctcctccgagctgaacttcgggtgcaagagcgatcccctcagatcagacgaacaaagcgatctgaaaacattcagagctggaacacagctctgccttcgcacccctggtattcggagctggacgtcccgtatactttggacatgaaggatggtggcaggcagtgtctgtttaggttacagcagagacgccagacgatgtggctaattgtttaacaaaattgtagctgtaaaaatcgcccatgtcagttttttttttttgtgatgcataggttttactactacattttgatggaaggttgttagtgcacccaacacttggtacggtgccatcagttgatgtaacatctcactgatcgagcggtttatgtggaattgtgttggctcgaatttcttatgggttctcatattcatttcgtaactttcaaagtttaaatatttatatgtatacatatatttaaggtcatgt

SEQ ID NO: 91752 - DNA, 351 bp, Zea mays
  Clone ID: MRT4577_183673C.1
aacaaatgcgggcacgtgtaatgcacccttatttattattgggcaaatccaaatcagaattattcctgcaaaatccaaatcactagcccatgcaaatgcagagcctattccggccgatcacgggcagaaggggacttggtagttgctgtcgccgccacatgcatgggttttaatgtcgggggggttgtggtacgcgttggggcatccagggtccgggcacaccaaccgcacgccggtgctgaaagaaaaggccatggcaaggttttcacccttcatgaccgttatggcataaaattcctgggtgccccccatgggaatatacgtcagggtcaggggcgtctgtcccaacag

SEQ ID NO: 91753 - DNA, 168 bp, Zea mays
  Clone ID: MRT4577_183674C.1
cggacgcgtggcgttatcgcttgtggtcaagaccattgtccttgctgcttcgattcattaaggctatcgccggacggttcgtggcggccagctagggcggcgtctgcgacggcaacacctgcaactgcgtctccagctgcgtctgctcctgctgcagctgcatcttag

SEQ ID NO: 91754 - DNA, 416 bp, Zea mays
  Clone ID: MRT4577_183675C.1
atccttaccaatcaataccaataatataacatgttgactgatacaaaaatgcccctagtggagaacgtacacgtgatccatatgtggtgtctgagagacggtttccataagcatagtaccccaaggggcattcgataacattgtaaaaaactctgaccagggaaaggtagcactgtgcacctgatataagactggctaaatggacatgggaactctgtttgtacaacccactgccaattgtaaagcttctctcctaacttgatccggcaccagtgatacactatgttgaatttttcacgaaacgacctagtgggtgctaacacacagacccatattctcaaagacactttgttgaccgaagtgtaccttgtgttgccttttcagctggaaatagaaagactactgcacaatacttg

SEQ ID NO: 91755 - DNA, 262 bp, Zea mays
  unsure (1)..(262): unsure at all n locations
  Clone ID: MRT4577_183676C.1
agggcggcgggaggggggggggcaaaccgaagagggcagcccacaccggggaccgagggagaggcagcgcgccgagaccgaagagccggagcggaggagaggcgcagggcggcgggcggcnaaggaggaggacagcggcgaccgcngcctcggagaagcaggcgagggcacacaccggaaagcaggcagaggcgccaggcgaggagcgccggcaacagacgcggggagccgagactccacgggacaggacgacagcgaccgg

SEQ ID NO: 91756 - DNA, 414 bp, Zea mays
  Clone ID: MRT4577_183677C.1
atggccgagaaagatacattccgaaacggcctttatattggtgctttattgaataatctccatatcgaaaagtcggtgacctacatcaggtttagttcatatgcttttggttcgtcaaccttcaccaaaaggcagggggcatatgttggaaaccaaaatggccgtgcggacgaaatgatagaattgttgctaccaacgtgggaccaaaatgcaagagaggtattctttttggtggataaatctaaaacccaagaaaccctcaagcgcttcttaaggtgggctcaaaatgagtttgagctaaaggtgaagaagatatggagcgataatggatcagagtttaagaatcttcaagtagaggaatatcttgaggaggaaggcatcaagcatgagttctccgctccctacactccatag

SEQ ID NO: 91757 - DNA, 409 bp, Zea mays
  Clone ID: MRT4577_183678C.1
catacgcatcgtctacttgcttgctatacctactgttgttcgtgctgatgaaacggcggacgctttctagcacgttcgacagtgctacaggcatgcacacgggtctgctgcgtcataagcaggaggaggacctgtacaatggcgtatgcataccaggtcctgtgtaggtgcctgtgctagactagcgcctcagctcgcaatggcatagatgctaccaatagcatcccaggtcgagatatgattctaaggagagcatgctgtatgagtgttggcagtcttagactagtgctgtacccctaactacgaacagggttcatggagatccgtgcattatcatcatagagcttggagactatgctgactgtacatgcacatagatgctttcaaacagtgccctcagagttttgtt

SEQ ID NO: 91758 - DNA, 1394 bp, Zea mays
  Clone ID: MRT4577_183679C.1
ggccgactggagtggtcagtgggtctgacacttccaatgtgcctaatcaggttttggatcccaatgggtatgatcctattgttgctgaattggttgctgagattaaaccaagatatcacattgctggcacaaaaggtgtcttttactcaagggaaccatatgtcaatgattctgctgctcatgttacccgctttattggacttgctaatgttggaaacaaagagaagcagcatctgtcatgtccagtgctgatatcaatgccaagcctccaaacgccactttgtcaccatatgttggttcagcaaaatcagttcctatcgaagaagctccaaaacgtgcagcggagaacatagattcacaatattggcgttatgatgtcaagcggcaaaggcatggggaagctggtgggggtggattgtgtttcaaatttgtatcctcaggatcctgtcaaagagggagtagatgcagttataggcatgatgaagaggcagtggagcattaccagagaaatgtctgttttgattttctaaacaaaggaaaatgtgagaggggcccagaatgcaagtttgttcacagtctttctggggagactgctctaagggatgcaagacctcctagtgaaagaagacgagtggagagcagttgctggttctgcttgtcgagtccagatgtcgagtcacatcttgtcattagcatcggtgaaggttactactgcacacttgcaaaggggccacttgttccaaatcacgttctaatgattcccgtggaacactgccccagtacattgatgatgcctccggaagcagaggcagaacttgggagatataagattgctctgagtaagtactttgagaagcaaggaaaaactgcagtctactttgagtgggtttcaccacgctctcaccatgcaaacctgcaggctgttcctgtaccattgtctaaagcagacgctgttaacaagatatttcatctagcagccaaaaaactgggatttgaattctctatggtgaatccagatggtgcaaaaactgctagagaatcattgatgtctcaatgcgaaagcaaatcagggctgttttatgttgagctcccggaaggtagaattctcttgcacatggtcgacagtaacgagaagttccctgttcagtttggacgcgaggtgttagcgggactgctaagcatggcggatcgtgcagattggaggaactgcaagatttcaaaggaggaagagattaaactggtggacgatttcaaacaaggtttccgcgaatttgaccctgcagagtgaaaacaatgctctgcgcctgtgtttttgttttgcaatttgtagtctatttttgaggtctcatttgaaatggacatatatgaagcacaagaatgtagtaacgttttcc

SEQ ID NO: 91759 - DNA, 220 bp, Zea mays
  Clone ID: MRT4577_18367C.1
cccatgaatgacagtttaaaagatgtccacccgttagacatcattggcagggcagtaaagagtaactacaccaggataacacttaaattccaaagaagcaagatcacggtcaatggaaacatcagtaaaaaaagggtacactaacagcgttggaactgcttattgcacataggctggcctaacccacgcgttaacccacgcttaaggcaacgtgttcgct

SEQ ID NO: 91760 - DNA, 233 bp, Zea mays
  Clone ID: MRT4577_183680C.1
gccggccgtttcggacccatctccactcgctagcactatcatagccgtctctttcttttctgcttccgaaggtacctagaggggtcgtcactatctgcgtttgtgcttccatattttggtgatctaaatgcttatttcaaaatgctatgggtgctgtgatgaatgtatgaactggcaattaaattgcgcatttctgtttctctaaggaaaaaaaaaaaaaaaaaaggccccta

SEQ ID NO: 91761 - DNA, 337 bp, Zea mays
  Clone ID: MRT4577_183681C.1
atagaacatctcatgagtatacttcagtgacaaagcaacaaaaatgacaaaccagaggtagatctaatcatggatcacttgggtgacccacatgtacgtgatgtcaaaagattttgactcatcgtttttttttcccaaaccccacatttgataaagtctagtccacattttatcctaatctccgctaaaaattacacaacgccttataaattagaacggggggaataataaacaaccatctataaactcactccacgcatccgacgattattcgcacgatttgaacaagtacggaagagaaataaatatctatggccctttctttttcaattcccag

SEQ ID NO: 91762 - DNA, 2688 bp, Zea mays
  unsure (1)..(2688): unsure at all n locations
  Clone ID: MRT4577_183682C.1
gaccgactgcctcgttgggggccgcggcgacgtttgggactgtcccgttcgtcgtgtcccaaagtccaaaacccaacccacaatggccgccacctcgccggccccggcgccgccgcgcatcctcctcgccggggatgcccacggccgactccaccagctcttcaagcgcgtcaaatcggtgaaccagtcaacggggccgttccacgcgctgctctgcgtggggcagtttttctcccccgagggtgctgcagagggctcaccggaggacgtcaccgactacctcgaggggcgcgcttccgtgcccatcccgacctacttcaccggcgactacggcccagccgcgccgcgattgctatcgaaggccgccgctggtgctcgcgggttcgcacccggtggcatcgagatatgccccaacgtcttctggcttaggggaagcaaccgcttcaccctccacggtttgtcggtggtttatttgtcagggaggaaagggttaggagggcctggctgttacagccaggatgatgtggatgccctacgggctcttgcagaagagccagggattgacgatctgttcttgactaatgaatggccgactggagtggtcagtgggtctgacacttccaatgtgcctaatcaggttttggatcccaatgggtatgatcctattgttgctgaattggttgctgagattaaaccaagatatcacattgctggcacaaaaggtgtcttttactcaagggaaccatatgtcaatgattctgctgctcatgttacccgctttattggacttgctaatgttggaaacaaagagaagcagaaatttattcatgcgatttctcctactccagcatctgtcatgtccagtgctgatatcaatgccaagcctccaaacgccactttgtcaccatatgttggttcagcaaaatcagttcctatcgaagaagctccaaaacgtgcagcggagaacatagattcacaatattggcgttatgatgtcaagcggcaaaggcatggggaagctggtgggggtggattgtgtttcaaatttgtatcctcaggatcctgtcaaagagggagtagatgcagttataggcatgatgaagaggcagtggagcattaccagagaaatgtctgttttgattttctaaacaaaggaaaatgtgagaggggcccagaatgcaagtttgttcacagtctttctggggagactgctctaagggatgcaagacctcctagtgaaagaagacgagtggagagcagttgctggttctgcttgtcgagtccagatgtcgagtcacatcttgtcattagcatcggtgaaggttactactgcacacttgcaaaggggccacttgttccaaatcacgttctaatgattcccgtggaacactgccccagtacattgatgatgcctccggaagcagaggcagaacttgggagatataagattgctctgagtaagtactttgagaagcaaggaaaaactgcagtctactttgagtgggtttcaccacgctctcaccatgcaaacctgcaggctgttcctgtaccattgtctaaagcagacgctgttaacaagatatttcatctagcagccaaaaaactgggatttgaattctctatggtgaatccagatggtgcaaaaactgctagagaatcattgatgtctcaatgcgaaagcaaatcagggctgttttatgttgagctcccggaaggtagaattctcttgcacatggtcgacagtaacgagaagttccctgttcagtttggacgcgaggtgttagcgggactgctaagcatggcggatcgtgcagattggaggaactgcaagatttcaaaggaggaagagattaaactggtggacgatttcaaacaaggtttccgcgaatttgaccctgcagagtgaaaacaatgctctgcgcctgtgtttttgttttgcaatttgtagtctatttttgaggtctcatttgaaatggacatatatgaagcacaagaatgtagtaacgttttccaatgccgcaatttttgttttagggctagttttggaaccccattttttaagggattttcattctcctaagcaaaattagttcattttcttttgtgaaaataggttggaaaaatggtgttttaaactagcccttagataaacgtatgtctgatctcggcgtgagtgggcnnacgcctagggatgaaaacggacggaaaaacccttcttccgttttcgtatccgtattttatcatcgaaaatgggatccggtccggaatagtcgggaacggaaatgggagcggtataaacggaattgcgaaaacgaaaagaaacagaaatactaatggaaacccataatttaatacaaataagaatgatattgatgtttgactagtgattgattggcatgacaataacataaaataaatagatatagagagacaacattctattattatttgattgctaatagtgtatatttagctatatccgatgttgtttaagattttagacttgtcattgaaaatagtcgatggttacaattgtcatttatgctataatttggcacctaaagacacgaggctttattttttatactaatgcatattaggctcgtcccatatttatcanatacggaataaatacggttttaacccggataaaaactggatctcgcaaaaatggacggnataaatcat

SEQ ID NO: 91763 - DNA, 475 bp, Zea mays
  Clone ID: MRT4577_183683C.1
caacgccccacgactttccaaccctaatcagcttcccccaccaattctcgattccccgtcgccgagctccccctcccaaccctagcgccagatccgctcgctcgcccgcgcagccatggcggagtccctcgacatgtccctcgaggacatcatcaagagcaacaagaagggtaactcctcgtccggtgggggtggccgccgccgcgagggccgccttggatctgccgccgccggtagtggcgcggccgcggacgccgccggaggcgtccgccccaacaggcgcgccttcaagaggtcggggaacagaggcggcgccctaccagccgtcgaaggacccggaatcggcgtggcagcacgacatgcactctgacgcctctgccagaggcggtgcccggtcgtcaagatccctgctaaccaaaccggcaccaagctccccatcaccaattgggacttccgggtctcaaccgaggacctt

SEQ ID NO: 91764 - DNA, 419 bp, Zea mays
  Clone ID: MRT4577_183684C.1
cccacgcgtacgatcaatgtgcaatcggttaataagtgccatttgtgttagttgctgaggtatgtaatatatacctagtggagttcacactttacatgtgcaatttatggttattagattgcgcaacatcaaatcaatgtagcatgcttctgtaccttcaaggttcgtccttgtgaactctgatgtacttctgattaaagttttcattccaaatgtttatttggtcatgttgccgctaatttatcagctccagtgtcgtcaatctcattggacatacctgcccggtctcaacatgaggttagtctggcaattggaagagtatgctggttactagaaatatggatatggaatgcatctaccaacaaaatttagaattccagtgcatgggatgcacattaacaagtgtaatgctatacatt

SEQ ID NO: 91765 - DNA, 504 bp, Zea mays
  Clone ID: MRT4577_183685C.1
gcggccggggcgggttcacaaccccggtctctcttcctgtcctctcctctcctcgctatgtctgcgtctgtatctcacggaccttcagtcgtagacgccgatccgccactagtccggtagcacatggttgacgttgagcatattcagcccctctcctgcgacaagggaactgccatgtagaagggtgggctcgccctggactacgccccgagggccggcttccctagcttcgttgggggagccgcagcacgctggagcgaggcttgacacgacctataaggtcactatgctgcaccatggcggtacaagcagcatatgactgtagctgcagagccccttcgagcgaggattcttctgcattttacccgacatgtacacaccctggtatcacaccttctacgacggactccttgcgtgtgccgaggaactcccctacatcatctgtggggcgtccctgatcacggatggctatcagctgagaatatgacccacatagtgttcggg

SEQ ID NO: 91766 - DNA, 274 bp, Zea mays
  Clone ID: MRT4577_183686C.1
caaaaattattttctctgtatgattaaaagtttattccatttattttagtttgtgtttacttgattttgaggaagaaaatatttgactttgtgtaaagagtagggtatcagggtgtcttttctgccgtgggagatgtgtatatatatagtatttggtgtatagtagaaaataagctttgtgcatctgtatttgagatatgttaatgacgtggagtaaagtcagctgtaagactctggaggcaaacaagttgtatatggttcatatggctctatg

SEQ ID NO: 91767 - DNA, 172 bp, Zea mays
  Clone ID: MRT4577_183687C.1
cacaccatacagttgttgctacttttagatagaggaacaagagcagagaaggtcaccggcagttgcctcttatcccgacatgccccattgcccaggagaaccccgtgccgatgagcgagccgtgcgcattgcacgtgccgagccaccggaccaggtgaaggagaacacacgt

SEQ ID NO: 91768 - DNA, 286 bp, Zea mays
  Clone ID: MRT4577_183688C.1
ccgcgctgcgtgttcgatcccaacgccagctgcgccaccattaagtatgtcctcgccgaggcgtccactgccatgttcgctgcgctggacgagctgttctactagttccgcgtctggcccatggacgtggtcgttctggtggtcaacttcatcctcttcaaccctatgccctccctgtcctccatgatcgtcaaccactacaagacgcgctgcaacatccttatctacaacctggggggcacgggctgcatcgcgggcgtcatcgccatcgatctggccctcgaca

SEQ ID NO: 91769 - DNA, 339 bp, Zea mays
  unsure (1)..(339): unsure at all n locations
  Clone ID: MRT4577_183689C.1
agtaatcccaatacgtgctacggagtcgccgaggattcanagaacttggtcgaccagtgcagccatgcataggcaggaaccaccgacttgtgatccgtgagggcactagcaaatacaccatgagatctgggaaactgtttttttttatcccatagtggctcctataggggatagtatcatatctcacgtgttaacagggtgtactggacagggacaatctattcctaccactgtagatttatagactttataatgatatactgattagctttccatgaacaatcagcacactagacatggtatttttaagatgatcttcatgtttcttgaaagcttacg

SEQ ID NO: 91770 - DNA, 468 bp, Zea mays
  unsure (1)..(468): unsure at all n locations
  Clone ID: MRT4577_18368C.1
ttttctttccttccgctggctctaccctcaggggtaatgtaaagccctcaagcggtcagttttttaccacagggccatgggtggacgcactaccacatagtcttattggctatcccaattcaaaacggccacaatgtaacatttgattgacatacacctcgaacgtcgtcctacagtggggagagtacgtgaatacaacaggtctttaggaactcttgggactttcattattaacaatgaccataaagaaggacgtttcgctacctatatatatgaaacnccttctctcatagatacaaagtgaaacccaatcgaatctgggattattggatttaaaacactaaccggcaggttatggggatggtccacctgtgtgggacttcaatccaccgggattcttacaatggcccaaaaaaggaattacctatgagttcaaacaatactattatgtccttcgcgcagaaactg

SEQ ID NO: 91771 - DNA, 312 bp, Zea mays
  Clone ID: MRT4577_183690C.1
gtcgtactggcctgcgcgtgcctgcgcaggagacgtcgtggccatggatgaaaggcgcgggcacacggcgatcgccgctgacatacagggcatcgtgtcgactctgattgataaaaccatagactcgcaggctgagttgctacgacaattatcagacttcactcaatgccatcatagcatgaaagtgacgctagtgatgctgaccagcagcgagtgaatatagctgccgaggcaatatcgtaccgacctactactctgcatctacagcatctggaacgcgtccaggattcaagggttgatccttctgctatg

SEQ ID NO: 91772 - DNA, 488 bp, Zea mays
  unsure (1)..(488): unsure at all n locations
  Clone ID: MRT4577_183691C.1
accaacaccgcccactcaacacagcacaggcagctcttgagagagagagagagaagaggggcggggggggggcaccaccaccacaaccagccggctcccccggcgncgggccccaaccaggggnncaagagcnncngccgcgccaacgagaaccacngccnggccgnccgcgacggcgccgncgngccggccccggccaaccccaaggacgaccaggggggcgggnacaannacangcncnncancacccnnnncaannaccaggaaggcangccggcgnncgcgcccgncaacaaggccacggggcccgcaaccaagcacacccacggccagacccacccggacaagcacgcgccnaacaacccggaccaggaggacgcgacggngcngnggacggagagcaaggacangggcaagggccaacgcngcaaccacaaggacaacaacacccgccacaacnnaaacaccccccacggcgacaaggacca

SEQ ID NO: 91773 - DNA, 264 bp, Zea mays
  Clone ID: MRT4577_183692C.1
gtggcgttctcccccctctctatcttgcttcgatggcaaaagtcaaacactgtttattctgggaaagtaataataagaaatgagttcaatggctgggaattggcaactggcccaagcaaccctttttatcgccacctctatcggtcctcgtcccaagtgcagtacagatgtacaggacctgtacttgcttccttcctcttcctctgttctgttctccatgtgaagaagtatcgaggtcagccttttcttttatgctcagtgact

SEQ ID NO: 91774 - DNA, 369 bp, Zea mays
  Clone ID: MRT4577_183693C.1
tacgtaagctcggaattcggctcgagcacgtattaccgtctccaaatcattcctctcctgcaactgcaagcgaccaccccttcacccccatccacccacccgcccgccgacgcttggatcccctcccttgtttgccgtgttcccgtccaaaccccgtagacgccgccacagcaatcgctgtcgccgccgttggaggccgggccgtgggggctgaaatgaaggaggtggtgcttcacgtgtatgacgtgatcaacagtgactcatagatgacgaacaacaccattctttagatcaaccgaatcttcaaggtacgcatcggactctgtggcttattacacattgacgttcaggtctatggccaggaccagt

SEQ ID NO: 91775 - DNA, 478 bp, Zea mays
  Clone ID: MRT4577_183694C.1
gttcacccatttagcgtaggagctctagaattacctggatttgccaaaagcttgatgataatacacagggaattaaactgtgcattttgactcacccatacctggctccggccccttaggatgaacctagcagggactccttgcttactgtatctttgtgtacataatcctcctttcttcttcctaaaaaaaagctacggagggggttcaaggagggcttttgtttgagaggtatgaggggtggtctaatcaagcttcatgcctgctacagctagatctgccggtaaccatacttgagctcaaatattcacacacaccaaaaaaaacagccttgtgcatcactgcataacagtcctttctgttaattaatcgcgtaactgcagtggccaatgggggcataaagtactacgcctcctgcggagttctcagttcctacaccgactgcctccttggcttccgtttatccggcacacggaac

SEQ ID NO: 91776 - DNA, 1070 bp, Zea mays
  Clone ID: MRT4577_183695C.1
tccgcccttttttttttttttttgaaaataaattgctggcttaagctcaaggatgactattgacagaatatgaaacattacaacaaacgtctcagagacagacatctatgaaaccatgaataatttgctcataaatacatgaccaacaagaccacctctttgtcgatctgggcatactttagctgctctgatgatgggtgcccgtaaaactgaaaaaactgtacctaagcacctccttgccataccccacaaccatgtctccgctcatttgtcgcaaggggcagatagttaatctgacttaactggtgcctgtggtcacatctagtcagatgagtccaaaccataatcaagcatttcttttatgtttagcttgatagaaggtcccatggatgagcacaagtacgctgttttccagtatatccccttagcaccagatggcttgttcctctcaacagagcgaacaacggccatgaagtttgcaatgagatcttcctccggaaagtcaaccttgccaaagggaatatggacaattcctgatttatcaactctgtattcaaccttccctttcttgaactcttcgatagcctgagtaatgtttggagaaacagtgccagctttggggttaggcatcagccctcttggtcctagaatcttacccaagccggcaaccttaggcatcatatcaggtgatgcaatcaatttgtcaaactccataaatcctccttttatttgttcaatcaaatcttctccacctacgatatctgctcctgcagctctagcttcatctatcttctcaccttgtgtgagaaccgcaatcttcaccgactggcctgttcccttgggcaaattcaccgtggcccggagctgctggtcattgtacttggggtcgaggttcatgcggaagtgcgcctccgccgactcgacaaacttggcgctggacatctgcttcatcagcgagatggcggtgggcacgtcgtagtccttcttgctctccctcagcttctgtatctcgaggaacctcttggacctcgtgcggtcgcgcttgagcggtagtgcggccttgccggtgc

SEQ ID NO: 91777 - DNA, 1504 bp, Zea mays
  Clone ID: MRT4577_183696C.1
cacaagagctttttttttttttttttttttttttttttttctttttttttttttaaatatgaaaggtaattaaattaatgacaggtgaaaacaaattgttggcttaagctcaaggacgactattgacaaaatatggaacattacaacaaacgtctcagagacagacatctatgaaaccatgcataattttctcataaatacatgaccaacaaaccatctctttgtcaatttgggtgactttagctgctctcatgatgtgcccgtaaaactgagaaaactgtacctaagcacctgcttgccatacaccaaccatgtttctgctcatttgtcgcaaggggcagatagttaatctgtgaaggtgataacgatgccagctgacttaactggtgcctgtggtcacatctagtcagatgactccaaaccatagtcaagcatttcttttatgtttagcttgatagaaggtcccatggatgagcacaagtacgccgttttccagtatatccccttagcaccagatggcttgttcctctcaacagagcgaacaacagacatgaagtttgcaatgagatcttcctctggaaagtcaaccttgccaaagggaatatggacaattcctgatttatcaactctgtattcaaccttccctttcttgaactcttctatagcctgagtaatatttgaagaaacagtgccagctttggggttaggcatcagtcctcttggtcctagaatcttacctaagcccgcaaccttaggcatcatatcaggtgatgcaatcaatttgtcaaactccataaatcctccttttatttgttcaatcaaatcttctccacctacgatatcagctcctgcagctctagcttcatctatcttctcaccttgtgtgagaaccgcaatcttcaccgactggcctgttcccttgggcaaattcaccgtggcccggagctgctggtcattgtacttggggtcgaggttcatgcggaagtgcgcctccgctgactcaacaaacttggcactggacatctgcttcatcaacgagatggcggtgggcacgtcgtagtccttcttgctctcccgcagcttctgtatctcgaggaacctcttcgacctcgtgcggtcgcgcttaagcagtagcgcggccttgccggtgcgcgggcgcgtgggggccgtgaacgcggggccgcgcccgccctcatacccgtcgtcgtcgtcgtactggccctgctggtcgacctccgcctcctcttcgagcacggccccctgcgggtcggcgacggcggccgcggcggggcggcggaacgcgaggaggagccgcgggtacgcacgcagcgacggcacggaggaggggaacagcagcgcgtttgacgaggccggcgccgtgctgctggccgccggcgcgaggagggaggaggaggcggtggccgcggcggctgtggccatggtggaggccggggaggatggcgcagcagataagagggagtggagggatcccggcccggccggc

SEQ ID NO: 91778 - DNA, 462 bp, Zea mays
  Clone ID: MRT4577_183697C.1
ggcggcggtcactgcactgcgtgtgcgtatccatccatcttgcaggcatcgtcgtctgcaccgcgcgcttgtgcgtgagccaagggcggcagaggcgatgggtggcaagctgttgctgggcgcgagccagagccgccacgcgcacgcggtggcgtcgcctcccctgtcaaaggtggccacttccggcctccacggcgaggactcgccctacttcgccgggtggaaagcctacgacgagaacccctacgacgccgtctccaaccccggcggcgtcattcagatgggcctcgccgagaaccaggtgtccttcgacctcctcgaggggtacctcagggaccacccggaggccgcgggctggggcggctccggctccggcgtcgccagcttcagggacaacgcgctgttccaggactaccacggcctcaaggccttcagaaaggcgatggccaacttcatggagaa

SEQ ID NO: 91779 - DNA, 240 bp, Zea mays
  unsure (1)..(240): unsure at all n locations
  Clone ID: MRT4577_183698C.1
ccgagattnnnnnaatccttgatgtcaacgatgtgcaaacctatgtaatcaatagggcaagggatggattcctgaatgagccgccccaactgcgtgcctttaggggccccatttggaagggacccaccttattaacacatagctgggagaccaggagcccggggctacctgaggcaattcgcttctgccctcttggatgccatcttagaagcttaaatattgaaaccggtattcaagcta

SEQ ID NO: 91780 - DNA, 130 bp, Zea mays
  Clone ID: MRT4577_183699C.1
gcggctccagcttcttcatgtactggtagagggaatactgagatacatttcgagaagacacaggcaaggagctaagccactggactgtgtcaggtcgttgattctatatactttttgtactagtaaaggg

SEQ ID NO: 91781 - DNA, 807 bp, Zea mays
  Clone ID: MRT4577_18369C.1
cagcgggtacgttcttctcggctttgcattggagtagcagcaaagcagagcagctcggccagccagccagtgggtctgttcccgaggcacacacacgcacacacaggtgctgaagcacacggcagttgccttgcctgttcgattgctgcttccttcctcctccctcgagtcttcttctcagcccagagagacagacaccaaggaaaagctggtaggtgccgcttgctctgcctccgatccaacccaacccaaggcggcagcagcagcggcggcgggtacgttcttctcggccatgcatggaatggaacgaggaccgcccaccgccggcgccgcctagatctctgcatccggtggccgccattggcggttcttggctccgattcggtgctgcctggtgacgagaaaaagccaaggaaaaaaaaagaaggaagggacggcgattcaggcctcactcttgccctgtcgtcgacatgaagtacatgaagcttggatccaagccggacgcctttcagacggaggggaacagtatcaggtctgttgcaactgagctggcagtggatattgttgtcactgtaggggatgtcaagttctaccttcacaagttccctcttctgtccaagagctcccgcctacaaacgctggtggcctcgacaagcgaggagggcagcgacgaggtggacatctccgacatcccgggcggcccggcggcgttcgaggtctgtgccaagttctgctacggcatggtggtgacgctcaacgcctacaacgtgctggccgcccgggggcggcggagtacctggagatgtc

SEQ ID NO: 91782 - DNA, 350 bp, Zea mays
  Clone ID: MRT4577_1836C.1
ggaaatataactcgttatttttagacacataccatatcaccacagcgaaaaacttgactattaaagtacaacaaatcatatcatacaaatccacgaccgtctatgatgcgtcaatactagaaagctcagggacttgacaaacaaaggtgaacaaataacagctaactttacgactgtataaaagttgcacgatgtagacacatactgtctaatttaacggaagcactggtttgttttgtcaagaaggaagcggtgcttgtttgaactagctggccaaatggtattagtatttgctgctggaaataagcagaggggttcagagcggccaattggtttattggaagaaattg

SEQ ID NO: 91783 - DNA, 360 bp, Zea mays
  Clone ID: MRT4577_183700C.1
cagtttgctgtatactggcccgggctgtttattttttttttggccggaaaaaggaaccataccccactgtagaaggccaccgacggatggaaaaacaatttataagcacatgttccgcccttcaaataaaaaaagcctcaatccattggcgtgcgattgtcatagcgaatcgactagacaaacaaacacaaatgtgatgatgctctttctattggacagacaccagacttgaccataaatccttgcgtcactcggccggaacctaacccaaaggactgtgaggcatgatgcatgccattccactggactttacagcttgggaaagtatacagcgaactgctactattgggcggagccgaa

SEQ ID NO: 91784 - DNA, 660 bp, Zea mays
  Clone ID: MRT4577_183701C.1
tcgagcagcgtcctggtgtagcttagggttttcgtctccgcggcttgctctaatcctctccaggcacgcgagggcgcagcgttgatggcggcggcaccggcaccggcggacgcgaaggcggaggccgccaagatggacctcctcgaggacgacgacgagttcgaagagttcgagatcgaccaagaatgggatgacaaggaagaaggcaatgaagccgtccagcagtgggaggatgattgggatgacgacgacgtgaatgacgatttctcactgcagctgaggaaagagctggagggaaataacgcccagaagagctgaagtactatttctctagtttgtagatgataaatgattgttatgtgctatatggatgggttgatatggttgtgctatgtgaacggcagaaagtttacggacatcagtcggcaatttgacagcactgtacctgttccggtggaacatatcgtcgttaggacaggtctctatccgaaacgctagaaaccccacattgagtatcttcaactgtttcctactaatgcccaatctcgttttttttagcgacatgagataaataccaagcttgttcggctggttttttcaagtaatttgataaatgtacaaattttttcttgttttcatgtccaatttggattttcccct

SEQ ID NO: 91785 - DNA, 434 bp, Zea mays
  Clone ID: MRT4577_183702C.1
gggggttaaagaactaaaaggggaccgcgtagcatccggattttaaaacgtggataacctttgtgacaaaaaacactgctaatcttttagagggacttgacctgactactggtgtgattaatacctgaacgagcggggccaaaaatagaaatttgctacattacctttagaattagatatgaatttggcgtttcccaaaaattttagctgcacagggggcttggttcctattagggttcgggggggtggccattcaccggaagcagataggctttcttcttttcgaatggctacctaaataaaatgcctataggccaaggggaagggaactgttccactgaaatgaaaagggagggaagagaacaagggacctaattgactggggcccgaaattttttttcgcgttacaactttgagacctggatcaccttcac

SEQ ID NO: 91786 - DNA, 645 bp, Zea mays
  Clone ID: MRT4577_183703C.1
gcttccgcaggctccacacaagccaccggacacccgccgataccaccaccgctccctctccggccgccatgctgccgccggccgcccgcctcgcggcccgccgcctcctcggcctcgcctccgcgtccgcttcacagtccgccgcccgacgcctctccccgtctccgatctcctcccccgccgccgcggccgccacgggttacttctccagggccttctcttccgcgcttaactaccacatcgattcgccggacaacaaccccaacatgccgtgggagttcaccaaggccaacatggacaaggtcaacgaaatcctatctcattacccaagcaactacaagcaatctggtattattccaatgctggatcttgcacagcagcagcatggtggatgggtcccggttgcagcaatggacgccattgctaaaatagttggggttgcaccgatcagggtctatgaagttgcaacattttactcaatgttcaatcggaccaaggtgggaaaatatcaccttttggtgtgtggaactacaccctgtatgattcgtggttcacgtgatatcgaagatgccttgttaaaacaccttggagttaaacggaatgaggtgacaagcgatggtttattttctgttggggaaatggaat

SEQ ID NO: 91787 - DNA, 426 bp, Zea mays
  Clone ID: MRT4577_183704C.1
aaagggggggaagggaacctaaattgcacaaaacatagacagtgctgttctgaagcatggaacaattcataaacaacccgaccatggctacaaaacttggtacaatacggttacaaacaaaaatatcacagtttgatgattttgagaaatgggacttctttgaaccccagcaccttaccccttgagcttgccaaaaaacctctgcttttcatcggtaggatggaaacgaccgtgcccaaatttggacaatctgtcgattaacttgaccttgatctccttcagcgccaaccgggaagtctgcttcaggaaggactggctgagggtaaccaccctcttccttggacccaaacaaaaacccttgatcatcaggtactcacccttcacaataccataatgggggaagccacccatgggaatgattgcctt

SEQ ID NO: 91788 - DNA, 735 bp, Zea mays
  Clone ID: MRT4577_183705C.1
acattgccagttgaggaatcataattcatataatgagcttgtagcacaaaagctggtggacatgaagaacagccaggttactataacggtcaatggcgatgaaattcatatgtttcaggagattggccatcttcgtctaaagctgactgccaacaggtcaaaccaacctgttgaggatcatctgtcaaggcgtcaactatatcctctgcattctcaatggatgcagcaagatgcaacggagttaaaccaccagggccaggaaagtttgggaggaaggggtaaaccttggaattatcaaggcatagtacaacaaactgtacaagcaaatgcaccattctcctactctttcttcggacgcgtgggcccgcggcgtgctcaagatctttctcgagaacgtcatccgcgacgccgtcacctacacggagcacgcccggcgcaagaccgtcacagccatggacgtcgtctacgcgctcaagcgccagggccgcaccctttacggcttcggcggctagggcgctaggctaggccatgctcgacccgccccccactctccgctctggcgtcgtcattggttccttgacccctgtgcggggtcggtcggtggtgctagggtcaacagttgtctggtgtctgtggcttctccggctatccgttctttggtgtgaaatggaattccaagcgtgtgaatgggaatggatcttaattttgcaaaaaaaaaaaaaaaaaaggccccta

SEQ ID NO: 91789 - DNA, 858 bp, Zea mays
  Clone ID: MRT4577_183706C.1
ccggccgggaaaaggacgctaaccaaaacgcacaggttgcctaatccaaaccgggcgtcgctcgacgctcgtcccgcttcctgatcctcacccctgcctgcgcggctcggctcctcggctttccgcgttcgctacggtcggtttgtgccagcagccgtgccggatcgttggccttgcgcagttgcgcggttacaccgtgctccaggcaatggcgagccaacagcaagcaaaaggcacaatcctgtgagccaatcaacactcactaggactctaggagccagggcattgattcagagaactctgagaccatttttgttgcatcttttgacaggattacatgatgagtgctcttgtttttcctctggttgtatatgttatccagtgaacacatgtttaattttataaacatttcaatttttgtcatgtttgaatctattattttctagctttcgcagtttcaaaaaagtgtggtccagtgtctgtacttttatgctgtttaggttttcgcggccactgcctcctcccatcgtggtattcattccttccggactgtcagagagcggggatctatctacgctagtattcagttcttccattactggtctaccacacgatggttccctgtcatggagcggctactgcgaatcctcagcagtttggtgttattgccgcaaaccgctatggttctcctgtgaagccatctttatgccctagtgttgcgtttctgagactgcagggttccgcatttcgtcttgggaataaatccttggctttgagagctggtgcggattctcacccgtttgcgacatcttcagcatttgccaagtataattcctgtcaagaacatcaagcccctac

SEQ ID NO: 91790 - DNA, 434 bp, Zea mays
  Clone ID: MRT4577_183707C.1
aaaggaaaaaaccacgatcaccagccacagaatatcgtccgtagacggcggcttacaaggacgagcctccgccgctcgccaacacggtctccatatgcagaatttagatcacaaactcaacaatattcatctaatgatctattccctagatacatacatttttcaggatatttgggaggaacattcacatatgggaatttgggattacttttccggggcgctttttaagaaaatacaaggacttcagatgctaaatgtactagggcaggagctgactttttgagcgcacctgttgccgaccaggcagtactgcagtagtagtagccaaccaggggaagaggcttaggccccgttcggcagccaggttttagttccaggtcaggaacagtttcaggccaggttttagttgatctgagtctttcacttgttccggg

SEQ ID NO: 91791 - DNA, 434 bp, Zea mays
  unsure (1)..(434): unsure at all n locations
  Clone ID: MRT4577_183708C.1
gtgcttgctacgttatagctcttatatagggttgcctaaattcaatttattgcccttctttttacaataaatgtacaaattaagggggggggggggtggggggccttnnccaactatcttaataaatctttntttaaacgaattcttcaattcattaatgccatcattatcatcttccacaatatcatctttacaaactgttacaattttcaatttccttcttttatctttccccttcacttcataatactttcaattcttatcaccctctactatnaatttattcctaactttttctcctaatgctaatgttttcctcattaacaatcttcctcatgttcgactttcatatctgtttcacaaatctctcatcgtttgatcccccagaatttgtgtctacctttatccataatcccattttttcaatctacttt

SEQ ID NO: 91792 - DNA, 813 bp, Zea mays
  unsure (1)..(813): unsure at all n locations
  Clone ID: MRT4577_18370C.1
ntcatggcttccatcacgagtcgtcatggctgtgtggtgtgctagcccaggctggctttgcagtgcctgccccctaattcgctgcactcctgcacgctatctggtctactcatcccaacctcaccccgcccggcaccccaccacctcgcaaaagtcgaggatagcaatgaaatctggctgccgatttctttaattagcatctcggtgaagtgccggtataaccatctcccatacaactatacaagatgcatgcgtggagtgggggctgctgctgcccatttccccccctttaatttgcttgctgagcaagatcaagttgcattgaccgggagcacgccattgtgtggtatgctgcattcgctccagcgacagcgaggtgtaaagggggtggagattacatcgctggagaatcgggaatccagacgcctttcttttctagtgaaaaccgatgcatggctttacaaaatgttgggcggcatatactactacccaatactgctactctccctgtagtcttttttagactttgacccgtcgactgtcaaccgctggaggaatagatgcctgattccgcggcatggaaggctttgtgctgatgcagcttttgcttctctagctcgtcccccatatccgatcgattcgtttcagagtagtagaattcgttacattcgttcgttgtttcaatattgactcccaagtcccaatatatatgtaccggaaaaaaaagctagactcttatttttcaattggagcctttcctctttttcattatgtgataatcatatatcattaggttgctttttcaaataagcc

SEQ ID NO: 91793 - DNA, 400 bp, Zea mays
  Clone ID: MRT4577_183710C.1
aaataatttttttttttttttttttttttttttggggggttttttttttttttttttgtggtttttttttttttgggaaaaaaggggtttatttagacccttttatgggccaaagggacaacaaaataaattggcccccattggacaaaggaaccttaatttgggggggggttttttaaaaaacaaaggggcaaggtgggcaaaaaaacaagggggcgggtgttttcggaaacaaaagggaaagcccccccccgggggggggggcccaggggacttcccctgcccagggggggttgttttaagcttgggggggcagtttttttcctagggggggcatgtacttgccccggggctttcaaggggggaggaaaaattcactgggggggggtggggcattccc

SEQ ID NO: 91794 - DNA, 489 bp, Zea mays
  Clone ID: MRT4577_183711C.1
ggaaaaagaaccggcgggaaaaattcccgggggccaggggggttaaaaaaaggggggggggaaaaaaaattttccaaaaaaatttaaaaaaaaccccacttttgggggcttattgggggcaaaccaaacccccaaaaatttttaaaataaaatttattttctagccttatcccaggaaaattaaaacttattttccagccctaacccaagggggggggggcccctcgccccctatgaggcccaagaaaaaagccaatttgacattgggcccggggggtattccctggggggggggggggccaaccccggggggggggcagtttttttgggggcaaccccaaaattttgggggggaaaaaccacaggggcattgcccaaaagagcaataaacggttaaaggttaaaggaaaaaaaccctacttggccctgaaaaaaccggggggaatttattatcccaaaaagggggggtgctttcccgaaaaccttggg

SEQ ID NO: 91795 - DNA, 301 bp, Zea mays
  Clone ID: MRT4577_183712C.1
tgcggtttcctgcttcaacagtgcttgagcgggacccggtagctcctccctccgacccccgccgggcgattccagcatgagcgctatgcaacttcgtcgacccgccgctcaatcgtcgcctccgcgcctcgcccagccgccatcatgaccaccgcgtctcgctcgcacctgcgccagagctaccaccaggactcacacgctgccatcaaccgccacatcaacccggagttctatcactcctacgtctctccttccatgtcttgttattttgaccgggatgatgtggccctgaagaactttg

SEQ ID NO: 91796 - DNA, 353 bp, Zea mays
  unsure (1)..(353): unsure at all n locations
  Clone ID: MRT4577_183713C.1
ccgcctgnnctgccgcagcccgccatgggggcgtacaagtatgtgntcggaactatggnnaggaggaagcagtcggnacccgtgatgcgcttcgtgnncagcgcgtgnncgctgctgggnagtacatggcagnncagccgtccattcgtccgccttcaccaggctccactccgccccgacaaggggcccgtcgtctcggctacaagggccaagcaggtngatatgttgtctaccgtgtccgtgtgatagcgtggtgggnaggaaagaggccctgtgcccaagggtatttgtctatggccaagcccaagcaccagggtatcacccagctcaagttccagagggaacaagaggtc

SEQ ID NO: 91797 - DNA, 128 bp, Zea mays
  Clone ID: MRT4577_183714C.1
tctagctaccacgctcgacagctaaccagactgccagaatggattccgaggagatcggaggcttgacctgcttcattgacatcaccggtctcgccttccggccctgcgcatccggcgagaccatggac

SEQ ID NO: 91798 - DNA, 716 bp, Zea mays
  unsure (1)..(716): unsure at all n locations
  Clone ID: MRT4577_183715C.1
cctcgaggcggcgggactgacttcttgctcgcccgatctctctctcgccgtcgccgcgaccgcgcccgttcactgggtgcgatgcacccggcctttcctcgaacctgacgacagcacttgctggcctgacaacaaccacttcacatgcgcttccatggcgcgtatctgatgctaaggggcaagcgcgtggacgattggcttcccgaatatccggtgcgcttcgagggaaggataaaccgacctaccttccacatgcgcaaaatgtacagatgtgcattgcacttaatgcacagtgtatcactgccacaggaacgactatcgtctaataagcactcactactggcatacatgctatgttgagccattttgaggaaaggacgctcaagtaccagatggacaaagacccaactgaagcgattctcactgctgcgctgcgcatgcttccccacatcaaactgcgcgatgataacgatcacaagctgcggatattctctggaattgaccatccattccatgaccgccctcttggagatcctgcggtgccccaccgccagatcgcgacatgcgagcccgcgcatagggtgccatgttaagggtccatattcgagagcgttcgcactgggccagggacgatcaaaatgcttcgaacgncacgagctcaagtcactgcatatgctcatggaattttgcatgctgcaatctgctagatgctgttt

SEQ ID NO: 91799 - DNA, 1858 bp, Zea mays
  Clone ID: MRT4577_183716C.1
gtgcggccctcgaggcgcccggttggtaccacgtcgtgtcggtgtcagggacgggggggcaactgtcggcgcggctggagctcaccggcgccggccagaaggcagagctcgggcccgacgttcgcaggctcagcctcaccgcgagccttgagacggacagccggttgcacgttcgcatcaccgacgcggatcaccggagatgggaggtcccccagagcgtcatcccgcgcgaggcgccgcgggacgacgtgcccctggaagcgagcacgggcgcctcgccgccgcgcagccgcgtcctctccgcggcgacctccgacctggcattcaccctccacgcctccccgttccgcttcaccgtgtcccgccgctccagcggcgacgccctcttcgacacctccgcggcgctggtcttcaaggacaggtacctggagctgaccacggcgctgccgccggagggcggggcgtcgctgtacgggctaggcgagcacaccaagcgcacgttccggctgcagcgcaacgacacgttcacgatgtggaacgccgacatcccggccgccaacgcggacgtcaacctgtacggctcccacccgttctacctcgacgtgcgccacgccggcgccgcgcacggcgtgctcctgctcaacagcaacggcatggacgtcgagtacggcggctcctacctcacctacaaggtcatcggcggcgtgctcgacctgtacttcttcgccggccccgccccgctcgacgtcgtcgaccagtacacccagctcatcggccgtccggcccccatgccgtactggtctttcgggttccaccagtgcaggtacgggtacaagaacctggctgacctggagggcgtggtggccgggtacgccaaggccaggattccgctagaggtgatgtggacggacatcgactacatggacgcgttcaaggacttcacgctggatccggtgaacttcccggccggcccgatgcggcagttcgtcgaccgcctccaccggaacggccagaaatacgtcgtcattatagacccagggatcagcgtgaacgagacatacgggacgtacgtgcgagggatgcagcaggacgtgttcctgaagcggaacggcaccaactacctcggcaaggtgtggcccgggtacgtctacttcccggacttcctcaacccgcgcgccgccgagttctgggcgcgcgagatcgccctgttccggcggacgctccccgtcgacggcctctggatcgacatgaacgaggtctccaacttcgtcgacccggcgcccctcaacgcgctggacgacccgccgtaccgcatcaacaactccggcgtgcgccgccccatcaacaacaagaccacgccggcgtccgcggtgcactacggcggcgtgcgcgactacgacgcacacaacctctacggcttcctggaggcgcgagccacgcacggcgcgctgctcgccgacaccggccgccggcccttcgtgctcagccggtccacgttcgtggggtccggccggtacaccgcgcactggaccggagacaacgccgccacgtgggacgacctccgctactccatcaacaccatgctcagcttcggcctcttcggcatccccatggtcggcgctgacatctgcggcttcggcggcaacacaaccgaggagctctgcagccgctggatccagcttggcgcgttctacccgttcgcaagggaccattcggcgatcggcacggtccggcgcgagctgtacctgtgggagctggtggcgcggtcggcgaggaaggcgctcgggctgcgctaccggctgcttccgtacatgtacacgctgatgtacgaggcgcacaccacgggagcgcccatcgc

SEQ ID NO: 91800 - DNA, 710 bp, Zea mays
  Clone ID: MRT4577_183717C.1
cgtgcggcgctcgaggcggcgggtcggaaggaggctctttgtttgttgagaagacagaacacactaccgccggcatcagctagctagagctagccagtagcgatggcatccaacaagaagcccattgctgccaccgcgctcctgttcctagcggtggcactcacgttggcggcttctgtccgggctcaggcactactggctccgacgcctgcgcctgcgccatcccaaaatccctgccccgccggtttcaacaacttacttgcgtttgagatagccaagaaggaatttcttcttaataacggtactatgctgctattgttcccgtctcggggcacccaaagcaccacatcaatggcgccgtctgcggctaagggagtgcgaggtgtagtctgcatctgctttctctgtacaaaccgtatattaattggcggccccctcacatgccagcagctggtgtagtctggccttctccgctgaaccccatgctcaacatgtgtccggcccgcacctatttattactcacatactatatatatatatatgtactcatcttctatgatgaataaataagtcacgccgtttattaaatatatatacagatatatgtaatgcgtgatatgtgttggtgttgtaattgtatctcttctcaaaaaatcaatctatatactatacatatactggtacaaaaaaaaaaaaaaaaaaggccccta

SEQ ID NO: 91801 - DNA, 159 bp, Zea mays
  Clone ID: MRT4577_183718C.1
gatgattctcgagaaacttcaaaagaaggatacatatggagtgtttgcggacctgtggatccagaggagctgcctgattaccacgatgtgattgagcacccaatggacttcagcaccgtcaggaagaagcttgccaggaatgcatatcgctcgttcgag

SEQ ID NO: 91802 - DNA, 242 bp, Zea mays
  Clone ID: MRT4577_183719C.1
gaaacaacgcatacaggatagattgtgtggagtttaatagttagcttcgtgaatgttgaccgaatattagccaggataatttgacttctagtaaatagaaaggtgcaagtcaccatgaattggaagtattaaaaacggaaaagaaaggtttaatagggtaaaactaaataagaaggttaaaaggggaaagtaactggaatacaaaaaaggttttgataagcagttcaggtgccaaacaaaag

SEQ ID NO: 91803 - DNA, 373 bp, Zea mays
  Clone ID: MRT4577_18371C.1
actctcctgcgttggagtttttctttttatacattgagctactaaattcaggatttaaaaaataccttttggaacttgaaagctactgctctgggattaaagggcaaacttggggcctgaacaacttttttattgaagcaaaccggacctacaaggcactcaatttttggaaaaaatggtactggacaaacacatgcgagggctgttctcacaaaatacttcaaaaaatattggcgctcatgaccagttcgaccacacttcccttaattatgtggtggcttaatacacaagaaactcaatgctcagcctggggatcattaccggtctgcatcattacaaagttgagcaaggagaacaacatcgcgcggtccaa

SEQ ID NO: 91804 - DNA, 189 bp, Zea mays
  Clone ID: MRT4577_183720C.1
catcttcatgaccaccaggaaacaaaaaacgccactattgcacaggcatggggcatctaagggtacaacgccgactaataatctcgacttggctatgcgaagcaacgtgcaacagacgacacacatgcatatatcagcatcaattaattcacgtgcgtacaccctctacgaaacgaaagacaatgaacc

SEQ ID NO: 91805 - DNA, 240 bp, Zea mays
  Clone ID: MRT4577_183721C.1
acggtctagctctaacctcacttcgctgaacacatggcataggttacacttgcctgaaggattaaggccgcgtccacggtagcccatcatcaaattaaggctgcgtgagctaatcaaaaagagtttgcttacgggccattctatatcaaccaaatacagaatacaagaatattcatgctttgatgtgaaaaatctaaattattctggtcttcacactgctgatgctgttgcatactctcc

SEQ ID NO: 91806 - DNA, 323 bp, Zea mays
  Clone ID: MRT4577_183722C.1
aattgccgggtcgacgtttctactagtcggcggccgccctgtgttccaggggttttaggaatatttgagtggcgatagccagcgatgggaagcaccacgtcttccaacggggcgtggaaagcgtacaggagggaaggcaagaggttcaggatgagcaagctatccagaaggttgagagcggtcgtcacagaagactgatcaatgtggggcgtttatgatacgggatcagcacgctccttattatgacctgaacagtataccagcaggctccgttgactgcataaacgttctgaatggtatgtctagtggacggtataatcagc

SEQ ID NO: 91807 - DNA, 367 bp, Zea mays
  Clone ID: MRT4577_183723C.1
taggtttatgaatcaacattcattctacttaaaaaattggatgggccttattattatacaccaaggggaaggccctcttctttttttaagtattaagattctggcaaagccactggaattaacccaacccttccttattaaaaaacccaagggcctgcatgggccccccttaaaaaaagggtgggccgaaaaaacctttgtccattattgccgtttttggtttggccacccccgaggaagggtaggataaacccttttggccaacaaccccaaggaaaatgccaaggaacccaaggtccttgaaagtgggaaaaaggtccacttggttccaaaaaaaaccgtaaaccttaaggattgttcttactga

SEQ ID NO: 91808 - DNA, 350 bp, Zea mays
  Clone ID: MRT4577_183724C.1
agccacccaggcgatagaggtgccgcaggcctactacaaggaggacagacgacggctgctagagctagacaagaccacgtccagtgctgatggagcagaacccacgcccgacgaggggagcgcgcaacctcaggactgcgcggagggctactgggggactggtccagataccgaggaggctgccaacaacgaggaggcaggcgctggaccgcgctttgacccaccgacaatcggtgagattttggcatttcgtcagaaaggtatatacagtgccccctgcctatgtttactagtacactaatatctatctatctattagagatgagatgcatgtgacaagagggactgaa

SEQ ID NO: 91809 - DNA, 136 bp, Zea mays
  Clone ID: MRT4577_183725C.1
aagggcgtcccggcgctagggtggtgggggatgctagtcggctccctccgcctcgcctccagctggttcagcttcgtcgacatgtgcgcgctccgcgtcgccgtcttctcgcagactgagatgactgatgttcatg

SEQ ID NO: 91810 - DNA, 254 bp, Zea mays
  Clone ID: MRT4577_183726C.1
cggatggaaaatggcaaatcactcacacagagtggtcaatatggcatcatgttcgcgacaccgtttgaggcgtacggcgcacctcccggccgccggatctgcgccggcgacgcgccctgacgtcggttctacgccgccgcaggatgatgtatgcggcgctgtggccgttccttgccctcgagcgtctagatccgtccctccgctggatatatatatcagtcgatgtccctgtgatatcgagctgcagttgatgc

SEQ ID NO: 91811 - DNA, 505 bp, Zea mays
  unsure (1)..(505): unsure at all n locations
  Clone ID: MRT4577_183727C.1
caaaggcacacacaagcnnaaaaaaaggagggaccaggacgcgggnngccccaaacgcgcaagagggaacggccaggacnccgcgggcccgccgccgnncagagggccccgnncnccccgccgacgncgacgcggccacggcgnccgccgcgncccaaagaggcgcggngaacgaccagcgggccaggggggggcgcccgaaggggcncaacccggacnccgncaccgncaacaggggngacgaggccacgggcgacnnngagaaccaccnngncagcaccggcgacgngcacnncggnngccaccnggngaacgacgagaggaccanaaccggnaagcncnccaggggcgccanngnggaccngnccgggggccaggccaagaagcncnngcngngggagaacgagacggggaaggnggcgcaccccgaccagggcacgaaggagnnccaggccgggaaggggagggagagggnaagaggcagcaaganggacgaggngcgcac

SEQ ID NO: 91812 - DNA, 253 bp, Zea mays
  Clone ID: MRT4577_183728C.1
agagtggggttcttgttcccgtttcttttttctttctggccggaatgaatatacataagcccggggttcccaaagaccataaaatggggccctgtttttattcctaattacgaaatggaccccccatatttttattgaaacatgttaccagcgtttttttaaacaagcctaatcaaggttcaactggggccccctattaattcagttttttgacaaaacaagccaaaattcgttcaaaaaacttggttaaacc

SEQ ID NO: 91813 - DNA, 314 bp, Zea mays
  Clone ID: MRT4577_183729C.1
tcgacccacgcgtacgagtcctgtgccatcgagaagatcgactattgctgaacggaaacaaccgaaaactggtgagcagtcgccacatcgcgacgggaaaattgaagacatagaccaggtcaatgtgaagctggtccggaagcaagaggacagaagactaccaatgctggacgtgcggcttatctaagctaaccgaagtcaagaggacccaagtttatgaccgcctacagcattcatgcatgctgtatgagaacaatcgtcatctcgacattccaaaacagaacaatcactggctgtaacgtccgaggagatct

SEQ ID NO: 91814 - DNA, 427 bp, Zea mays
  Clone ID: MRT4577_18372C.1
acccacgcgtgcgcccacgcgtaccagcacacctgcgcaactagcaacatagaaagcacattcgggtgccgacaattgtatccgaaagatttggctaccttacgctccttggtctatgtgcacatgctgctaccgcaaccatttttccacaatgcttacaagctactatagcttcccttcttgcaacatacatctcaccagccctatatgcaactgcagacaacccaattaggcaacattcctggatcacaacttgcagtctcaacaagcatcttacctatatcaccctcagtcatcgcaacacacgcaagacgtatcacaagatgtacctactgtcgctacctgggaacaacccattaggtctcaccaactactataactagtgttagcaacacttgctgcatactttcaaccaacatgagtacac

SEQ ID NO: 91815 - DNA, 241 bp, Zea mays
  Clone ID: MRT4577_183730C.1
agcggtctgtgtgagggagatgcccatgcagagcggccacagggcatgttgccatcctcagcccttcctggcaagcaagcgggggaggaagagaggagaggcggtctctgtacaaaacaaagtatttttattcatttgtatttattaaatgaaaaaaaaaaaggaattctctggtgcccctcttctaaggtggcctttaaatgctgttaaataaaattgtgaaccggtcctcaaaaataag

SEQ ID NO: 91816 - DNA, 315 bp, Zea mays
  Clone ID: MRT4577_183731C.1
gggggcccaaggagggtgggaacttttaaccaaagggtcaaaaaccggtcaaaatttaaaagaccgacccctgaagaatttccactggatttttaaattcacataactcccggttttccccaaacacccaaaaggcttggggctcccaggcaataaacaacagggggccggttaaaaaccgggggttcctcctccccaatgcaatagggaaagaagggggggccctaaactccaggcccaaaagaatcgggaagccatgtttgggggctaaaaagagaacttttgaccccctgggttgccctttgctgggggggg

SEQ ID NO: 91817 - DNA, 225 bp, Zea mays
  Clone ID: MRT4577_183732C.1
caagtgcccttcgccgtccccttttctcgcctcgcgttaggtggggtgcttgcgacccgcacatctccctccgggtctcgccatgggcgccggggccaacaaccacgaggaggagagccggctgatcccagctgcggttgccggccccgcgggcgatagccccgggggggggagggggggggccggcgccccgggacggggggggggcgcccccccttttttttt

SEQ ID NO: 91818 - DNA, 448 bp, Zea mays
  Clone ID: MRT4577_183733C.1
aggccccaaacgcaggcagttctcaggatggcgcttgcccacctccactacgtgctcctatagggggagcccgtcgccgccttcaacgaaggcgaccacagcctcacgcacagccacctgcacgcgcgcgagacagcacaccggggagaacgccacgggcgacgtcgggccggacgccgcggggggcgccaacgcgccgcctgggaagcatgggagtggcgggggaagaagaaggactgggagcgcaccggggagcgcaactggtccaccgtggcgagcgtgaacgtgtcggcacgagcgtgcatggggggggagcctacgtggggggcatcacgtgtgctgccaaaggtcggcgaggcctatggaagcacacagtgcggacaagaaggactggttgaggggcatgtacatgccgagcgcctccgtgaccggcggatacgggagggtg

SEQ ID NO: 91819 - DNA, 576 bp, Zea mays
  Clone ID: MRT4577_183734C.1
atggaggtttcgatggttgagcctacaaagcacccaccgctacagttcgctggtttcaccgggtttgggcctcaaaatccagtggtacggttccgacgggaatcaatgtcgtcacgtggcatcatcacaaagggtaccttcggattcggttcagaaccacaatatgaagaagtacgaagaatgcgaaggttggcgcagagccgaagctatgctcaggggaccttcggcgtgatatcagaaaaggggaaccgacttaaaagggaaaaggctattcagacctcgatggattactatagagtcattggccaatgtaaaggcataagtgtaattttacatgggctgcgtcccgtgcctataaataggtgaatgtaaagggcatgcatgtaattttgcataggctgtgtcctgtgcgtataaataggtgagcggtacccccgtactgttcacgctgatttggcgtttgctcgtgcgtcacacttgtactttcattcccttcccagctgaaggtacatttgtaatgtgatgttatttctgtttctttataataatgccaatttgataatgatataattatct

SEQ ID NO: 91820 - DNA, 238 bp, Zea mays
  Clone ID: MRT4577_183735C.1
tttcatcctgtaccgccccgacatggagatgctattccgcgcaggctgctaggtggcccgtcgaccgatactatcgacatctagggttatgacaatgaggtacgatggccaagtagctcgtcgggcacgtaaggttgaagccgcaaggacgctatcctcggagggaccgatgaaatcatagtcgagaaaaagcacgataaagtgaacgttgacatgaaatcctaccggaacaacaacg

SEQ ID NO: 91821 - DNA, 229 bp, Zea mays
  Clone ID: MRT4577_183736C.1
aaaaaaaaaaaaaaaaaaaaaaacccatgtgccgcgccgctccaggccgcccgttttcgcggcaactgaaccaccggacagcacaacatggtccgacctccgcactccaccgctctccggcactcgcccggcgccctccctgagccagccgctccggcctatctccaccagacttcacgccgcgccgcactagaggtgtccggcgcagcgaaccaccctgcatgcagca

SEQ ID NO: 91822 - DNA, 743 bp, Zea mays
  Clone ID: MRT4577_183737C.1
gcggaccacccggccggccccattatattggacgatcgatgcagtcagtactcgaacgatagtgactgagtggcccgcagcagctctagcgcaaggacgactgcagctacactgtttgtttgttcaagaaagcctgtaggatcgatcggatcggatcggatcggacagagcgagctatagctagctagggctagctagctagatggcgaggctacgcctggcggtggtcgccgtcgccctggccttgtgctgctgctgctgcctcatgatccacgcgccgacgataggtgccgctgctgccgccgacgccgcctcgtttcctcctggactggaggtggcggcgcagcagcaggatacccgccgagtggctccgccgccgtcgtcgtcgtcgggcgcacaacaccatcaggaggccgccgccggcgccgtagctgcggaggcgacaacgcccgtcgggaggaagaggacggagctggagctggtggaggactaccctggctccggcgccaacgaccgccactcgccgtgggcacagcagcggaggaattgatcgtcgatcgtgatccacgaccgatcgatcgatcgagtcacctctctggatttttttttttggttccacacgcacgcacgcacgcacagcagtttcgtatgcagggcgtttcgctactgtagctatgtagtatgtacggctatacgattatacatcgtatttgtacttgtatattattactatatgcgtacgg

SEQ ID NO: 91823 - DNA, 250 bp, Zea mays
  Clone ID: MRT4577_183738C.1
gacccgtaagctatcaacgcgtgggggtggttgccaccaaacaccttttaactatttaacaggttgcaccctacatcagctttttccacagcttacaggccacagcaacttttttgacagccacagtctaactaaacagaccctaactcttattttctacaaactatggaaaaattacagcattccttttcagctgaagaccttggatctaagatgctcaactcgctcctggtacttactctttctagcg

SEQ ID NO: 91824 - DNA, 400 bp, Zea mays
  Clone ID: MRT4577_183739C.1
gctagcagccatacttactagtaccacgaagccgatcggtcgagaagatccatcggattaacacccaccagcccgcgcgccatgtcgttcctcccgatcccactgccagtcgttggagacatagccagcaagctgcacgaccaagagaaaccgcgcggcaacggcacgacgtcggcggcggcgcctatcgtcggcaccgtggccagcaggtggcgcgagctccacggtgagaactcgtggaagggcctcctggaccctctggacctgcacctccgcgccaccatcatctcctacggcgagatggtgcaggccacctacgacgggttcaacacggagaggcgctccccgcactgcggcgcgtgcttctacggccacgacgacctactggccgggcgtgggg

SEQ ID NO: 91825 - DNA, 1129 bp, Zea mays
  Clone ID: MRT4577_18373C.1
gtagacctcgaggccggccgggacttcattccggtttccggatagcttacctcccatcgacggtcggtgagccgttggtgagtggcgagacagcgggtgcgctgggcaagaacaggcgacgaagaagatgagcacgctggacacgcggacgctcaaggacgagctgacgagcatggacaggaagtgcctcgtggacctcggccacccgctgctcaaccgcgtcgccgacagcttcatccgcgccgctggggtcggggcggccagggccgtctccagggaggcctacgtcgtcaccgtcgaagggctttcaggagactcgtccgggctagacgccgacggcggcaagcggagccatttctccagcatcagaggtgacgacggccagaggtcgctcgacgcagtggtaaaaacggccggcaaggaggccttccagtgggggttggcagccggagtctactcagggctcacgtacgcgctgcgggaggccaggggatgccacgactggaagaacagcgccatcgcaggcgccatcgctggggcggcggtggcgctcacgggtgacgccggcggccactccgacaagctcgtcaacttcgccatcaccggcgccgcgctctccagcgccgggagcttgctctccggcatattctgattggcccccagggctgcacccgcctgacacgggttcgctgtcctgtccggttaggcccttcatccgaggggttttagcatgaaaggttgatttcaggccaaccatgaaatatgtattcctaggtctctgctggtctagcactgtgcgcttccagtgtaatcgttgcttcgtgtacgagtttcagacatttcgaaatatcttctccgagttccggtggtttgacataaacaaacattttggtaggacttaagtgcttaaatttgtcgccatgttttggcatgtccaacgagtgacaataatgccgtggctaaaaaccaaaaccacgttacagttgtgggtaaaaacccaataaaccaaaaatcatgccatgattgtggctaaaaaccaaatacatagtcaaacctacatgaatttacaagtgtgactgtgaacatagaagtgtatcatggatcacctttagttgattgggaatcttcg

SEQ ID NO: 91826 - DNA, 465 bp, Zea mays
  Clone ID: MRT4577_183740C.1
gccggccggtccgggacgcacctattatgtgatgcaatgtagacactctacctcttctcttgtgactcacagagatctgatcactcctcccgagccgaaagacggaaggacgatacccttttattcctcgcccggtccatcctacgtcagccgtatctaactagctatctttacttgcaggcgccgccaagatgggtatgtattgctctagatgtggaaaccacgactactactccaagacctgcggtggatacattatgcaccgcggcgtgcttcgacaacaacgtacgagtccctgacggtgtacgttatgtacctgctcgtggtgatctcgaccgccgtactggtagccagtgatcaggttacatgaagttgtgcctacaatcgccagctgccggacaagcggaggactacgaggtctctaacgtctgaagcactaagaggatcccccggccccggacgaat

SEQ ID NO: 91827 - DNA, 241 bp, Zea mays
  Clone ID: MRT4577_183741C.1
atcccacatgagattgctaacatcgacaagagaggggcacggaaagacaaggagaacaagcctgagatcctggtgatccagggaccgaaacctgggaagccaacgggcatggcaccgatgccgcagatattgctgaagctgaaacacactcgcccaccacacaggaaaccaactccgccacctgccgcagctaccggaaacgatggagcaccaactgccgccggaaggatggagctaagcc

SEQ ID NO: 91828 - DNA, 271 bp, Zea mays
  Clone ID: MRT4577_183742C.1
cggaattcccgccgcttctaaaccatcgatggattgactaatcaaaacactctaatactttcaccaacgtaataacatgtctgtcgctgcttattctaagcaacaccaacccgaaatgacactacatgcaacccttctctcacgctcaaaagttcaccctacagtataaaagatactttttaccaatgaaaagaatgcatctatggaattctacaacacaactctgaatacacatacacttgtgttaccgaagatggatattatgctcaat

SEQ ID NO: 91829 - DNA, 725 bp, Zea mays
  unsure (1)..(725): unsure at all n locations
  Clone ID: MRT4577_183743C.1
gaggttacccacctcgacttcaccactccactcgacacaggccgacgagcgccgcccagggaatcggaccacgatgctcttccacatcgaggtgtagaggaacatgcaactgcacccacaacacttctgcgccgcacctactcgcgacaaggtcgtttctctggctcatctaggacgcccagggcacctgcagcgcctcggcacggctatcgtatgtggctgatcactgagtgcgcaaggacatcaacaaggtgctcatccgtcaaagcacgggatacgtcaccttccccgtcgaggaccagtgctgtgtctttagacccttcaggggcgagatcctcgaacttgcctgcaccatgcaggactagatgttcttctttgcggaggctggaccgctagcagatcgttcgtgtcctaccatttgattccagacgatatggagttccaatcatgagatgggtcgaactacactacttctgatgaatcggggaaaattcgaaaagagagtgatgtgcgactgaagattattgtgactcctgaccatgctacacaaatgtttttgctcttgacacaacacaagatgatcttctgcgagctatcnaccatcctgatgcggcagtgcatatggtctaataagcgagactgtactccgttgatctgacttctgaaactatcgcagacgtgtgtaatcgctagcccgataaactgcaatggctgtactgactgct

SEQ ID NO: 91830 - DNA, 165 bp, Zea mays
  Clone ID: MRT4577_183744C.1
ggggtcagcagagatgctaagatcctcgctggcatggctggtgcactggtgttggcagtgagtttgtggaggcaggactgaagtagtggtcactgaccaccgtggcgggacggtcgaaactggaaacccaacattgtgatagctttactggtccaatttctgtgg

SEQ ID NO: 91831 - DNA, 428 bp, Zea mays
  unsure (1)..(428): unsure at all n locations
  Clone ID: MRT4577_183745C.1
gccccccncgaaagcccagcaccagcgagcagggcgccggccaccgcacaccggacgggcacggaggagccgccggccncggccccgaccccagcgagggacgcccgccagaaccccgacggccccaccccgcaccacggcggcggcaacccgggcacccaagaccaagaacccggaggagcccaggaagaccgacagccagcgcgcacgggggcaacgacgacaccaagagagcgcggggaagcacggacgaggcccaggcgaccacccaccagncgcgaggagacaaaaaagcccgacgccgccagaaaccccagcccccgcgaaggaggaacacaaaccagaaacacgcccacacgccccgcaaccgccgcagcccgacacggcagaggcacgacgacagccacggggcaccacaagccacgacc

SEQ ID NO: 91832 - DNA, 516 bp, Zea mays
  Clone ID: MRT4577_183746C.1
gccaatcggattttttgctcattcacaccccatgcataggggtctaacccaagagtgagggctcattaatgagtatacagatcggcccattaacaacatggcccttttaacaaacccgacaggacttttttttttttaatgaaaacatacaaccagagcccaatttcaatgatcaatcagaaggactgaactgatccctgaccccattggacggccaccggactcttaacaacgtgttcaccgtctgtccattcgatcgacccgaattcatgacccggcacggatccgactcctccgccgagcacaacgcttttaaatgggacttcatactccaacacgcttttttccttgctgaacgcaagcttgcttggaaaaacatcaatctcaacattcgccggagatttaactccgacttcgtacacagcgtcgacattgtttcccacgtttttgacaacccttttgtatttcacaacttccccgggcgatgcgaaaaccacggagaaagaagggtaattg

SEQ ID NO: 91833 - DNA, 604 bp, Zea mays
  Clone ID: MRT4577_183747C.1
cactcctatgggcgattgggatcctaaagggcggccgggggagacattccttgcgcgcgtcgagttgcggagtctgatttcaggctgcagtgcagccacatgaccgcatgtgttttccccccggcgacaaggacgtcgcggaagtcgacgcggcctgcgacggcgagctggaccgccgcgacgtgggcaagatatggaacacgggtgaagcactctcgtgcctgcttgatgtcccgtgcctccgcctcccgtccctgcttctggtgtccaagcactctccccatgtgatgcaagatcgtggcggctgggtggcgccgccatgctgcaaccagacatctctttttttttttgtcagtcttaagggctggtggcaaggaaaactttgtccactctgtcaagtgtggtacgctcctttgcttcaaccaatttgattgcgtcattttgagctgggtggtgattcagtgtttgccccatatgcaatgcagcagtggtcattttgaactgaatgttcttacatagttacatcctactctaggagtggaaagaatgcaagtccaagttcagtcaacttttttttgtctctaatgaaattctttcagggacc

SEQ ID NO: 91834 - DNA, 290 bp, Zea mays
  unsure (1)..(290): unsure at all n locations
  Clone ID: MRT4577_183748C.1
ctcgagggcggccgggacgggctctcttgcctctctgcagcccgcacgaaacatcgcgccctagtaagctaagcagcaggctgattccccacgaaaagctccgattttgaccgccggcgagccatgtccgccgcgccggatgagttcctggnacaggggggctacctcgccgcccccgagcccttctcaccctccatgttcctcgacctgcccccgacgccacgcccaaacgggagacgacccgacctccgacgagccagcctcctccgatgagctcgtcctccccttca

SEQ ID NO: 91835 - DNA, 646 bp, Zea mays
  unsure (1)..(646): unsure at all n locations
  Clone ID: MRT4577_183749C.1
cgtccgcgntctcttactccggggggtgggtggggtgtactctccaagattctcttctgccgtggcgaccgctctacacnngtctcttgtcgacctggnacacnncgaggtggaagaaggggaagcagtcagcagnatggggatccatggnnatcagcnnagccagcccttctcttgtagtccttgaccctgcgcgtggggcgtngcggcggcgctcagtcctttccaccaccaggncnngccggtggccccgtcgccctttgccccaaggcccaagctnngctcgtcgaggaagaaaacttcnnctcctgccgnncctccaaagnaaagaaaccagnagnngtcgcggcttcttcgagaacggnnagctgcnnagcggnattgggccgaggnnagaaaccgnngcgcctttggcggnnaggcgcttttggccgagnngtggccnntccaagtaccgaaggcgcttgnncgggggccagtaccacggnagnaatggtnnggccgnncggcggcccccacggccttgcgggaaaccccacccnngtcgtccaacgtctttaggggcnngggtccgnntgtcgcccgtcgctggaagccgcaagaagcgagaagcacggnnacaccgcnngccgcccgcgcccagcag

SEQ ID NO: 91836 - DNA, 370 bp, Zea mays
  Clone ID: MRT4577_18374C.1
cgagcggccgcccgggcaggtacaagctttttttttttttttttttttttttttggtttttttttttttttttttttttttttttttttttttttttttttttttttttacaaaaaaacaactttttttgtaaacttttcgaccatccccaacaaaaagggggcacttccgcccctacctcaaaattcggttttaccgcaggaagcaactaccccaaatttttcaatctaaaacagatgagacacccaaaggggggaaaaagcttttagcccctgaacaaacccccttgaaaatgaggggggggcaaacaatgagccatttgaaccccaccacttcggggggggcattcaacccgctttggcaggggctg

SEQ ID NO: 91837 - DNA, 238 bp, Zea mays
  Clone ID: MRT4577_183750C.1
ggggggggggggtttttttttttttttttttttttttttttttttccggccggctctttttcctctgatccctctcttttgcggggatttcaatgcctgggaactgaaatccctcccggccgggtagcttctctttcttttgttcccctctttttgtggggggggggcccccctgttccctccgttttggtccttgaggcccccccgtttctggggcctctcggcggggctgcctccc

SEQ ID NO: 91838 - DNA, 472 bp, Zea mays
  Clone ID: MRT4577_183751C.1
gtcctcctgctcactcctggttcctgcacctgggacaccaagcacgtaacatcaacttagatgacgaagagtcacggctcgccgtgagcctccggccggggaacttactgatcctcctccacgtgaagttactgctagggctgctgctgacaacatgcttagcgtggatgcccaagctcaacctctcaccgcctaccatcaaaatgccccaactgacgaggaacttgaattttccactccttaccttataatgcctaagtgctgcagactgtgatgcatgaatataatgcatgacggtatgtaactaagcgatgcgaacgttgcaaaatacatttcctaataccaaataaaccatccagtgcaagccgaaacgtgatgaaagctaccggtctggaaaggtacacgtaccagtaccaaaagaactaatacagtaagcactgaggaatcagtaactaatggactatacaccaga

SEQ ID NO: 91839 - DNA, 375 bp, Zea mays
  Clone ID: MRT4577_183752C.1
aaaaaaaaaaaaaaaaaaaaaaaaaaaaaaaaataaataaaaaaaaaaaaataaggagggaaaaaaaaaattaataaaaaacataaaaataaatacaataaaaaaaaaaaaaaaaaaaaaaaatggggcgcccgttttaaaggttccaagttttcttccccgtgcttgcaactttatattttttttttggggcaccctaattttattttattggccgtgctttaacaacgtttggattggaaaaaccttggagttaccaaatttaattcttttgtaacacttccctttttcaccacttggtattttactaaaagggccctcaccgatcctctttccaaaaagttgcccagcttaaatgtcaattggaccccccct

SEQ ID NO: 91840 - DNA, 928 bp, Zea mays
  Clone ID: MRT4577_183753C.1
gttttctttggaggggccggaaggaggcaagaggaggtcattgtcttgtagcctggggtcgagtttgccgaccactgcagcttggaggtcttggcatatctagttttctagaattatgttgggcccttcgaatgcgttggcgctggctgcagaagactgatcctactcgttgcggttttgtttatacgacacttaattgaacctgctgtagctaaaatctgatgacttgcattgtccctctccaataaatgcattgacctatagagacttgttttactgattaggaaaacagtaactataatgttcaagccccactatttatataacatttctacaacaagctctataactcaagcatgcctgcactcaggaacaaatcacgcgaggcaccagcacttcgaatggcccaaggctacactcaaatgtgagggagttgtgcctttatacaatgcatcaaatgcacaatagcatagcgagatttgtaaacataaattaagccaaattgctccaaaagtaacatattcaccgtggctagtaagaggatagggtagggacagacagatatcattgaacagtaataacaatggcagaatgctggcgcagggtaagcatacaaatatccttgaaaagtaggagcaacaacaaaagcagaatataatttgtttgccctggtgtgcccacttgatagcagcacaacagcatccgtggtgcaacatttagggaaggagctctcaaaatacagccataagaatggaataatgttgcttgccagatgacccacggttctttgaactttatctagagatactgtcctccccaatccccatcctggatggtttgcacgagtatggctattgaatactatttcaggttttaaccttgatatacaaggccgcagtcatgctcctggcatgtttttaacacaatt

SEQ ID NO: 91841 - DNA, 391 bp, Zea mays
  Clone ID: MRT4577_183754C.1
tgcctaatgcatgcacactggcgggcgctcgaggatgcatcaataggggccgcatggacctatagggattggccacacagagcagctgtacatgaaagcacaaggtgctgacggagaaaaccgtgagggtacaccatggataggtgactaagcgcaggcacatactgccgcatgtggtggtggcgaataggacctgctcgatctacatcaagaggattggatgcaagctagctgctgatgggagacgcgacggggcccaccatgaatagggggctcagtgctggtaacaaccgttgttgccgctgcgctgggaagggccgtatggccagatgcgccaaggattgttgctgcctttgtgcacacggttgctgtaagacgctcgccggctcta

SEQ ID NO: 91842 - DNA, 1872 bp, Zea mays
  Clone ID: MRT4577_183755C.1
gaagctatatgggttcgaggcatctctatcgctgaacactgggaccagcgacctctgaaaccctaaccaaataaacccaccgttcgaaatcccgaaaggccaaaaccctcctccgacccttcccgccgccgccacccccaccccgaccggcaccaccacctcctcgctccacctccgtccgccgtcgccgcgatggaagacgacccgtcgcgccaggtgcgcgtgcgcttcgtcacgaagctgccacctccgctgcgggcgccgcccgctgccatcgccgtccccgcggacctcactcgcatgggcctctccgagatcgtcaacagcctcctcgcagccgccgagccggaccaccagtcgcagcccttcgacttcatcgtgcagggcgagctcgtgcggctgccactccaagagtttctcctcgccaagggcatctccgcggagagggtgcttgagctcgagtatgtgagagcagtggcgccaaggaagcaggaggaaccttgcccccatgaagactgggttagtgctgtggatggatcaaacccaggttttatattatctggatgctatgatggtcttgcaagattatggaaagatgcagcagtatgcacacaaattttggagggacacaatgatgcaattacttctaccagattcatcaataagggatctgaaaccgagggcagtctgcatgtagtgactggctcaaaggataggtcactgcggctatacaagtgtgatacatcagtcattatggactacccaaagcgggttggggcttacaaaattctccgtggccacacggcatcggttaaaagtatctccgcagacccttctggcgatatgctatgttctggatcctgggatggtaccatcaagttgtgggcagttgaaggatctgatgacgatgatgctgtttcattgaagaagagaaggatgaattctgactcatctggacctgaagagtctcagttagagggttcagccacttcaacacttctgggacatacacaaggtgtaactgctgttacctggcctgaacggaaaacgatatattcagcatcttgggatcattctgtgaggcagtgggatgttcaaacagtgaaagaaacatggaatatgttttgtgggaaggccttgaattgcttggactgtggaggtgagggttcttcattgattgctgctggtggctctgatcccgtgttgagggtatgggaccctcgcaaaccgggaacattagcgcctgtttttcaattctcctctcattcaagctggatcactgcttgtaaatggcatccgagttcttgtttccatttggtgtcttcttcttttgacgggaaagtgatgttgtgggatctaaggacagcatggccgctggcgtctgtggactcgcatgaagataaggttttatgtgcggactggtggaaaggggacagtgtgataagtggcggagctgattccaagctatgcatctcatctggcattcaaattgtgtgatgaagttcttccttgtgcttctcgagtccatgctatcgagattatatgggttgacaaaccatttccagaagccaaataatgtcagatatgtctgtgggaagatatgcaacccttcagtcaagatcaagatacggcacatggttttgccagatatgtatgcagaagtgcatttcttgcataagtaagatccaaagcaattgataactatatcttgctcatcaactttttgtgtgtgttcaggtgcgtttggcaccaatattactctattattccaagaccatgaattaatagttgtagtctgggctgactgcctctgtttatgctctaaaaaaaagaaaaatggagcggcagcagcctggtataaactaacctaac

SEQ ID NO: 91843 - DNA, 1255 bp, Zea mays
  Clone ID: MRT4577_183756C.1
ttcttccggtaacgaagcaactgttcctgtgcgaccgggccccctataagcgctcctcccgaagcccaccaccacacatgccaccttcgcttctcccccttccctttctttggtcagtcccaaaccctaacagcccaccaccctccgcgacgaggaggcagagtggggcttaaaccctaccgcccccgaagcccagcggcggccatgaagacgctgtgccccaagcccggaaagggcggcaagatccacccttcgcccgccgaggaccccaccgcggcggcattccgcctcctcccggccgccatcctcgtcctcgtcgccgggctgtgccccgaggaccagcgggtgctggcccacctcgtcacgcgctcgttcctgctgggctgggacaccatcacggcgccgccgccggagcaggcgcgcgggggcccgcgtcgcaggcgcggccacccgcccaccgtcgggtgcctgtgcttccagtgctacggcagcttctggtcgcggtgggactgctccccgcagcacgaccgcatacacgccgtcctcgacgccttcgaggagcacctcaacgccgccgagtccgccgccgccgccaccgccacccctccctcctccaagcgccgcgacaagggaaagcgcagcagggctcctgccgctactacacctccgccacagccgccgacgcggggcagccccgagtcccaggagcccccatccgaggtggcgcatgaaccctcggcgccgctcctcccttcctgcccttgtaccccgccaccaccggcccccgcggcgtgcctctccgagaacaaggagaatgtcccggaagagactggcgcggaggccaaagcggagcaatgcggcggcgaggtggcggcggaggccgatgaagagaggaagcgcgggtgggcggacgtgatgggcggggtgctgaacctgcgccgctgggggatttggagccccgccgtggagagcggcgccacctaggtgcggcaggcggccaatggcattcctgtaaatgctgggcctgtctagggtacttttggcaatagatcggactgcgcacgcagcagcagaggtagagagagagagagagagagagagagaagcgctggtaactcttttctctcctctgttgggggcagggaaatggtgatctgcaagcgcgggtagctactgtattttgttggtaattatggcaactaatgatggtgcaactgcaactgaaacaagatggacatcacttggtgcttgatcc

SEQ ID NO: 91844 - DNA, 676 bp, Zea mays
  unsure (1)..(676): unsure at all n locations
  Clone ID: MRT4577_183757C.1
aattcggcacgagggacctctgaaaccctaaccaaataaacccaccgttcgaaatcccgaaaggccaaaaccctcctccgacccttcccgccgccgccacccccaccccgaccggcaccaccacctcctcgctccacctccgtccgccgtcgccgcgatggaagacgacccgtcgcgccaggtgcgcgtgcgcttcgtcacgaagctgccacctccgctgcgggcgccgcccgctgccatcgccgtccccgcggacctcactcgcatgggcctctccgagatcgtcaacagcctcctcgcagccgccgagccggaccaccagtcgcagcccttcgacttcatcgtgcagggcgagctcgtgcggctgccactccaagagtttctcctcgccaagggcatctccgcggtacattttttcggagacctttttttcggaggtgttgttgcgtaggatgtggttgtgatttgcgcgaggattcggtgtggatgtgttgcaggagagggtgcttgagctcgagtatgtgagagcagtggcgccaaggaagcaggaggaaccttgcccccatgaagactgggttagtgctgtggatggatcaaacccaggttttataatatctggatgctatgatnggtcttgcaagattatggaaagatgcagcagtatgcacacaaattt

SEQ ID NO: 91845 - DNA, 554 bp, Zea mays
  Clone ID: MRT4577_183758C.1
ttttaaaaaaaaattttaaaaaaaacccaaaaaaggagaaaggggaaaaaaaaaaaaaaaaaaaaaaaaaaaaaaaaaaaaaaaaaaaaaaaaaaaaaaaaaaaaaaaaaaaaaataaaaggggggtcccttttggggggacccaatttttcggtccgggggctttcgtatttactccccctttttttttgtggggggggggggggggtttaacctccccccttgttgccaccccgtatttgatttgggaaaaccccgggctttccccatcttggcgggctttgaaagaagtcccccttttgccgcggttgccctttttgtagatggggcctaccccgttctggctttcccaccttttccgcgccttgattggtaatggggcccggcccttgcccccccctttaacggccgctggggtgggggtttcccccagggccccccttttctttgccttgcccttaggcccggccccgttgggtttctttccctcgttttgccccccggggggggttttttcccgggtttgttttaattgggggcctccttttggggcc

SEQ ID NO: 91846 - DNA, 305 bp, Zea mays
  Clone ID: MRT4577_183759C.1
aagcagtggtaacaacgcagagtactttttttttttttttttttttttttttttctgttggaacatcccactgcctcacagaatgatcccaagatgctgaatatatcgttttccgttcaggccaggtaacagcagttacaccttgtgtatgtcccaaaagtgttgaagtggctgaaccctctaactgatacttttcaggtccagatgagtcagaattcatccttctcttcttcaatgaaacagcatcatcgtcatcagatccttcaactgcccacacccgcgtactctgcgttgttaccactgct

SEQ ID NO: 91847 - DNA, 285 bp, Zea mays
  Clone ID: MRT4577_18375C.1
gactcgactcctgatccttgcctttatgggagctgctatagctgtccccgttgatgatgatgacaagattgttgggggctacacctgtgaggagaattctgtccccgaccaggtgtccttgaattctggctcccacttctaaggtggctccctcatcagcgaccagtgggtggtgtcagcaggtcactgctacaagccccacatccaggtgagactgggagagcacaatatcgaagtcctggaggggaatgagcagttcatcaatgcagccaagatcatccgcca

SEQ ID NO: 91848 - DNA, 350 bp, Zea mays
  Clone ID: MRT4577_183760C.1
atattattatatttggtgatatgaggatttttaaattttttgtgtttatataatatttttttttttagataaaaaaaattttttttgttaatatttttcctaatatattaacaaataaaagtgatgtgtttgtattgagttaaataattagaaacttatgccatctgagaattgtgattgatctcaaaaaaaaaaaaaaataaaccattaggccggataaaaaaataaaataaaaaaaaatgcgaaatgatagctaaatctataacgtaaaataaattcaatttactgtccgttgtttaacaatatacttactgtaaaaaccctgaaattaaacaaattaagcgcctttt

SEQ ID NO: 91849 - DNA, 503 bp, Zea mays
  Clone ID: MRT4577_183761C.1
ggggtgggggggggtgttttttttttttttttgttggttttttttttttttttttttttttttttttttttttttttttttttttttttttttttttcaaaacccaacaccttctttgggtttttatttgaccatctcaacggtcccccggggggttagaaggaaacatgccatccttccacaaaacatggcggggtaaaaaaaaaaaggggaccccaaatttcatttgtggttccccacacaaaaggacaaaacactacccatttgttgtttgcagctcatgggggcaggaaaaaacaaaggaccgttaatcatctgtctaaaaacggaaaaaaggtttctggccccaaaagggtaacaacttattacagttctgcattggggaaaaacaaaatctcactttattttcttttgggaaaacaaaacatgcttgttcacccggggatcatactttctaaactaaaccttttgggggatccaacaaggattcttccccttcacgt

SEQ ID NO: 91850 - DNA, 348 bp, Zea mays
  unsure (1)..(348): unsure at all n locations
  Clone ID: MRT4577_183762C.1
ggcatgttgtgcagtagaaacgacaggagttcgaatgatacaagctacccgtttcaccttgaatgtcttgcgacagggcttggtcgagtgtttttggtgcaactaaaatgcggactaagacattaaatagttatgcaaaaatcagatgcttcaaggatagttttttgtgtgtatcagatgcaaaaatcagatgctttaaatagttatgaaataatagttatctgttcgcacatacttagcaaggaaaggaacgcaatggtgtcagatgtganatgcttatgaaatggttgagtagatgttttttacccatctctcgtaacataatcgagcgatatacgctagattcta

SEQ ID NO: 91851 - DNA, 629 bp, Zea mays
  Clone ID: MRT4577_183763C.1
atgaatccactcccccctcccctgatccaatcaccacctacctccaccttctgcagcgccgccgcacgccccgccccgtccaccttctaccggcgccgcagtcggatccccgccccaggccgccgccccgccccgttcccgcgaaccttctaccagcgccacctccggacaaccacccggccgccgccgcgccgccctgaactcctcaaccttctgcttcaacgaccccaaccgcgcccctccccgatccggccccgccgcgccgcctccgacgagccatggcggccgcacacttcctgcgcccttccaccccgcagcggcgccgcccagcaagatcccctctgccactgtggctcacggccagcgcgacctatctcccacagccggattcgtctgtcccggccccgtacgcagctgcgggcaccacggtgaccttccacctccaggcgctctgagccgccacgcccgctccaggctagccgccccatcccatcccccacaaccgcagcctccgacgacactccaggcaacggatcgaggcatctccggcccgatcccgtcgccatggtccctggaggtgagggatccccgagcggcctttcccgctctgacgtttcagccgatgatgc

SEQ ID NO: 91852 - DNA, 503 bp, Zea mays
  Clone ID: MRT4577_183764C.1
gccggccgggccgcgatctatcattgtacctttaatagcctaatcgaccgctgtgacgtgcagaactcgggaatccacggcatgtcaacagagactcacaccgtcgcattgcatgttgacatagaccagctcgctatgcacttatcactcccaggttctactcgaactaggagatgttgctccgagaggttatctccacctctaccgatgaatggggacagagcaggtgggggagtcccactgatcagaggaagctcgaagcaaaaccggaggtattcatacatactgtgcgatacaaggccacaagctcgatgaccacgacctacagtgcaatgaggatgagctacagtgaacttgtcgacagccgcgttaccatgctgccatggtccgaataccgaaagagtgcatgtatatgcttgcagcgtacagatgtggacatgagtggacagtccgaggtcggatgatacactgccgacctggacgcctgtatggtggactggacg

SEQ ID NO: 91853 - DNA, 197 bp, Zea mays
  unsure (1)..(197): unsure at all n locations
  Clone ID: MRT4577_183765C.1
ctagntctagatcgcgaacngccaccctttttttttttttaangnctggggggncngactctgaagagtagcataatttaccaaccagaaacccgaaacttatgttctgaggatcgcgtaacagccacaagttttaattatgtaacttgggcagcaaaattaatgtattnntgttatggggtaaggttgacaacaaa

SEQ ID NO: 91854 - DNA, 233 bp, Zea mays
  Clone ID: MRT4577_183766C.1
gaacatttagatgccgaagaccgtggcggcataggtacacggtgccaacgttgcctccgtcgatgcggcgcagcagcctggtgtcacgcggtctcaacggcgtcgcggtcggcgccgacgccacacagatggtcacccacgccatcgacgaggtcagagcagcagtagccgccatgggtagtgccgcagatgtggagcagtcgaatgagaaagacgggctggagcaccacaac

SEQ ID NO: 91855 - DNA, 162 bp, Zea mays
  unsure (1)..(162): unsure at all n locations
  Clone ID: MRT4577_183767C.1
cccacgcgtccgttagcnatgccgccaagctacnntaattcaaggaatgtatattctanttgatactttgnnatagcagtatcgacatatataaatagaagatccacatgtgatatatatgttcgtttggatatatttcattaatattaatgatctagagtt

SEQ ID NO: 91856 - DNA, 226 bp, Zea mays
  Clone ID: MRT4577_183768C.1
gactaatatacacaggtttattccttctaaatttctgtttttatgcttcaactgttaaagatacttttggatcaagacaacaagggctatcgtttcttaatcacatatgtcaaaagaaaacagtaattgatgtcccattaccttgtttgaaactaagcagaaaaacacgagtcgttggaataaaaaacacacaacgggtttcagttcggcagccatgggggaggaa

SEQ ID NO: 91857 - DNA, 548 bp, Zea mays
  Clone ID: MRT4577_183769C.1
actaattatcgatatattgttacttacggcaatcatgcccttacaacctagctaaacaatcgaggtagcaatcaacatccatcccaattatgaaagtgactaacacacatagaatattatacctagtttagagagcacactaaacgacttataactttaacttcacaattcttggacacctaacacttataaaatcttgatagaagaactttcattaactttctaaactaatttcccggttaacctgtgtatcacatatattaacatcacatttttaacacccacaatcccgcaagcactaggacctattgcgacctctttctccacacgacatcgaccaaatcactgtagatgacttgggcatcctaataaatagtatacctacagtttccttcatcgaactaataaccgaattagcaatcctgactcaccacagaattatcacgattaaagacctagtcagaccattcatcaatccactaacacgaataaaaattcagcttaccaagccaaatcgatccaaaatccacaagaacaacgacgaactt

SEQ ID NO: 91858 - DNA, 396 bp, Zea mays
  unsure (1)..(396): unsure at all n locations
  Clone ID: MRT4577_18376C.1
ccctttagaggggccgccctgcgtttttccttttttttttttttggacccaaaaaggaaacataggggggcaaaatttacaaacaaatgcattcgtcaaatttgtaaaagacacagggtgcctacagccacaccatcggagataccgnnagggaaaagaaaaggtgaaacaatgcacgggcgttactaagctncccacttttatttgggcaaaatttggagggcgagcctaggaaatcgggctttaacaaggtttcttctggagtatttacaaaacgagaaacgcccgaatgaacctgggctggtcagaagaggtcatccaggacctaatacaattttttgagggcgccaacagtaggctcgatgtcttgcacactagttcctacggcgatgggaa

SEQ ID NO: 91859 - DNA, 967 bp, Zea mays
  unsure (1)..(967): unsure at all n locations
  Clone ID: MRT4577_183770C.1
attgggtacctcgaggccggccgggatcctcatctaatgccacaacaacagctctactgaacattaccgctcatcatcagggtatacagagagatcgaagagagacctatacagagatggcctccggcggcggctccaagcagctcaaggctagtcttctcatggtggtagcagctctgctcctcctcatctgcacctgcactaccagggggcaagcggcaaggccggatccaggatccgagggccacacgccacagcagctgcgtgctgctgtatccgttgtctccgtcgtcgctggtcatgagaagaagagtggctcatcagtggccgtggtggaaatgcgtcgagaagatccggatcaggcggcgagagaatgtgaggacgatgacgcagacgacgaacaggcggagtgcctggtgaggaggacgttgctcgctcacaccgactacatctacacccaggggaagcacaactagctagtcactgctcactagcctgtgctggctcatgttcatgtcatgtcgaggaaacaagttcaagggacaaaaaaaaagttcgcatggttcacgagctagcctagccaacctgaagttctacagtgccgtcaactgtgtggattgttttaaaatacatatacctatagtctttttctttctgcagttctgccaggctgtggattattttcatatttacctcgctaattaccccctgtgatttcccatcggcttctcgagatcatgtacaatatactatccatatagatatcatggatagaccttactcttggcctgagaagctaaatggaaattctagaatattaacgtctactcgctctgtaaatactactgaatctatgtgtactggtatatatgcttcctttatnnnanaaaaaaaaaaaaaaaaaaaaaaaaaaaaaaaaaaaaaaaaaaaaaaaagaaaaaaaaaaaaaaaaaaggcccctagggcc

SEQ ID NO: 91860 - DNA, 538 bp, Zea mays
  Clone ID: MRT4577_183771C.1
ggccgcttttttttttttttttttctttttttttttttttttttttttttttttttttttttttttttttttttttttttttttttttttttgctaacagggggccaactaaaattgttcacattacaacacaaaattttgaatccaagcaattgcaattaaaagttaaaaggggcccattaacccggataaaaagggaaaagggtaaattacaagcatgggatcacactttttattttccttgggacaatggaaccccctcacaatccgaaaaaagctgatttttgggaagccgaagcctcacccccatcaggtctgttaaaactgatcgggcgaccctctggctttgaaactgattaaaaaagcctttgcttgaaatcccttgctatggaaaaaaaaacctgctccacattcaggggggtcttcgcactcgtttaaaaaaacttgatgccatactcgtaagaaaaagcctgcccttttgaaggcggaacagggcgtttgctttaatccatggaagctttggtgcctaccaaaattt

SEQ ID NO: 91861 - DNA, 839 bp, Zea mays
  Clone ID: MRT4577_183772C.1
cattgggtacctcgaggccggacgggggccgggatcctcacctaatgccacaacaacagctctactgaacattaccgctcatcatcagggtacacagagagaagagagagagacctacagagatggcctccggcggctccagcaagcagctgaaggctagtcttctcatggtggtagcagctctgctcctcctcatctgcacctgcactaccagggggcaagcggcaaggccggatccaggatccgagggccacacgccacagcagctgcgcgctgctgtatccgtctccgttgctgctggtaatgagaaggagagtggctcatcagtggccgtggtggaaatgcgtcggcagcaagagccggaggcggtgagtgaatgtgaggacgacgacggagacgacgaacaggcggagtgcctgatgaggaggacgttgctcgctcacaccgactacatctacacccaggggaagcacaactagctagtcactgctcactagcctgtgctgctggctcatgctcatgtcatgtcgaggaaacaagttcaagggacaaaaacaaaacaaaaaagctcgcatggttcacgagctagcctagccaacctgaagttctacagtgccgtacgtcaactgtgtggattgttttaaaatatatatacctagtcttttcctttctgcagttctgccaggctgtggattattttcatatttacttcgctaattactccctgtgatttccccatcggctttctcgagatcatgtacaatatagttagtagagaaaaatataaacgcatatattggagattcgaaaaaaaaaacaaagcaggcgcgagctcagct

SEQ ID NO: 91862 - DNA, 978 bp, Zea mays
  Clone ID: MRT4577_183773C.1
attgggtacctcgaggccggccgggccgggatcctcacctaatgccacaacaacagctctactgaacattaccgctcatcatcagggtatacagagagatcgaagagagacctatacagagatggcctccggcggcggctccaagcagctgaaggctagtcttctcatggtggtagcagctctgctcctcctcatctgcacctgcactaccagggggcaagcggcaaggccggatccaggatccgagggccacacgccacagcagctggtaccattcggccggcagtcgttcttgttccactcctcctgtgttcaccaaatattattccttgttggttgcccatgcatcatgtcatgtgcatctcttacaaatctttcgtcgttgtgctacttgcagcgtgctgctgtatccgttgtctccgtcgtcgctggtcatgagaagaagagtggctcatcagtggccgtggtggaaatgcgtcgagaagatccggatcaggcggcgagagaatgtgaggacgatgacgcagacgacgaacaggcggagtgcctggtgaggaggacgttgctcgctcacaccgactacatctacacccaggggaagcacaactagctagtcactgctcactagcctgtgctggctcatgctcatgtcatgtcgaggaaacaagttcaagggacaaaaaaaaaaagctcgcatggttcacgagctagctagccaacctgaagttctacagtgccgtcaactgtgcggattgttttaaaatacatatacctatagtctttttctttctgcagttctgccaggctgtggattattttcatatttacctcgctaattaccccctgtatttcccatcggcttctcgagatcatgtacaatatactatccatagagatatcagggatagaccttactcgtggcctgagaagctaaatggaaattctagaatattaaaaaaaaaaaaaaaaaagcggccc

SEQ ID NO: 91863 - DNA, 324 bp, Zea mays
  Clone ID: MRT4577_183774C.1
ttcgctccgaggactcagtttaaattatcgagagatcaagcatccagagagtgagtcaccgttagagatgcatctgttgcgctgaacatagcgagtatgggaggtgcatgtctatatgttagataatgtctgatgtgggccagatgagacagatgtgcgggagggctggcacctgcaatactgtcatgctggagcgatcatttgaacactgtacgtcatcagcataatgctatggaacgcccggatatacggtctggatgatccgagcttacatactcgtacgtgcaagcttatattgctactaaagcatcatgtaactgccat

SEQ ID NO: 91864 - DNA, 286 bp, Zea mays
  Clone ID: MRT4577_183775C.1
gggggacccaaaaaaacccccaaaagtttggccacattaaaagggcaaaaggtaaacccaaaaaatttatgcgccccggggaacccccagggccggtaaaaaaagggtacggtttggggaccccattttcggggttggggagaaacacccccctgaaaaggcaaagtttgtaaccaaggacccgctttggggggaaaccccccaaaaaaaacccatccccgtaaaataaaaaattcccccgtaaaaacgagccagaactggcccaacccttgggtggccccgggaa

SEQ ID NO: 91865 - DNA, 473 bp, Zea mays
  Clone ID: MRT4577_183776C.1
caggaccaacgatgttttgcaaccgggcatgccacatacaatgggcccaaatgcgggagattccagaaccacacgcggatttgagctgcaaaccaaattggaaccatcattttaccggaaggcacaaacagaaaacttgaagggacccaccagatgccctgggaaaacaactcatatgtggccccaaaggacggtacattaaacgcctgcgagggatacctaggggcccatgtcccagcggggtgacagcaaaagcagcagacactcccaggccatgaagggcaccacccgggacaaaaggcttgatgagagtcggatcactgaggagggaacagaagtctatgggctccggccggaatttagtgccgctacctcataggccctctgagaagcgggagcaagagctccgggcattgttgactctgggatggaaaaactatgcgtaaaacgccaccttggattggatttaaaag

SEQ ID NO: 91866 - DNA, 1610 bp, Zea mays
  unsure (1)..(1610): unsure at all n locations
  Clone ID: MRT4577_183777C.1
cttctttccctctgtataccgcgagcgcccgcagctagctgctagccgcgcgcccgccgctacctgcccgcctccagcgcgcccgccgcgcgtgccccgccgccacccctcgcggtgatctgtgtgggcgacgtccacagctacatcacgaagctggagagcctctggtccaacctctaggccgcactcccttcgacgccttggccaccgcgctagtcatcttcctcggcgactacaacgaccgtggcccgcacacccgcagggtcctcaacttcctcctctcccgacgcgctacccagcgcagcgccatgtcttcctctgcggcaaccacgacctcgccttcgtggccttcgttggggcgctaccgccgccgcccgacggctccccgttcttcgaccacctgcgcagcgccatctctctttcctccctctctcgctgctccctccctcgccgccctgctctgcatccgatggctggaggatttggtgatcccgcccccgctcaaccgcgctcgcttcgcttgtcgccgcggcctgtggcacgtcctcaccaccctcacgccccatctcttctccctctcttgcctctctctcccccgccgctctgctccacatccggtagttggaggaatcagtggtgccgcccctcgccccactcgctgttgtggcttgcaacacgtcctcgtcaccctcaccatggaaaatgcccccgtcactgttgttggctatcatcgctttggtggatgtggacatccgtgtgctgcttcatagactgtccagtggaggaggaggaggagaccgtggtggccggcgaggatgggggcactggcgcccaggtcacactcatcatgaagctagatgacatggccagtccttaccactggagaggacaaggatgtggtccacgacatgatccagagtgctctctgatagctatgattatatgcatatgtacgacttccagggtatgaattcaaaggctattcaatgaatatggtttgcaaccacaggactgtacctattacaagtctgaattcaaagccagctacagtccgcagagagccgcccgtaagttctaggcggccaccccatgtgctgcaatgccgctgctgcccacaagatccagttccaggcgattgccttgctgccgacgatgcctgtcatcttaaaggttgaagcatcgtcttttcgtcgcctaggcctagctcttgtgtattcgcctgcatcaagcactgaaaaganttatctcattttgagatggatactgaatgcttacgccaaagtacctccaaaacctaaagtgccttccacaaaaagtgagtttgaggaactggaggctgttcctacatctgctgctatagacggcccccttgaacctccgccagcgtctgccgctgtagtccttgatacccctgatgaatcattaatcagttacttcagtgtatgctcaactgtcaactaccagctatttcatcccattttactttcattttgattgaatggtatatccccatttatctgcattctgtactcaatgaccattttagcttctcggttgatgtatgcacataagttcgctgcattcatggttggatatatgctgcatcacat

SEQ ID NO: 91867 - DNA, 2005 bp, Zea mays
  Clone ID: MRT4577_183778C.1
aatggggacctccgggccggggtagatgtttggagtttgagagacgtcgagattatcggagacattctatttcactttccacaggcaaacaccgctgtcccttcccctcccagcgctacccaccatctccgctcttccctctccggctcatccccgccgggcttccgcctacctgcacacctcgccccgtttcttcctcgaacagattctctgccccaccccgattctacctataaatcacaactgcacacccccgaatcccggcaaaacccaacggccgaagctaagctcgagccgccgccgcgatgatcctccgtatccgcagccgcgacggcacggaccgcatcacggtcccagactcggcctcagtcaccgtcgccgacctgcagcgcctcatcgagtcgcacctcaccgtgcccgtcccgctccagcgcctctccctcgacccggccctcctgctccctaacccctctgccgctgtcccactcctcaccgactcggcggcgccgcttgcctcgctccgcctcgccaacggcgccttcgtctacctcgcatacccgcccgacgcgcgctcggcccgcccgccgccgcccaaggcactttccgccgctggctctttcggcaaaaagatgaccatggatgaccttatcgcgcgccagatccgcgtcacacgccaggagaacgcgctctgcgccgccgcctcttttgaccgcgatgccgccaacgcgttccagctctacgtcgccgagttcctcggcttcggcgtcaagcgggcgggtttcctctacggccgcgtcgacgcagagaccaaggatgtcttcgtcgactttatctatgagccgccgcagcagggctccgaggacgtggtccacctcttgagggaccccgacgaggaggcccgcgtcgataccatcgccgaggggctcgggatgcgccgggtcggcctcgtgttcacgcaggccgttgggagaaaggccagcgagactggtgagtacaccatgtccaaccgggaggtcgtgcaggcggcccagctgcaggctgagggcgggatcccggagtgggtcaccgccatagtcaaactggaggtgggggatgacggcaccggggatgtgcacttcgaggccttccagatgagtgagatttgtgtcaagctcttcaaggatggggtactggaaactgaggttcaggatgctgatgatccccgtctgtcaaagatgcggaaagaggtggtggctggggggaaggatactatggaggtggataatgacttcttcctcgtgcccgtcaagatctctgatcaccagggtccactctcagtaggctttcctatagagaaccgtggaaatcctgtgagcatcagcgcgttgagaagtcacctggagcggatgaagcatttggcatttgtgaagcggatctcggacttccatttgctcctcaagctcgctactttcctagatgtaaaggcagacatgcctactatagctgcatgtgtgaaaactcagagcagggtgcccgaggggtaccagcttctgatcgagtcctttgctagccagggataatatcgcatctgaaagcatggcatggcgatgcataatttgtttacttgatcacatcatgcatgtgtaacttatggatgtctcttggtgtataagtattgagtgaattccttctttgccatcaaaatatatgtttattccttctcatgtcatgaaataaaagttgccttcaatgccatcggttttaatttttaaaaacccaattaaaaaaaatttgcagcaacaactattaccattcagccagctagctactgtccactttcagcaacaacaacctctttcatttaaccaattggcccgcattgaaccccgctgcttatttgcagcagcaaatactactaccatttagccagctagctgcagcaagccgtgcttccttcttgaccagcaacagttgctgcctttctcccagcagtttgcgggtaaccccgcaaccctcttacaactac

SEQ ID NO: 91868 - DNA, 108 bp, Zea mays
  Clone ID: MRT4577_183779C.1
tttttaaccgtttatttattacgcgacaactgttatgaagataatatacggaagcaaagcagggtgtttataacagttgtagcgtaataaataaacggttatgaacgc

SEQ ID NO: 91869 - DNA, 321 bp, Zea mays
  Clone ID: MRT4577_18377C.1
gacaggggaacaatttatcaatctgatcggcacaaaatagctgtgaacaaaaaccttgctcattcttctctcgactcggcacataacgggagcaaccaatgcgaacaacagggtcccaacacctaatccataggttgcacgggcactaacgttttgacagaagcgaacggacaccccataccgtaagatggtaagcaaactagggcgacgcccggacgggcccccacattagttcctaaagccgacggcgcctcccccatgggagccgaaaccggcccccttacagctaccgccgtaggcgacaccgtcttcgtatccctc

SEQ ID NO: 91870 - DNA, 383 bp, Zea mays
  Clone ID: MRT4577_183780C.1
gacaagttgacattcgcaagaaaaactgactgaagatggaccatataaaactggtgataatgaacttgcataaaagaacactacggcaaccaaacagaaacatgaccagtattcttagaagaataacaaagacacattgtaaacaaataaggaggtcaaagatggcatgaatgaattacaaggatgatgtttcgtacaatcattataccacagccaaactaatagatatcctgattcctcgcataatttcgatgacacattgataagaatcgcggggggacaaaactgtatatgtgactcggactcaactgccaacatattagcactatcctcatgccaaaagacatgagattgtacatggtttaaagtaccaagctcaaatt

SEQ ID NO: 91871 - DNA, 841 bp, Zea mays
  unsure (1)..(841): unsure at all n locations
  Clone ID: MRT4577_183781C.1
gagtcgcagaggaggagagagagagagagggggagggtagcagcagaggaggagagaggagaggagggctgagtccacgtgaagccaagaggcggaggaggaggagcgagagatccccctctccctccctctctccggccatggatcctccctacgcaggagctattattgaacctgctaaatgccgattgatgagtgtggatgaaaagaaggatcttgttcgtgaattatcgaagaggccacaaactgctcctgacaaactacagtcatggagtcggcgtgatattgtagagattctttgtgctgatcttggaagggaaaggaaatatactggattatctaagcagagaatgctggattatctcttcagggtggtgactggcaaatcatctggccctgtggtgcatgtgcaagaaaaggagccaactctcgatcccaacgcaagtaaccatcagtaccctgcgaaacgtcaaaggaagagtgacaatccatcacgactgccgattgctgtcaancaatccgcaaaccgcagttgtacccgtgcaaattaataatgtgcggtcctgccggaatatagcatgcagagcgattcttagcatggaagataaattttgcagacgctgttcatgctgcatatgcttcaagtatgatgacaacaaggaccctacccatatggnnntgtcctgtagttcagatcatcccatgcaaaagggattcttggcgggctatcatgcccatcttgagtgtgctctcaaggatggaagaactggcattctgccgagtgggcagtgcaagaaacttgatggggcttattactgccctaactgtcggaagcagcatg

SEQ ID NO: 91872 - DNA, 457 bp, Zea mays
  unsure (1)..(457): unsure at all n locations
  Clone ID: MRT4577_183782C.1
accggcgaacgcacatcgcatgacgtcccatttcgccatgntgcccgctcctcgcgggggccctggtcctcttcctgctgggcccgcggcaggccggaccggggcgacaccggcaggacgcggcacagaccattcccaagatctgcgggacagcctcgccgccaagccggagagccagaagcgacccgcgcaagctggcggagctgtcgtgaacatcgcggcgaaaggggtcgggatggccaccttcgngcaccgaagtacagcgacaaggaggacagcgacatgtcaggtgctanacagctgtccganacgtggagaggccgtcgcccacctcacggcctcgtccggagcccacganccaagttcctcgagctaagtcgtggctctcctccacgctcggggacctccactgcgagaccctgcaagacctgcccaagccagcgacaggacgacgtcg

SEQ ID NO: 91873 - DNA, 271 bp, Zea mays
  Clone ID: MRT4577_183783C.1
ggaaacagggaaacccatcactttttttattgcatgcatgacaaggccagactgaattggaacaatgcgtttttaggcggggggctggaaagtttgcctccaaaaccttttgggggggaaaaaaacaaaaaattttgggttcgaaaccacacaccagttttttatgggctgcacccacataatgaggcccccgatttttaaggtggggaaagaatttttttgctgggctttttcggggggttaaactgtttaaaccacttgggaaacttct

SEQ ID NO: 91874 - DNA, 1164 bp, Zea mays
  Clone ID: MRT4577_183784C.1
actcctatgggcgattgggtaccccctcgggccggcagtcccgcacactgcccctctctgggcctccctctccctggccgacgcggcggcccccagctccgtcgaaccccggaccggcgcgacattccccaccgaggccgccgttgggcgccgcctactcggcataggcctccggaagaccagcgtcctcgggctcaagtccatcgacgtctacgcattcggcgtgtatgcggatgataacgatttgaaacagcagctgaaggagaagtactcgaagttctcggtctcggaactgaagggaaacggtgagctgatcaacgatgcgctagagcgtgacataccgatgacggtcaggctgcagattgtttatgggaggctgagtattcgctcggttcgcagcgcatttgagaagagtgtgggaagtaggcttcagaagttcggtggacaagacaccaaagagttgcttcagagttttgttgcggttttcaaggatgaatacaaattaccaaaggggtctgtgattgagctttcgagggaatctaaccatgtccttaaaatttgcattgaaggcgaggaagtggggagcattcagagcaagctcttgtgcaagtctctcttagatctctacatcggagatgactcctttgacgaaaatgcgaaagacggcatccatgaaaatatagctagcattcttaaaagttaaatgggatgcttaaggaaggttacatggaactgggagatttttcagggaagatatttttaattccagcaatacctcgactgtgcctagtaagtagcgcacaagttttttttcagtagcgcgtgaggaactgaggaaaaggatagatccttccaagtacagccttttccaagtcgtgtgtgatgttgttccacgtcctccgtgaaagcggcaaactcctggccctcatatctcgttggttctgtcagcgtaagaaagaccagcaagctgttgcaatcgaccttcaggaactgttcctcatccggcaaactcaagacctgtcgatctcattgcagcccggagttggcaggcgtgcacacaatggatgagagcgtgcatcactgtctccctctcgttcccacaaatctcacagctaacagtctctccttataatgttctgatggcgtttattctgttgcgcggct

SEQ ID NO: 91875 - DNA, 342 bp, Zea mays
  Clone ID: MRT4577_183785C.1
tcgagcggccgcccgggcgaggtataaaaaaaaaaaaaaaaaaaaaaaaaaaaaaaaaaaaaaaaaaaaaaaaaatagaaacagaaaccacactaagaggcaaattctgaaagattaccttctcgcggggggcccccttgggggtgcattttggagggctccccttcccccttgggggggggggggggttctcttttcttttggggccccatttttcccctttggggggtgggaaaaaccttgccgtggcccgcctttttacaccttggggctctgcaaaactcttgggggtttgccgttttaagtggggggggccggaaccgacctttttttccgggtggg

SEQ ID NO: 91876 - DNA, 1849 bp, Zea mays
  Clone ID: MRT4577_183786C.1
tgagtttattattattgatactatatggggtaattactttgtcaaagtctcaagcaggtgtaatggaagaacttgccgtcaccactactgttggtatggatgggattcctctcgccactagagaagctgctattgcaaggatgccatcaatgattgaaaaacaagcagttgcagctgttgatgaagcatccgtcatactattcgttgtggatggtcaggctggtcttgtggcagctgatatagagatttctgattggttacgacgcaactactctgacaagtgtattctacttgctgtcaataagtgtgaatctccacggaaagggcaaatgcaagcattagacttttggtcactcgggttttctcctctgccaatttctgctatcactggcacaggaactggagatctccttgacctggtgtgttcagagttgagaaaatttgaggtattggatgccgttgaagaagagaaaaataaggttcctgctattgccattgtgggaagaccaaatgtgggtaaaagtagcattctaaatgctttggttggagaagatagaactattgtcagcccagttagtgggacaacacgtgatgccattgatactgagtttactacagcagatggggagaagtacaaactcattgatactgctgggatccggcgcaggacagcagttatttctgctggcagcacaaccgaatcactttcggtaaagcgtgcatttcgagcaattcggcgctctgatgtggttgcccttgttattgaagcaatggcctgtgtcacagagcaggattataaaattgcagagaggattgaaaaagaaggaaaggcttgtgtcattgttgtgaacaaatgggatacaatcccaaacaagaaccacgagagtacaacacattatgaacaagatgtaagagaaaagcttcgcatacttgattgggcacctattgtctactgttctgcgacaaatggcaccagtgttgaaaagataatttctgctgctgctttggttgagaaggaaaggtctagaagactcagcacctccattcttaatcaagttattagagaagctatagcattcaaatcaccaccaagaacaagaggtggcaaaagaggtcgtgtctattatacaacacaggctgccgtcggtccaccaacattcgttctatttgtaaatgatgcgaagctcttccctgacacgtaccgccgttacatggaaaagaaactccggtcagacgccggttttccaggcacccctattcggttactgtggcgtagcagaaggcggccagacaaacgaggtaaatctgctgacagtagagcgcagagcccaggaacccctagtgaagtggctctagccgcctaactaaaccgcggcctccagaaatgctcgccacagatcagctcgaccactgggaatggaattctatcgaggcggcggcagttgcttgctccaagaacctggatcggctgaggagctagctgttcatggagtagcgctctcatgttcgggccttggagattttgttgcgtctatatactactagtacggatcagacggagaaagcacattgggccaatgaatgaatagtcacacttcaccgacagagctccaagcacgctttttccacagcgctcttggaacatgtaagattgtaccgaaagaatggcgttagaatgaccatgtaaatgtaatcgtagactgagttctcggatgtgtgggtaaacagcatacttaggtgccgtttggttgttttgtttacgaaatgtaacttaattggtaacggtaatatgttaggagtattttattttgaacgagaaaaaggcgtgcggactgccaattacatattc

SEQ ID NO: 91877 - DNA, 285 bp, Zea mays
  Clone ID: MRT4577_183787C.1
ggcggtgatttgactggcgctggaggtgacctcggcgcgaacagtggtggatattccacagatggaggtggtgaagtcatcgataccgcactgggacgggattcatacctagtgtggtggcgagctcaccggagaccggggaggaggagaatggataactgcgggaggcgagctaatagtggctggcgctggtgctggcgcctgggccgctggttgtcgcacaggtcctggtggaggtctgaagcggttgaggaccaactgcgtggggactggggtacttattat

SEQ ID NO: 91878 - DNA, 356 bp, Zea mays
  Clone ID: MRT4577_183788C.1
tgaattcacaacaaccttaaatatatgtactgctaatggtttccttgaacatttttgaccagaaattgttgttctataatttctcatttaagttccttttttactagtataatggtgtcaacatatttcaggctggtcttgtggcagctgatatagagatttctgattggttacgacgcaactactctgacaagtgtattctacttgctgtcaataagtgtgaatctccacggaaagggcaaatgcaagcattagacttttggtcactcgggttttctcctctgccaatttctgctatcactggcacaagaactggagatctccttgacctggtgtgttcaaagttgagaaaattt

SEQ ID NO: 91879 - DNA, 683 bp, Zea mays
  Clone ID: MRT4577_183789C.1
ctcaaacttgttcccactagtaatcaagttacatttcgtaaacaaaacaaccaaacggcacataagtgagatgctgtttacccacacatccgagaactcagtcttacgataacatgtacatggtcattctaacgccattctttcggtacaatctacatgttccaagagcgctgtggaaaaagcgtgcttggagcaactaacagggggggttatgatatgatgttggcagacgtccacgaaacatctgatgtttcgtggacgtctggagctctgtcggtgaagtgtgactattcattcattggcccaatgtgcattctccgtctgatccgtactagtagtatatagacgcaacaaaatctccaaggcccgaacatgagagatactccatgaacagctagctcatcagaacatccccgttcttggagcaagcagccgccgccgcctcgatatagaattccattcccagtggtcgagctgatctgtggcgagcatttctggaggccgcggtttagttaggcggctagaaccacttcgctaggggttcctgggctctgcgctctactgtcagcagatttacctcgtttgtctggccgccttctgctacgccacagtaaccgaataggggtgcctggaaaaccggcgtctgaccggagttcttttccctgtaacggcggtacgtgtca

SEQ ID NO: 91880 - DNA, 342 bp, Zea mays
  Clone ID: MRT4577_18378C.1
ggggagccaccttcgaggtctgtgggtgctgaccagtgatctgagggcctgactgatgacatagtccctttggacaactaccttttctatcccagtactttggacagatcagcatcggcacgccaccacagaacttcacagtgatattcgacactggaagctccaacttgtgggttccctcatccaagtgctgctggtggggtggcgtgctgctcacaccataaatacaggtcaaccaagtcgaagacctacacgaagtatggcgaatcttgtccgtttccctatgggtctgggctgctcggtggcttctttgcttgggcctgggggcgggggggtgtcttt

SEQ ID NO: 91881 - DNA, 141 bp, Zea mays
  Clone ID: MRT4577_183790C.1
gcgtcgtgccctcaccctcccttcttggtctgccaaaacactgcattgccgtgacctttggtctcccagatcggtgacccaaaacactgcagtgcccatctgctttgctttgttttttaccaatacgttcttactagcacc

SEQ ID NO: 91882 - DNA, 294 bp, Zea mays
  Clone ID: MRT4577_183791C.1
cccacgcgtcggacgatcttgccattaccagctcagcttcacatgtgcatcgtcttcgcagcacacacatgtttaatagtttcagggactgggattgctcgattaactcaactcatgctgacgagcatgtatgccccctgtggtactggttccacatgtgtgcaggagtgcttaacccgcttctaggcgatgcctacgagacctgcccgaagtgtcacagtcagcgtcattgattgatagtgagagcatctacagcacgctcgaagcttgatgacggtgattgttactgctcag

SEQ ID NO: 91883 - DNA, 294 bp, Zea mays
  Clone ID: MRT4577_183792C.1
agaaagacccaaagtgatactccctctatttatatttattgggcgggcccaccacgaaacgttatcttgctctagtgcaactgtcttgtatgaaacacgatttaaaaccattagtcattgattcatataaaaatgcactgttgaaatataggcttataataataggcagtaccaagggtaccgcgtccattaggaagggacttccaattgagcgacattttcttcaacacggggcacctagtactggccgttgttcgcaggattgaactctaggacccttttctacaatttaat

SEQ ID NO: 91884 - DNA, 1572 bp, Zea mays
  Clone ID: MRT4577_183793C.1
cgacaaaccccgcaaaaccaccgcaccgctccgcccgcccacgcggccgcaccggtgggcgatgccctccgtagccggtcatttcaccgcgggcgcggcccatgcccgcggcccaccaccgcaccgcctcgcctcctgctccttatatgaccggttccccacctccgcctccgttccccatctccaccaccaccaccaccaccaaaccctagccgcctcccttcgccgccgcagctgatcggccatgtcttcctcgacctccgatgcggccagggacgacgtcgtctcatctcccgacctgccccccctgtccgcgcacgtcgccgcggcggctgctgcggccgcggcagcggcctcctcggggggcggcataggactcgggggcgtgggctccggccggaggctgccgccgccgtgctggacacacgaggagactctcgcgctcatcgaggcgtaccgcgacaggtgggaggcgctgcagaagggcaacctgagcgcggcggactgggacgacgtggccaacgccgtcaccgctcgctgcggtcggttccccaccgccacgcccaagtccggcgtgcagtgccgccacaaggtcgagaagcttcggaagcgataccgcgctgagcggtcgcgctccgcggggcggtccaaggggcccaagtggccgttcttcccgctcctccacgacctcgccggcggcggcgtgccggaccctagccctaacgccatcgtcaagatcaagaccaagggccctgccccgccggcatccccgccttcccctgtgtcctccccttcctcctccgaggaggctgtgcggagcaggagcctgcacgggctcatctccaacggcggggccgggagcgggctgcgcttcaccatccctaaggcctgccgcacgaagcccgccgcggcggcagctgtgaagccggagaggagcggcggcgaggacgacgccgagtcagaggcgatggccgaggtggctgccgcactgcggtccgtcggggaggggttccttcgtatggaggagcgcaggctcgagctgtcgcttcagatggagaaggaacgaatggagtcagagatgaagcgcacccagacgatgctcgacgcccaacagctcttcctcgaggccttcctgggtaagcagcagcagcagcagcccaagaaggccagggtctccccttcctctgccgcaatggaagaggactgatcaatccatgtagcccggttgctctagttctgctctgtcaaccttgtgtgcatccttcctcgctctgcgttgactgctgttcatgctagtattgttaactttgtgtcagtagcaatataatcttactattgtgtatggatggtgatgtaggtgtagggatatggatatggataaggggggaagggcgaggtttgaattagaaattaggtggtctcagttttaatcagtgaacgacttgtgttatgagcttatgatgagctgctgctgttacgttgaaacacttcagcttgttcaaatggcatctactcgttgtcaattttattgttgtggattatatagtggtatacatgaacttgtgatggtgc

SEQ ID NO: 91885 - DNA, 380 bp, Zea mays
  Clone ID: MRT4577_183794C.1
aacaaaggttttttctattttacacagtaatatatcaccagtacaagtatacgacattggccagcaggtattttgcttaagccatgcgggggcacaggctaaactcgcatctcatgggccgaagcaatctcgctgcaacgcaaggaagaatgaatacccaagaggaacgcgtgacacgagcagcaatcttcaagcggttggcctgcaaacaatagcagcatgatgttctgacctagttcatcatctacctgaccaacaggtttgcttttacgaaatcaattgtctgatattatttttagtcacacaacaaataaaagcatgctgcctttactaccttatgtgttgtattggaaaaatcagctccagctcatatgttcgga

SEQ ID NO: 91886 - DNA, 152 bp, Zea mays
  Clone ID: MRT4577_183796C.1
ggcttttcatcagtcgacgtacgaagtcggattcagtcgagggcgcgtgatggagttcagatgcaatcagatcgacattctcacactgagtagcatggcttgtgtatcacttattagctacatgctctgagtctgtagatcgagatgtcatg

SEQ ID NO: 91887 - DNA, 275 bp, Zea mays
  Clone ID: MRT4577_183797C.1
gtgggggggggggggccatgcaagcggaaaactccgtttggacccttttcacattttaaaacttgtggaaaaaaaaattgcatgtaaataactgggttgttgcggatcttaaagatccagtgggatttatgcaattttggcttgaaaatttgcttctgtttggcaattttcatgtaacataatttaattcacccggacaacagactccccttttcttattttgggaaatattaagcatgtaccttcaaaaaaaaaaaaaaaaaaagggccgcccc

SEQ ID NO: 91888 - DNA, 267 bp, Zea mays
  Clone ID: MRT4577_183798C.1
cggctcgagcggctcgaggaaaaattcatgtcactctcatctttagcccgtgtaagaggtcaactccggtacttaaaggtgtgtgataacttcaagtaaacttcttccataaaacttcacattttagtgtacaatttacataatttatttatttttgtttctgaagattgcactatgatactatcaccatatggttcactcatcatttgtttgggttaatatcatcttaatataatacctcagctacaaagttctgttcttgcatgg

SEQ ID NO: 91889 - DNA, 424 bp, Zea mays
  Clone ID: MRT4577_183799C.1
tcaagaatcaccgtttatcccaccgtgcaaggtaggagagagagagagagcagtggccttagacacgtgcgggacgtctgcaaagatggagtgctaggaaggggacgtgcgcctgcgcgccatcaagttctcgcagcggcagcccatcggtacgtggggcgcaggtcgccatgggggggcaccacgactgtctctacattgaggccccctcggcgctggtggtcgagcccgggtcactcaagtcctgcttcttctaccgtgttgtcatcgcacacttccttgtcacgttcctcttcctctccatctccgtcttccccgaatttgctcatagtccatacccgcacttcaagtgtatccagcgacgacatctctgctatcccctggtcttccgaaggaatgatcttcgccctggccttcttcaatc

SEQ ID NO: 91890 - DNA, 170 bp, Zea mays
  Clone ID: MRT4577_18379C.1
ggttggaaaataagttccaacaacctcgttcaccaaataccccaatgacaaatgctgaaactgtcgacgaggcacaaaaacagcgggcagtacaaaaaccatgtcgttgagtttattaatgcttcggacaatagttgtttatggccaacttttgagctttgaaacacaat

SEQ ID NO: 91891 - DNA, 303 bp, Zea mays
  Clone ID: MRT4577_183800C.1
cccttaatttttttccatctcaacaaacttaaaacgaggcccctttaaaaaacatttgggtgtttcaaccccaaaccactgcaacacccacaagaccagaaaaacccacccaaaggcaccaactgggcacaaacaaaaaacaacgaccactaaaagacaccccgcagaccgccaccaaaggcaaaactggaggacccgctccagaaaccgaagacccaggggaacacccacctgatgaatagcaactggcacagagacagcgagacaccaaccctcacccccacccacaaggagcgcgaggtc

SEQ ID NO: 91892 - DNA, 983 bp, Zea mays
  Clone ID: MRT4577_183801C.1
atgtcgggtagctattttttgggaaaaactttggatattatttctgaaaacccaaacttttcgaaatccgaaatacccacccctcctccatataatcatgatgccatctcagaggacgcacgtcctggacatcaggaggcctgctctcatcttcccaagatctctagcaaggaaacacatccaaagatagcacaagttcttctggaacgacaaaaatatgatatggcacttcttgtgctaaagtgcacagggcatggaagcttctctgctacagaaaactttaaaaaagatgacatttcatctcttagtgaggcagtgactgtggttcgtgtcagaattgaatgtcgcctcctaacagaagcgtttatgtatcataggagctactgctctaaggtgaaagagcaacactcagcagatatgacacatgctgaggatgcattaaaaaactcttgggtttatcatgttgagatgatggtgaccgaattttgtgctatctgcattaaaaggaatttagttgataaaatgattgatctgccctgggattctgaggaggagaaacatcttcacaagtccctctttgactctgctcatgaaatgcccatgaaaccaaatggtagtctgcttgttgtctactaccttcgggacagaaaaatgatgcttacaatttcttagttcatcttaaatggaactggtgtagcccaaaatggccctgctaaaaggtctgtctctggatatgctggctaccagccaaggagaacatcttgattctgcatgctggtttgtggtgatatgtttcgtcgtggtcctggttttggtttgggagttcaaaatgtaatatcagtggaatgaaattcgtgcgtattgagtagctcggggtatagaattcgaatctgagtacctttcaaatactagagttagatgactgcagtggctggttttcctttccagcttcttcttctttattattttgtctattctttcta

SEQ ID NO: 91893 - DNA, 279 bp, Zea mays
  Clone ID: MRT4577_183802C.1
ccgccctttctctttttcttaacaacaataaaatttttgcacacacatatacccattaaacaggaaaagttaaaaaacatgcgaagggttaaacctcaacctttcacccataacattatttatttactccacacttacaaatatacactaccatacttacaaaacacttacctaccctatgatctgactgactcaacgcatatgattttagcgttagaggaatggcccagatcctctaccacgcaactagcttaacttacctcatcatcatcccctcca

SEQ ID NO: 91894 - DNA, 265 bp, Zea mays
  Clone ID: MRT4577_183803C.1
ggagcagctcttcacccttggtgattgggccaaacgcatcccccacttctcaggcctcaccttggaggagcaggtcattctgctccgggcagtgtggaatgaattgctgattgcactcttctcccaccgctcggtttctgtccaggatggcatcctgctggccacaggcctccacgtccacaggagtagcgctcacagcgcgggcgtcggctccatctttgacagagtcctcacagagctggtgtccaagatcaaggacatgcgg

SEQ ID NO: 91895 - DNA, 352 bp, Zea mays
  Clone ID: MRT4577_183804C.1
agctcttaaacggctttgcagatatcaacacaacaaccacggggggggggggagctattgcagtgtttttggaaccacccaaacaatgtccaacaatgcatttatagtgctacaatatgaacaaactagatgcatgtgcaacaaacacgctaacaatacatacaaagacaaacactccggacaccataaggcgccccggagcacaccccttgttactagtaagaccaacgaagcagatgctgaaggtgaactaataaaactccagaccgttttgggccgtgagtaagaacaacaaacatgaccgaaagatgaaccagagcatcaatcagcagcaggatacctctacactgat

SEQ ID NO: 91896 - DNA, 329 bp, Zea mays
  unsure (1)..(329): unsure at all n locations
  Clone ID: MRT4577_183805C.1
acgcctgcaggtaccgtccgnattcccggtcgacccacgcgtccgcccacgcttccgtacttggtaggtactttctagtactaattgcattataaagtcgagcctacagctccaggcttttagttagttgttcctactattnattggactgtcttagcctttccagtttgccgcttgtttagggctgggttttcctgcctgtaggtttattctgttgggggtgggcgtagccttattgtgtgccttttatttctctgttttgggggctgtgtgtctccgtgtgttctacgatcccggctcggctgtccgtgacaggactcgttctctct

SEQ ID NO: 91897 - DNA, 384 bp, Zea mays
  Clone ID: MRT4577_183806C.1
gggaaacccaaaatgggatttggttttttgcaaaagggaaaaaaaacccccttggggggttttttaaaaaataccccgttgaaaacaattttttcacaaaaaaataaaagtccccgttggatttttaaatcaccattttccaaaagcgcttggccctgagctttttaagctgattaaaaacaaacatttttaccacacaattttaaaaaaaggggtaaattcgtattatcacaaaaactgcaggaaaccctcacaaatttttgttggagcgtacccgttcccaaaccatgcaataacattgggggggttttttgggggccaacttattctacttgttaaggaatgatttgaaagtctttaaccaccggaagaattccatttttt

SEQ ID NO: 91898 - DNA, 802 bp, Zea mays
  Clone ID: MRT4577_183807C.1
tgcagtgccacaagcgcaaccacccgtcggcgcggctgatgacagcgctccgcgagctcgacctggacgtgtaccacgccagcgtgtccgtcgtcaaggacctcatgatccagcaggtcgccgtcaagatggccagccgcgtgtacacgcaggaccagctcagcgccgcgctctacagccgcctcgcggagcccgggtctgccatgggcaggtaatcaaggaggagagctgctcagctcgcctgtggctgccggattaggggacgacactgatactactgctactcaccaccggactgtcctgtcgtcgtggtcaccacggttacaacacgataggcagaaagattcaggagggagggagacgacgacgatgccggtgctgtataaactttagaaggatggatggatggatgatgataccgagcttctgctgctgttcatcatcatcttcttgtgtttttgctagtagcgtgttaattagcaggattaagcaaccaacaagtgtccaaccgttgttgttaattaagtacatgttgtgagcgaccaaccgatgttagcgttgggttggatccaaacctgtgtatagtatatggatcagccgtcgtcctatccggtggacgatgccctgatcctgatgtatgtatttttacagcaggatttcgctttgcaatggagtcaggctttttgatcaaagaaaaaaaaaaaaacccaggggtcggtgtcgttgtatctaaagactggtcgatggctcttcaattggatgtcgttcctgttttgatgaaaaaaaaaaaaaaagagaacgc

SEQ ID NO: 91899 - DNA, 1164 bp, Zea mays
  Clone ID: MRT4577_183808C.1
aaagcttggtgttagcccgcgaacgggcgcgaggagggggggatccacgtggaggcggggcggcatccgcgggagaagctgaaccagcgcttctacgcgctgcgcgccgtggtgcccaacgtgtcgaagatggacaaggcgtcgctgctctggagacgccatctcctacatcaacgagctccggggcaagctgacgtctcagcagcccgccgtcggaggcgaccacgtggagacggacccgtccatgctatggctcgccgacgcgccggtcatggacatcaaggattccttgtcgcactccgcggggctcggcgggcacgacggcgggccgcgctgccacgcggtggagatcgacgccaagatcctggggctggaggccatgatccgcgtgcagtgccacaagcgcaaccacccgtcggcgcggctgatgacagcgctccgcgagctcgacctggacgtgtaccacgccagcgtgtccgtcgtcaaggacctcatgatccagcaggtcgccgtcaagatggccagccgcgtgtacacgcaggaccagctcagcgccgcgctctacagccgcctcgcggagcccgggtctgccatgggcaggtaatcaaggaggagagctgctcagctcgcctgtggctgccggaataggggacgacactgatactactgctactcaccaccggactgtcctgtcgtcgtggtcaccacggttacaacacgataggcagaaagattcaggagggaggacgacgacgatgccgatgctgtataaactttagaaggatggatggatggatggatgatgataccgagcttctgctcctgttcatcatcatcttctcgtgtttttgctagtagcgtgttaattagcaggattaagcaaccaacaagcgtccaaccgttgttgttaattaagtacatgttgttgtgagctgtgatgatgatggatccaccgatgttagggttcgattggatcgaaaactgtgtatagtatatggatcggccgtcgtcctatccggtggaggtggacgatgccctgatcctgatgtatgtatttttacagcaggatttcgctttgcaatggagtcagcctttttgatccaaaaccaaaaaaaaaaaaaaaaaaaaaaaaaaaaagggggccgctcgcgatctagaactagc

SEQ ID NO: 91900 - DNA, 1598 bp, Zea mays
  unsure (1)..(1598): unsure at all n locations
  Clone ID: MRT4577_183809C.1
cggccccagcacaaatatgaaacctaccactgtgaatgaccttatgacatgaaggtaccagttatcacctgtgaactggtagcacatatcaggagtctctgactgagaattgtattggtacgcaggaagctctttaaaggcaccatacttggtttctaatggttctatttgagtaggctgaggagaccgaggagattttggggctaactgggcagtttattaacttgcttgttctagtctcgagnnnnnnnnnatattcagagagtgtttctaggattgtacccnnnnnnnnnnnnnnnnnnnnnnnnnnnatgcacattgtttgctctattttaagataaccatgctggtattcctttgtgcaaggtggagcctttcttggatgtcaccaacatttattactatctcaagggccatgataggcagaagaagcttccaaaggagaccaagagtttggcaactatttgtgaggagctgcttggtatccttttgtccaaggaactccagtgtagtgattggtcatgccgccccttaagtgaagggcaaatacaatatgctgcgtcggatgcctactacttgctagacatatttgatttgttccaaaagaggatcacaatggaaggaaaatgttcatctacaacagaacttacttcagacaggcattgctcatcagtggtgatagaatgctcttcttctggatatggcatttgctcgggtagttgtttgatgtccatagtaaccaagtacagtgagaagataatattgacagaatctgatgcaaaaccgcgtacctccagacgaaaagnnnnnctgaagattcctgccaatgccaaacgcaaagataatgtggattgcagtagtgaatggcagggtnnnnntccatgggatccttccattggtggggannnnnnnnnnnnnnnnnnnnnnnnnnnnnnnnnnnnnnnnnnnnnnnnnnnnnnncgatgtgttggaatagatgctgcaattccatcttcaaagaaacctgaaccaagggatctattaaatcaaacatacaaggaaggaagaatattattaacacgggatgccaagctcttgaaatatcaatatttagctggtaaccaggtcattaatatcttccaattaaagatttctgaggaccaacttatgtcgaggtgcacaaaatgcaatggtagctttattcagaaaccacttaccctagaggaagctgttgaagcctcaaaaggtttccagattattcccacgtgcttgttcaaccgaaatctggagttctggaagtgcaccgattgcaaccaactctactgggaggggactcagtaccacaatgcagtccaaaggttcttgtcagtgtgcaacattagtgactaagcagcacgtacggccttggtactcatttgtaaaattgtaaggtactgagataccatcacctccgaaagatcgaaaataatctgatctttggcatccactcgtgcacgatgaggcatgccatccannnnnagtggtttgctgttcgtcactgagatgctgttgtaaggaaaatagaccttgacttatttgattaatggactttgctccatgcacatccaagaggaaaggtt

SEQ ID NO: 91901 - DNA, 428 bp, Zea mays
  Clone ID: MRT4577_18380C.1
cacgtacacactaatggctaattcggatcaccgttaatccatgtgtattggctggtactgcggccacatagatcctgcgatcatccatatcaagctaaaactcattgtaatttatttcactacactggactcctcatgtctgtagaatgactgctcaaggtcttcagtgcgtcatactattgcaaacactcagttgatcattgtctaaggcatactacattatacttgtacactactcagcctatacgtccatatcgcttatgatgatcgccagctactcatgacataatacttttgattatctatactactacataccctattaagagattaagacagctagctgtcgatacatgtacgtgatatctcaatattactagggctcctaaagagtatcaccatatacatgctgtaatcggattaaacta

SEQ ID NO: 91902 - DNA, 924 bp, Zea mays
  unsure (1)..(924): unsure at all n locations
  Clone ID: MRT4577_183810C.1
aattcggcacgaggctccgcccaccgtttcctcgggtctgccacgctacgccacgcccatgaacctgtggacggacgacaacgcctccatgatggaggccttcatggcctccgccgacctccccgcctacccctggggggcgccggccgggggcggcaacccgccgccgccgcagatgccgccggcgatggcgatggcgccggggttcaaccaggacacgctgcagcagcggctgcaggccatgatcgaggggtccagggagacctggacctacgccatcttctggcagtcctccctggacgccgccaccggcgcgtcgctgctaggctggggcgacggctactacaagggctgcgacgacgacaagcgcaggcaccgcccgccgctcacgcccgccgtgcatgccgagcaggagcaccgcaagcgcgtgctccgcgagctcaactccctcatctccggcggcgcctgcgncgcgcccgcgcccgcgcccgacgaggccgtcgaggaggaggtcaccgacaccgagtgcttcttgcccgagtccatggagatgtcctgctcccacgcgtccggcaacgcccagaggaacccgtcgccggcgcctcccgccagcctcaccaccgctcccggcagcctattctcgcagtcgcagcacacggcgaccgccgcggcgaacgacgcgaagaacaacaacaacaacaacaagcgttcgatggaagccacctccctggcgagcaacaccaaccaccacccggcggcggcggcgaacgagggcatgctgtccttctcgtcggcgccgaccgcgcggccgtcggcaggcacgggcgcgccggccaagtcggagtccgaccactcggacctggacgcgtccgtgcgcgaggtggagagcagccgcgtcgtggcgccgccgccggaggcggagaa

SEQ ID NO: 91903 - DNA, 427 bp, Zea mays
  unsure (1)..(427): unsure at all n locations
  Clone ID: MRT4577_183811C.1
ggtaccagttatcacctgtgaactggtagcacatatcaggagtctctgactgagaattgtattggtacgcaggaagctctttaaaggcaccatacttggtttctaatggttctatttgagtaggctgaggagaccgaggagattttggggctaactgggcagtttattaacttgcttgttctaggtcattaatatcttccaattaaagatttctgaggaccaacttatggcgaggggcacaaaatgcaatggtagctttattcagaaaccacttaccctanaggaagctgntgaagcctcaaaaggtttccagattattcccacgtgcttggtcaaccgaaatctggaggtctggaagtgcaccgattgcaatcaactctactgggaggggactcagtaccacaatgcagtccaaagggtcttggca

SEQ ID NO: 91904 - DNA, 2771 bp, Zea mays
  Clone ID: MRT4577_183812C.1
aattcggcacgaggttcgggtttgcgccataatcccacggaatccgcattctgaaccatttccttcgctttccccttcgccctctctctctcccagtctccacccaccatttctcctctttcccggggggcggctgcaccttgccctcccccatgaacctgtggacggacgacaacgcctccatgatggaggccttcatggcttctgccgacctccccaccttcccctggggagcgccggccgggggcggcaactcgtcggccgccgcggcgtcgccgccgccgccgagatgccagcggcgatggctcccgggttcaaccaggacacgctgcagcagaggctacaagccatgatagaggggtcgagggagacctggacctacgccatcttctggcagtcctcccttgactccgccaccggcgcctcgctgctcggctggggggacggctactacaagggctgcgacgaagacaagcgcaagcagaagccgctcacgccctccgcccaggccgagcaggagcaccgcaagcgcgtgctccgcgagctcaactccctcatctccggcgcggcggcggctcccgacgaggccgtcgaggaggaggtcaccgataccgagtggttcttcctcgtctccatgacgcagtcgtttctcaacggttcgggcctccccgggcaggcgctcttcgccgggcagcccacatggatcgcctctggcctctcctccgcgccgtgcgagcgcgcgcgtcaggcctacaacttcggcctccgcaccatggtatgcttccccgtcggcaccggggtgctcgagctcggctccaccgacgtcgtgttcaagaccgccgagagcatggctaagatccgctcgctctttgggggcggagcagggggtggctcgtggccgcccgtgcagcctcaggcgccgtcgtcgcagcagcccgccgccggagccgaccacgcggagacggacccgtccatgctatggctcgccgacgcgccggtcatggacatcaaggattccttgtcgcacccgtcggccgagatctccgtctccaagcctccgccgcatccgccgcagatccattttgagaacgggagcacgagcacgctcacggagaaccccagcccctccgtgcacgcgccgccacccccgccggcgccggctgctccacagcagcggcagcaccagcaccagaatcaggcgcaccagggcccgttccgccgggagctcaatttctcggacttcgcgtccactccttccttggcggcgaccccgccgttcttcaagcccgagtccggcgagatcctcagcttcggcgccgacagcaacgcccggaggaacccgtcgccggtacctcccgccgccaccgccagcctcaccaccgctcccgggagcctcttctcgcagcacacggcgaccatgacggccgccgcggcgaacgacgcgaagaacaacaacaagcgctcaatggaggccacctcccgggcgagcaacaccaaccaccacccggcggcgacggcgaacgagggcatgctgtccttctcgtcggcgccgactacgcggccgtcgacgggcacgggcgcgccggccaagtcggagtccgaccactcggacctggacgcgtctgtgcgcgaggtggagagcagccgcgtggtggcgccgccaccggaggcggagaagcggccgcgaaagcgcgggcggaagcccgcgaacgggcgcgaggagccgctgaaccacgtggaggcggagcggcagcggcgggagaagctgaaccagcgcttctacgcgctgcgcgccgtggtgcccaacgtgtcgaagatggacaaggcgtcgctgctcggcgacgccatctcctacatcaacgagctccggggcaagctgacgtcgcagcagcccgccgccggaggcgaccacgtggagacggacccgtccatgctatggctcgccgacgcgccggtcatggacatcaaggattccttgtcgcacccgtcggccgagatctccgtctccaagcctccgccgcatccgccgcagatccattttgacggcgggagcgggatcatggggctggaggccctgatccgcgtgcagtgccacaagcgcaaccacccgtcggcgcggctgatgacggcgctccgcgagctcgacctggacgtgtaccacgccagcgtctccgtcgtcaaggacctcatgatccagcaggtcgccgtcaagatggccagccgcatgtactcgcaggaccagctcagcgccgcgctctacagccgccttgcggagcccgggtctgtcatgggcaggtaatcaggcaggagagctcatcagctcacctgtgcctgccggatagggacgataccgatacactgctacccaccacggggactgtcatcgcggtcaccatggttacaaaacacacacacgcacgataggccttagagattcaggaggtggaggacggcggcgacgatgatgatgctggtgttgttgaaaactctagaaggatggatggatgatgacacctagcttccgggctgctgttcatcatcctcttgtgtttttgctagtagcctggtaattagcaggattaagcagccgtcaagcgtcacccccgttgttgttaattaagtacctgttgttgtgagctgtgacgacgaaggatcgaccgatgttttagcgttggttgaatccaaagctgtatataggatgtatgtattattacagcaggaattcgcttgcaactgaaaaaaaaaaaaaaaaaaaaaaaactcgagagggg

SEQ ID NO: 91905 - DNA, 401 bp, Zea mays
  Clone ID: MRT4577_183813C.1
cccacgcgtccggatttgcttaattattatccttgcccttttattttaataggaactccagtgtagtgattggtcatgccgccccttaagtgaagggcaaatacaatatgctgcgtcggatgcctactacttgctagacatatttgatttgttccaaaaaaggatcacaatggaaggaaaatgttcatctacaacagaacttacttcagacaggcattgctcatcagtggtgatagaatgctcttcttctggatatggcatttgctcgggtagttgtttgatgtccatagtaaccaagtacagtgagaagataatattgacagaatctgatgcaaaaccgcgtacctccagacgaaaagaaaaactgaagattcctgccaatgccaaacgcaaagataatg

SEQ ID NO: 91906 - DNA, 472 bp, Zea mays
  Clone ID: MRT4577_183814C.1
cgcctgcgggtaccgggccgctattacacggccgacctagtcgttcgctcctcggcagtaaacacgtcattgcctgccgatgacttaatgggtctcactgccgtgtgggctatcgatacgacatccagcgcgcctaccgcctacgacatgcctgactaacgcatcgtaagactgtgcatgtagagaggaggagggccaccggagatggtgctaaggatacaacaaccggtaccagaaaaagtgatcaaacgctgtaccctgataccactcccactctagggctaggacttgctggctctgtatagaagccggacactgaaactccataacgtgctgccttgctgattagcgcgaaaacacacatacagttttcacacattgcggcatccacctcatgggtgctacgatgcagagataaaagggttgtgtaagtagcgtggagatgttaataggctaacgagcgttaataacc

SEQ ID NO: 91907 - DNA, 567 bp, Zea mays
  Clone ID: MRT4577_183815C.1
ggtgtaccacaccgccttcaccaccgggctaagcccggtcctcaaggctcaactacactagcaatgcatttgaaagcattggtgttgatttgcttaattattatccttgcccttttattttaataggaactccagtgtagtgattggtcatgccgccccttaagtgaagggcaaatacaatatgctgcggcggatgcctactacttgctagacatatttgatttgttccaaaaaaggatcacaatggaaggtaattcttaaacttacttcagacagacattgctcatcagtggtgatagaatgctcttcttctggatatggcatttgctcgggtagttgtttgatgtccatagtaaccaagtacagtgagaagataatattgacagaatctgatgcaaaaccgcgtacctcaagacgaaaagaaaaactgaagattcctgccaatgccaaacacaaagataaagtggattgcagtagtgaatggcagggtccccctccatgggatccttccattggtggggatgggtacccgaagttcttgtgtgatgtgatgggatctattaaatc

SEQ ID NO: 91908 - DNA, 1879 bp, Zea mays
  Clone ID: MRT4577_183816C.1
cattgggtacctcgaggccggccgggatacgccgttcctacgaatacaccgtacgccgccgcttccacagttccacgtaaaaacgcgcaggccaggccccgcggctccatcgtgctcccatttcgcttcctttcccctaccgcatcgatggaccacgcgccagcgccccctttcgccgtgcacctcgtcaccggcggcggatcctcgtcggggatcgccctcctactgcgctccctcgccgccgcccgtgtcgtcgctcttgacgcagagtggaagccgcgccgccgcggtagccctgccgctgccgaccctgcggccctgggcgacgacacgacgccggcgtccgagacatctccagcgccgccgaagttcccgacggtgacgctgctccaggtggcctgccgcttcagcgatggtggtggaggtgagggcgagcgcagcgaggtgtttgtcgtcgacctgctttccgtgccgctcgccgacctgtgggcaccgctgcgagagctattcgagcggcctgagacgctcaagctggggttcaggtttaagcaggacctggtgtacctctcctccaccttctccgccgccctcgggtgcgattccggattcgatagggtggagcctttcttggatgtcaccaacatttattactatctcaagggccatgataggcagaagaagcttccaaaggagaccaagagtttggcaactatttgtgaggagctgcttggtatccttttgtccaaggaactccagtgtagtgattggtcatgccgccccttaagtgaagggcaaatacaatatgctgcgtcggatgcctactacttgctagacatatttgatttgttccaaaaaaggatcacaatggaaggaaaatgttcatctacaacagaacttacttcagacagacattgctcatcagtggtgatagaatgctcttcttctggatatggcatttgctcgggtagttgtttgatgtccatagtaaccaagtacagtgagaagataatattgacagaatctgatgcaaaaccgcgtacctccagacgaaaagaaaaactgaagattcctgccaatgccaaacgcaaagataatgtggattgcagtagtgaatggcagggtccccctccatgggatccttccattggtggggatgggtacccaaagttcttgtgtgatgtgatgattgagggcctagctaagcacttgcgatgtgttggaatagatgctgcaattccatcttcaaagaaacctgaaccaagggatctattaaatcaaacatacaaggaaggaagaatattattaacacgggatgccaagctcttgaaatatcaatatttagctggtaaccaggtatacagagtgaaaagcctgctcaaacatgatcaactagctgaggtcattaatatcttccaattaaagatttctgaggaccaacttatgtcgaggtgcacaaaatgcaatggtagctttattcagaaaccacttaccctagaggaagctgttgaagcctcaaaaggtttccagattattcccacgtgcttgttcaaccgaaatctggagttctggaagtgcaccgattgcaaccaactctactgggaggggactcagtaccacaatgcagtccaaaggttcttgtcagtgtgcaacattagtgactaagcagcacgtacggccttggtactcatttgtaaaattgtaaggtactgagataccatcacctccgaaagatcgaaaataatctgatctttggcatccactcgtgcacgatgaggcatgccatccatttttagtggtttgctgttcgtcactgagatgctgttgtaaggaaaatagaccttgacttatttgattaatggactttgctccatgcacatcc

SEQ ID NO: 91909 - DNA, 592 bp, Zea mays
  Clone ID: MRT4577_183817C.1
aattcggcacgagggctccgtctcatgagagccgtcgctgctgccgcctcgcccccgctccgcgccctcctcctcctctcccgccacccacgccgcgcaggcttcaccaactggccgtcgctgcctaggggccagaacgcaggacccacagccccgccggccgccaccgcccccaagcctgctgcgccgtccaggaggcaaggccgcggcctcactgccagcctgcctcgccaagtcgcccggatctcgacgccccacctgcggccgccggcgaccccgccaaggtgccctgacagacgccatcagagccacggagttcgtgcgctggctggttgtccgcggaagacggtccgccacctccctgctccaacctcgcacctccggttcaccatgaacccttcgtcctcctcctcctcctctggcgggtaccactccagggccgctgccttcgcttccccgcagccacgcggcggtggcggcagacggcgtggtggcggccgcgtccaagacgggagcgaccgcatcgacgcccttggccgcctgctgacgagggtgttgcgccacatggcggcggagctgcgcctagatatga

SEQ ID NO: 91910 - DNA, 199 bp, Zea mays
  Clone ID: MRT4577_183818C.1
gcgatcaagcgagatcaagcgagtgctaccactagcgggagcacattctatgcagcctgccagccagatcgccagggcacccaccgggatgatgggctctcccgtgaccgcacgagtcccactggacgggcataagcacgtcgccagccatgaaggcgaccggcgcactaccgggagcctacataacgaaaggcacgga

SEQ ID NO: 91911 - DNA, 282 bp, Zea mays
  Clone ID: MRT4577_183819C.1
aaaaaaacccgccccctttttagggttattcattctcagggacccccaaaacaggcgggcccttcccccccaggggtcgttcccgaccagggcccttcagtcccggggggaaaaaaaaccgaaacattaaatccctcccaggggtgcaacaacaggggccccctgaactagagcggttcagggcccaacattccccccaggggggtaacggccatcggttttctagttcggaatttattcgtccagggatcatgcaactggggggtgttttttttatttccg

SEQ ID NO: 91912 - DNA, 183 bp, Zea mays
  Clone ID: MRT4577_18381C.1
cattcgtgggggatccaaacaagtgggggtctccaactcattatatttgaatttttgcccactccaccttataatatagaatgggtggggccgattcatatccagaattgcggcataggtggtagaacaaaaaaggggggctgctggccattccataccaagagcttattttccactaaattt

SEQ ID NO: 91913 - DNA, 577 bp, Zea mays
  Clone ID: MRT4577_183820C.1
tcaaatttaggccactagtttatcaacaattttgggttttctttcaagcgtgggtcgtgaaaaaggaagtacaaacaataatttatttcttcacatgcactgctttagcacctcaaacctgacatgttgctgcacaatacaaagaagcctctttgtttgtgccacagacagatcacgggccacccaacagttgatatttgattccggctaaaaacttctacacgactgaacttttgccacttcaccattttgatcattaaatcatcccctcgaactcgaagatccataaacgctatttgatttgatttgacactcggcccacctggtgccacttgcaccagacatatccttctattacggtggccgtggcctcaactgaaacggcaggaaagaccatcgatgttggaagtcaccactcttttgactagagtgaacacatccaccaccttgattcttattgataagatatgcgacttttttcacactaccaccatattccattacttcaattagagtataactagcacttttagctgttttcaagttatctaacaacaaaaattgttctacaacaact

SEQ ID NO: 91914 - DNA, 337 bp, Zea mays
  Clone ID: MRT4577_183821C.1
ctcccgcccgttcgtttcactcatggagccggtgccgtcggcaacgggcgccggcgtggggtcccccgtccctggtcccgagtaccccgagtccaacaagtactttccccccatcctgcttgctgatgcgaccaaccagaccttttcttcatctgaacatgcgcatggatcctgcacgggccttctcggcccgatgtgctggttccataacctgctgcggccagggctgctcactagagtcctttttttaacgctcggggagaccgtggtcggaacaagggagcgcccctgtgtactggtgccggagacagccttctcattgacgccgttacccacg

SEQ ID NO: 91915 - DNA, 371 bp, Zea mays
  Clone ID: MRT4577_183822C.1
atcgatatataaaagtgattttgcaatgagtgaatatttgagtaaaaaatgtactaaacaaaggttgcggcacaaatggggtgagcactgatcaatcaaaggtagtagtttctagctatagtacatcaccaataatatagaggagaactagagtacatctttttgtcaacagaaaatcgaactgcagtacagagtgcaatcctgcagcaaaaaggaaccaggtactcaagattttgggcagccctagccataactagttgctgcgcgccatctggaccattgcacctgcggcgctggcgaagcaaccagcgacggcgcaactagtcgtcaccttcggcggcgccgtcttccgcaccgcaggcagagcagca

SEQ ID NO: 91916 - DNA, 105 bp, Zea mays
  Clone ID: MRT4577_183823C.1
agccgagcaacgcgtcatgaataagagttaacatcgctcccatttcacattttgagatcaggaacatccaagttgcgctattattcttagaattgggcattttcc

SEQ ID NO: 91917 - DNA, 2096 bp, Zea mays
  Clone ID: MRT4577_183824C.1
gcagaacgctcaacggctgtgctgccaaaagtccggaccacagctcgcgccgcccgccgcgccttgcccagacgtgcgctcccttctcccgcgccgtcgcctctgccctggccgacccgctgggcccagtgtgcgcagccctcccgggttaaggcggaggtgcttggggacccgctcccatggcgagcgccggcatcagcggcagcggggacgacgatgcaggagggaagctcttggcggatcgctaccagaagggcgaggtcctcggcgagggcacgtacggagtcgtcttcaaggccatcgacaccaagactggaaatacagtcgcggtaaagagaatctgggtagggaaggacaagaaggaaggtgttaacttcaccgcattgagggaaattaaactacttaaggagctgaaaggtcctaatattatagagctgattgattgtttcccttacaaggaaaatttgcaccttgtatttgagtttatggaaactgatctggaagctctcataaaagataagaacataatactgtctccagctgacacaaaatcatatctccagatgctgttaaaaggtctatcgttctgtcataagaaatgggtgatacacagggatatgaagccaaataatttactcattggtgccgatgggcagctcaagcttgctgactttggtctggcccggatgtttgggagtccaggaaggaacttcactcaccaggcacatgaatttttactgtttttacacgtaggtctttgcacgttggtaccgggcaccagaattattatttggttcgaagcactatggatctggggtggatatttgggccgctggatgtatttttgctgaactgcttactcgcagagcctttctccagggttctagtgacattgatcaacttgggaagattttcgcagcacttgggaccccaaaatcttctcaatggcctgacatggtgtatcttcctgattatgttgaataccaatatgttgctgcaccaccgctacgtacattgcttccgatggccagcgatgatgctttggatcttttgtcaagaatgcttacgtatgatccgaaagcaagaatcagtgctcagcaggctctagagcacaggtacttttcatcgttacctgctccaacaagaccatcacagcttctaaggtcacggcggaaaggagatcaagggaataacaagatgcccgatctgaacctgcagcatggccctgtggtgctctctccgccaagaaagttccgtagggtgacagcgcatgaatggatggaaggtatgcacagggcagataaggtggacgagcatccttctgggatgaggcacaccgatgacatgcccagtcagaagagttctagaattccaatgtcagttgatgttggagctgtgtttggcacacgacctgcacctaggccaacattgaacagcgcggacaagtctcgtttaaaacggaaacttgatatggacccagagtttggatttgcggagtaaaagaaactttgtttacatgcaccattcttttcttactgagatgttggtttttaaaatattctttgggagatatttccacagttcactcagagaagaggattgcattgaagccacaaaactgcaccgaaggattctgacacgatcaactgggctgttaccgtcatcggctcacgaagaggaaaactaaggagaggtcattctgatttatcctgagtcgcatggggtattatagctaaccgattccgtaaagaaggctcttagaaacagcatgctctatgccatgcgagtggagagtgttatgtggaattgggggcatagaaacgctcgctccagttagaaatgtgtgtttgtgctaaatgtgatctactagtcctccattctccgtggtttcaatttccttcaattcttgtacggacacttagctttgagcattcttcactcagccactctacgtatagtgatttttattgtaactaagagcagtgattttattgtaactaagggcagtgattttattgtaactaagagcaattgttgtgttctcgaaccaacattcaaaactgaataacacgatatcagcgcaatgtggacgatat

SEQ ID NO: 91918 - DNA, 332 bp, Zea mays
  Clone ID: MRT4577_183826C.1
gttcgaataggaaattggttacgggcactaaatcagtgtaaccaaaggggctcagtttttttacgggacaacccccaaggggggggggcgggaaaaagtggtttacacagacaacggcccaacaggacaggccaggaaaaaggggtttaaacaaaaacccggaagggggggggccttcccacccttgggaccttgttaggcgtccaacatgaaaggattctcccttacccgggctagaccacctcccttggtcaaaaaaaaaactcttcctttttcccctgcagacccaaaaattttcttggaagtggacgacaggggttcgggtttggcaa

SEQ ID NO: 91919 - DNA, 302 bp, Zea mays
  Clone ID: MRT4577_183827C.1
attcggctcgaggcgctaaaaaccctttttctggaccatgtgcgcaggtgaacacaggaggggttgttgcagatgcgaagctctccaaaggccgccaaggtaaggactccactttcgataccaatggctctgaccctgactgtaccaagactaaccgagaggcgcacgtctggtgctctccggccacccgtggcattctatgacgcccaacctctggcagggcgcctgctgctcactcgaggacgccaataatctggcgcgccgactccacaactccgaactggactgaggccaggacgacg

SEQ ID NO: 91920 - DNA, 832 bp, Zea mays
  Clone ID: MRT4577_183828C.1
cctcccctcctcccgttgcctccacgcctccgagccagacagacacgcgagagggtagaccgcggcggcgaggcctcctgctttgcgcctagggttttgattcgatcccccccgccgccgccgccgcctgccggatggccatggagagggagctcatggagaccttcgaggccgccaagaaggccgccgacgccgccgccgaggaggccgacggctcctcccccgaggccgagcgctgcctcgacgccctgcgccgcctccgcgagttccgcgtcaacaccgacgtcctcgtctccacgcaggttggcaaacgtcttcggtacctgacgaagcaccctaactcagacatacaggcggtggctgcagacctttttgggtactggaagaaggttgttattgaagagacaggaaagaaaaacggcacaccagcaaatggaaaatcaaacaactctgcagctaaggctgagaaacctcagcccatgaaggttgaaaagaagtcagcgcacgtgaaggttgagaagaactctacgtcgacaactgtgaagtctgaaaagaatgcaactgtgaagactgaaaagaattctatgtcggcaagcgtgaagattgagaagactgcgaatagtgattccaaagtccaagttaaggtagagaaggtttcaaaggaagttagcagaacatctgaaacaaagaaaccatcttctgttccaaatggtcccccaaagctgacatccctcgtcagatgcaacgatgctgctcgagataaatacagggagcttcttggtgacgccttcgtcaaggttcccaggaaactagtgatgatgacagagaggaa

SEQ ID NO: 91921 - DNA, 296 bp, Zea mays
  Clone ID: MRT4577_183829C.1
tcgggcgagttcaaatcccacaatcttcttgtagcacaccactgtcttcgtccaactcggcggcgatgtctgggccccgcaagggcgggaaggggcttggcaagggcggcgcgaaacccccccctaagggttttcgcgaccaccttcaagggtttaccaaacccgcaattccgaaacttgccaagaagggccgcgtgaaacctattttccggcttatctacgaagaaacccggggggtgctcaaaatctttctcgagaatgtcattcgcgacgcggtcacctacaaccgagcacgc

SEQ ID NO: 91922 - DNA, 233 bp, Zea mays
  Clone ID: MRT4577_18382C.1
cccgggggagtggatatttcttttttgtggataacctaaccacacacatggcccccccaaacatatacccacagggaaaacacgggcgtccaaccttataatacataattaaaacggggtttcctcacccttgataaggtctgacctaacactaaacaccatgttgacagggcgggaacaccccaaattatttcaaaacaactgggctcattaacccgcttttaaaaccatgg

SEQ ID NO: 91923 - DNA, 301 bp, Zea mays
  Clone ID: MRT4577_183830C.1
ttcctgggacgcacggggggcactccgctgctggagttgtgtcaaaagccgacagtattcaaggtctcgagccacaggtcaatgtggatgatgaccacaccatgctcggacaaccagtggcatggacactgtggctgacggtggactccacagagaccgggggggcggacggatccgtgactgtactctcaccgaacagcaccgggatcagcaatgcgatgatctgacacatgactcacgcccgccggctcatggacactgagaaggccatgactgacctgcatgggaccgacgagggtgc

SEQ ID NO: 91924 - DNA, 211 bp, Zea mays
  Clone ID: MRT4577_183831C.1
aattgggccccgccctgtaccggcccattaagcccggcggggtgggttggttccccccaggggtgccgttccacttgcaagcgccttagcccccgttcttttggtttttttcccttccttgttggcaccgttggccggttttccccgtaaagttttaaatcgggggttccttttagggttccatataagggttttacggaacttttacccc

SEQ ID NO: 91925 - DNA, 429 bp, Zea mays
  Clone ID: MRT4577_183832C.1
ctaaaaccggttcaaccggtttctgcactgttccgctctgtcactgccagtctgccagtcagtcctgtcagaaaaagtcgtgtgcagattttgggaaaaccggttcaaccggatttgagcccggctcaaccggttttgagtccggttgactctccggctgagtaggtcagtgaaccgagttcttcctggtggaaaccggttcaaccggtttacaaaccggttcaaccggtttttggccaactttccccaacggccacctgcttttgtgggcacctttatatacacctcccacactttgtggtcggcaaagggaggattagggttgaaagagacccggctctttgtgggcgcctcaacgaggaagtagggcaccttggtggtgtgaccgaacctcgggataaatcttgtgtctcttgtgttcttgctcat

SEQ ID NO: 91926 - DNA, 458 bp, Zea mays
  Clone ID: MRT4577_183833C.1
gaccctcaccccgcacagccaaaaaacgcgagacgccggatacgaaacgcgccgaaacccttacgcgcacggcgcaccgcgtcctgctctgccgaacacacaccacacaccccgacgggcaggcaaagcaagctgctctcgcctcagcccaagagccagccgcgcgcatctggttggggccagctcctgacgatcgatcgcgggggggccaaggcccaagggaacgtgttcttccaagatgctgcagctgctgatggctctggccttctcggcggccccgctgacgctgtacgtgccgccggtgcgcagcctcagcctcttcgtcgaggccatggaggccgtctgccgcgactgcgcgccctactcccacggcgccgtcgcccgcttccgcctcggcctctcccgcgtcctcgccggcctagcgcgcgccgtccgctaggcacccccgccccgccccg

SEQ ID NO: 91927 - DNA, 404 bp, Zea mays
  Clone ID: MRT4577_183834C.1
cccacgcgtccgggacaggaggacggacgccagccgcccagcagccaccgctagtccggtgctccgctagccgctagggcagggcaagtgtgtgttgtccgccagcctgaccgcctctccgcctccggtgctcacccagtcggccagtcgcccgcctcgtcggccgccgcctcgccgcgcgcagcgcgctgccaggaaataggccgccaggcgcccgcagtgcctgtccggcgtggtgacgtccgcctcaagctgtcagactgccgctcgacgctcgttacgcacgccgtcagcccgctagtgtaaggatcagaaagtctgccacaggcaacaagtgaggaacctagcctagctacgaggattcaaggaacatgggagaaaatgggtacaactaggacaacagc

SEQ ID NO: 91928 - DNA, 870 bp, Zea mays
  Clone ID: MRT4577_183835C.1
cctcgaggccggccgggacaccacaccccgcacagccaaaaaacgcgagacgccggatacgaaacgcgccgaaacccttacgcgcacggcgcaccgcgtcctgctctgccgaacacacaccacacaccccgacgggcagcaaagcaagctgctctcgcctcccccacaccccgtctccaccacagagccgcccgcccgctcgctcgccaccagacgccacacgcccccagcccaagaggcagccgcccgcatctggttggggccagctcctgtcgatcgatcgcggggggcccaagggaacgtgttcttccaagatgctgcagctgctgatggctctggccttctcggcggccccgctgacgctgtacgtgccgccggtgcgcagcctcagcctcttcgtcgaggccatggaggccgtctgccgcgactgcgcgccctactcccacggcgccgtcgcccgcttccgcctcggcctctcccgcgtcctcgccggcctagcgcgcgccgtccgctaggcacccccgccccgccccgcatcgccgccgccgccgggtcccttctttcctctgtcctcctttctacccataccgagcaggtggtttctagcgcaggcagcacagctagcaatatactgtactatacatgcaggactagcgcgaaatctttctgttttttttttgtttgaggtttgggtgtagcatgtagggtgaggacaggttaataaatcaatccgaatgaaggggagattttgcacgagatgctgaggaaatctagtgtgtgttggggtgtgagaggtatgaattccatgtggtgtgaatattggtttgtctgtatctcgcggcaatgctttcagttgaggaattgcggtct

SEQ ID NO: 91929 - DNA, 606 bp, Zea mays
  Clone ID: MRT4577_183836C.1
actcctatgggcgattgggatcctcgaggccggccggagatcacactccttcatatattcaacatatccccctgctctatgttgcgatctccatggcgaaccctcctgtcttcttctatatgaccatcgagagcaacccctacgccacgtatcgtgctgcagctgtagtccatgaacgcgccatagacctctacagaacttccgcgcgctatgcacggtgctagatagggctgctcgcctaatgtccggcaaattcgtctccactacaaagggtccaccttccaccggatgatcttcaagttgatgtgattggctgcaaacttcacctgagcaaacgtgaccgaaaggatagtctcttctacttcgagaacgtccccgaccattaaatggcgttcatatacaccgcccgctgttgtggtctccatggtcataggctccacaatgaacatgcgggtcgcctttcttcatctgcaccgtccctgcgcctatggctcaacttgaagcacgtcctccttctctgcacgacgtcaaggagcatgaaggtgcacatggccatcagagatctgggtcacgcccaactcatcctccctgaacgtgaacagagta

SEQ ID NO: 91930 - DNA, 301 bp, Zea mays
  Clone ID: MRT4577_183837C.1
agccttccgccaacccttccggcgggcctttaccggttaggcctcttggttgccccaactggcggtgggtcttgcctttgtcctggggggttgggggggggcaccactggcaagttagcaaaggcccttgttggacctaaaataacggtttcaatggccgccgtattgggttaccatggcattatggccagttggggaatggttaaataaagtaatattggggtcaaaaaaaaaggagcttttttccttttcctaaaataatcaagttcacttcaaaatggggaggtttaattttaacttt

SEQ ID NO: 91931 - DNA, 208 bp, Zea mays
  Clone ID: MRT4577_183838C.1
gcaagctcggagtcccctctagcgcgcgcccccttttattattttcttttttttttttttgcaccatgggggttttttaaaacaataccgggatttaaacacctccagaccattacaacgccatggtttagaaccttgctacaaacacccactgtgacacaccatgagcacaaaccccccccggccaaaccagaccccagcgtacccc

SEQ ID NO: 91932 - DNA, 796 bp, Zea mays
  Clone ID: MRT4577_183839C.1
accctgcccctgtctcccgcggcgggggatctcatcccggccatcctctgcctcggagaccaccggatttccctatttggtttgatcatctttcagagtttttttgtgctatactttccttaattttcttcctggccgcggtccagtccaatccccatccacaaccgcagcccctcgctcttcgccgccgtggggattcccggcttgtcccccctagccggcgatcttccgtgctgcggctagttgggatttccttgctgtatcctcagctggagcaacccctaccgaaaccctctgttttgggcaagggaaccgctctcccacttcattccccaaatttgcaccgtccggcgagtccaaatggggatgcagcaatccaaggaggagctgctgtaccagcaggtgaactacggcaacatcgaggggattcggaacctccgggcgcagggcgcaggcgttgagtggattgacaaggaagggaagacgcccctgatggtcgccagcatgcgccctgatctgctgaatgtggctaaagctttgatcgaactgggtgcaaatgtgaatgcatatcggcctggatcacacgctgggactgcattgcaccatgctgccaaaaaaggacttgatccgactgtccatttacttctctcacatggagctaacccattcataacagatgatgactgcaataccgcacttgacctggctagagaaaagggtcatgtgaacgttgtaagggccatagagggacggatttctcttttttctggatggatgagggagaaatatggccctg

SEQ ID NO: 91933 - DNA, 675 bp, Zea mays
  Clone ID: MRT4577_18383C.1
cccggccgggccgggcaagcgtgggcatgagagctggtagcagcttgctcaataagcgagatatctggtgctgcagtaacgctagccgaggatagatctgacatcttgcagaaagttgttcgaatatctggtacccctgagcaggctagcaaagctgagaatttgctgcagggatttatccttagcattccagatgacattccttcaggttaatcgaagacactctgcatgtcatagttgttaattcgtcaattttcttttatattttcgaggcagaatatgtcgagtcatgtgattatttgtttaattgagcagcatgttttcatgtgcggagacatgcatgccattttctttgtatctttgtagctgtgaccctaaatttcggttgtctccgaagacactctgcatgtcatagttgttaattcgtcaattttcttttatattttcgaggtagaatatgttgagtcatgtgattattcgtttaattgagcaacatgttttcatgtgtggagacatgccattttctttgtatctttgtagctgtgaccctaattcggttgtctccgtttaactggccgatggggctgtaagattagcaagtgtttatagactgattggatattaacgtggtgtttgcttccaagaaaaaaaaaaaaaaaaaaggcccctagggcc

SEQ ID NO: 91934 - DNA, 632 bp, Zea mays
  Clone ID: MRT4577_183840C.1
atcgtttaaatattaatagagctcctgcagagatctgggggggggggggggggggcggcgaccgcacggttcagctctagaccgataggggctccccactgtgcagccgacttgagtccccacgttacgccatagagtccaggtctcatcagccaaccccccccctgtgcagacgacttcacacacgggattgtacctcaccgaacgtctccgtagagcctagcactatagaggtaaaggaggaagagtgctaggaggacgtgctccagacctagagggcaaagaccttcgtgcaaacgactagatttacacagtgaactttatttcctcccgtacgtaactaccaatgaacagtaacccggtagaagaccgtgtgtttgacctttgcatgaaagaaggtataggagacctaggaagatgtcacgttggtagagggggatgggaagactagtagtaagaccaagaggtgaaagactacggcgaaggagggtactacttttggggaggaggaagcaaccgtgaccagaacgctgtctgtcttgcaacagtaggtccgttttactacgaccaggtacaccgttacagaggacacctttgggtgtgaagacacctagacggtgggtcgtacggtg

SEQ ID NO: 91935 - DNA, 658 bp, Zea mays
  unsure (1)..(658): unsure at all n locations
  Clone ID: MRT4577_183841C.1
ngttcaaacaagcgaactcaccgcacgacgactcgcactgatcggagagccagcgagcgagatggccgggaggttaaccgcagcagggtcccgcgtccttggcggcggcggcgcacgcgccgcggccgctgccctccggcaccgcgccggcatgggcctccccgtcggccgccacatcgtcccagacaagcccctgcccgtgaacgacgagctggtgtgggacaacggtacgcccttcccggaaccctgcatcgaccgccttgccccgcacatcggcaagtacgaggcgttggcgtggctgtgcggagggctggggttcttcgctgccctcggtgtggctgcggtggtgaacaacaaggcctccaagataccatatactcccaaagtctacccgtacgacaacttgagagctgaacttggtgatagaccatagaagattgtttctctgtttgacaagccacttcgatgaattgaacatatcttctaccagacaaaagcagggaaagctgttgtttaccatgtttttttttgttgtaactaccttcatgtaatttcctggatcttgcgaagcatggattttccctacaataataacccacggcacgtggcaactattcctgaaaaaaaaaaacccacgcgtccgcccacgcgtccgcga

SEQ ID NO: 91936 - DNA, 131 bp, Zea mays
  Clone ID: MRT4577_183842C.1
gtgtggagacccgaaaaaacacatcttatcttataaacaaactgggttcacacgatatttgcgcatacgggcatgctgactggggtcgacccaggggaccacgtagagctgcgtacttacttattaagact

SEQ ID NO: 91937 - DNA, 113 bp, Zea mays
  unsure (1)..(113): unsure at all n locations
  Clone ID: MRT4577_183843C.1
aatcttgtgatcattcactcggacagatgctcggttntcagcgtctaggaagaactgcactgcatgctgatcgatttcgtctcctgctgcaggtgcccgtacagtctaccatc

SEQ ID NO: 91938 - DNA, 292 bp, Zea mays
  Clone ID: MRT4577_183844C.1
ccgacgcgtgggccgacgcgtggggagaagcactaagaacggggaaatcgatagatcagcgggcatagagtccctgcccaggaaccctaccctactccaggacatgcttgatctgaggcgcacccttacccaccggcaccagatgtgtacccgcctccgcctacgggccttggacatccaccaacaccccatgacacgtaccctccttcgacacagggttcttacccccaaccacagcatgctccaaccgtgtaccaacgatacttcaacgaccagcagagtgcttactacc

SEQ ID NO: 91939 - DNA, 296 bp, Zea mays
  Clone ID: MRT4577_183845C.1
acattattgtcaaaaatctgagtggcagatggcggggtggttgttattggcacctgctttggcgagactgactagtagccatagcatcagttcagctcaaaagtcaagaagatctttcccctcatttggtttaggtgtgatgggtgtcattcagaaccaagtgtgacaacagcgagtactttttgattgttaagcatgtcatgaccgaactttgaaagtttttgtaggcgcagtgacatatttgagtagaaaacttgtctttgatcaatgcaaggcaatgcaaattttccagcact

SEQ ID NO: 91940 - DNA, 700 bp, Zea mays
  unsure (1)..(700): unsure at all n locations
  Clone ID: MRT4577_183846C.1
ccggccgggactgcggccacagtgaatccaacacatgcatttaccccctccagatctcgcccgccgtttggcgatggcgattaccaagggcgatacctcgatggttcattctcttatcatgcagaaatctccctcgttcaactggactggcggacctctcgatgaagagaagcgcactagtgccatgaacatggaggcccatcgcggtcattctaaaattctcgaattgttatcacaggttgaaccccgcgccaaccttgccgccaacgatcccaacgacaatggcatgacccctctgcattgcgcttggccgaggtggtttccccatcatggtccgctggctactccaatttgacaccgttaaggctgcagtcgacaagaaagacaacgaaggccggactcctctctcgtatgccgcccaggttggattcgaggntacggtccggtcgctcctcaagttcgatgctgtcgacccattttcatacgatcatcgggaaaaaacgccttatgactatgctgttaatggcgggcatagatacgtggccaaaatgatccataataagaaggatacccgaaaccaagtacgctggtaattgctacaagggacgactgtactttaattacaagcgataatgctacttccacgtttattgtgccctgngcctcctaagtcttgggaaacaaaatacaatctttcctc

SEQ ID NO: 91941 - DNA, 610 bp, Zea mays
  Clone ID: MRT4577_183847C.1
accacgcgtccgcccacgcgtccgcccacgcgtccgcccacgcgtccgcccacgtgttggcgcaaatcaacagtttcatagtttcattagatattggagacaaacaaataatgatattattgtcgcaaaaaatcgactgatagtcaaacaacaacgattagtcagaaggagtcggagggctgctaccgctcacaagctctatcttatccaactatctcacgtcggtgctcacgtaccgtgatacaaccatcttcaccttcgagtccgttgaatagggttatgagggcattaatgttgtgattcagattaacctagcttttaattagctttcggccaagatctactagctgaatggttcaccccatcgatgacggtgtcgatcgcttacaaggaagatatagcgtgttacgatcgcccgtttgtaggcgaggtactatgtggttacgatggtcgtgatgcattctactgccatggaggtcatggtcaagcctaaccatgtcatggagattaggccaagcatacagcgttgattgtcacaccccatgtgttcgtcgcgaactaagcagcgagtgtggaactaatcaaggtatgtcaagtgaggatcatgatc

SEQ ID NO: 91942 - DNA, 476 bp, Zea mays
  Clone ID: MRT4577_183848C.1
attcggctcgagcaacagtttcattagatattggagacaaacaaataatgatattattgtcgcaaaaaatcgactgatagtcaaacaacaacgattagtcggaaggagtcggagggctgctaccgctcacaatctctaacttatccaattatctcacgtcggtgctcatgtaccgctgcctcgtcaaagaagatgatcgtgatacagccatcttcaccttcgagtccgtcgaatagggctccgagggcactaatgttgtgattcagattaacctagcttttaattagctttcggccaagatctactagctgaatggttcaccccatcgatgacggtgtcgatcgcttacagggaagatatagcgtgttacgatcgcccgtttgtaggcgaggtactgtgtggttacgatggtcgtgatgcatcctactgccatggaggtcatggtcaagcctaaccatgtcatggagattaggcta

SEQ ID NO: 91943 - DNA, 1795 bp, Zea mays
  Clone ID: MRT4577_183849C.1
atgggtatgggttctttagcgggcatattttttcttcgcgggtatgggtttgggcaagtaatacccaacgggtttttacccattaccatctctacaccagagctgcaagctataccatggccaccactgtacatgtctcccacactacctatctatgatggcctgacagacctgaagcagttcctcatgaactacgaagccaccatatcatcgttcctcatgcttcgggctaaggctccggctgttcaggatgacatcgtcattgaagcaatggttaaggggctcaggccaggatcaatagctcagtattttgcaaggaatccttctcattctcttgaaaagaggcaagagtttcacgggtacaccaaagtcaccttgggcttcggaggaagatttcatccaatgcatgcccaaagcatccataacccatcacaaggttgtagtagaccgccccccgaagactatgatcgtgttgtggatgacgtgccagctgtgcctgatgctcaatctagccccaatttgatcccattaagtcagccaggagatgacctgcagatagattcacttgggtgtatccctttggcacagacgaattgtagagagaccgctgctcttgtggttgatcctcagaccgtggcatgtggttgcttcggtgatagatttattgcctcgaacagtcctgagtttaggaatgaagaggagccatatgcctttgatatggctgctgatttagatgatgatcgtccggttgacgaccgggatccaagagtgcatgagttcagcgatcttagtctttctcatcaggcaaatgcagaaggaagggatgatgtgctgctagatgctcctgagaggtggttgcagcattatgcagtcttacgtaagaggccgtatagagtacttcattcgtacgagaaacgtcgttacacggttgtatgcgacaaggataactgtgcatggagggtctatgctatgatacaaaagatcaccgcaaagtggaagataacaaaagtagtggggctacacacctgtgttgaacatgagttaacgatgaaacgtcgccaattgacatctaccctcattgggaagcagcttatgggaatactgcagtcggaatcaaatatgaaggttaggacaatcatgaggattatggagaatgtgtatgatgggtataagataacatatggtaaagcttggatggctaagcagtgtgcatggaagatgatatatggggactgggagtctgggtacaagcaactacctgttcttctatatgcaatgaaggcgggcacgcttctaattgccatatccggtgatgcgaacaacaagctagttcccctggcatttgctctggttgagaaagagaacaaagatagtttggggtggtttttgcgaatggtccggatacatgtggttggtccaggacaggaagttggtgtaatatcagatcagcaccagggaatactcaatgcggtccgtgagcagatcgatgggtaccctcctttgcatcaccgctggtgtactcgacaccttgctgagaatcttctgcacaaggatggtgtgaaggataactttgagcttttccagaagacatgtcaccagctggaagacaagttctttagggaaaagttagataagctcaaagtcgcaacaaatgtcgaaggcagagattggttgactcgattgataccagatttggagaagtggacgagagctcacgacttaggtggatggagatatgagttccaatgtagtaacacggccgagtcattcaacaaattattgttgggcatacgtg

SEQ ID NO: 91944 - DNA, 154 bp, Zea mays
  Clone ID: MRT4577_18384C.1
caaacaaatgggctaaacatagaaaaaactgtaaaatggtaaatatataaatacagacaattattgtacaaatattaaatacggtggcttcatgttaaatgataccaagatcaaaactcgatatttggtctattcggtgtacctttttgaaaat

SEQ ID NO: 91945 - DNA, 680 bp, Zea mays
  Clone ID: MRT4577_183850C.1
atggcctgtcaaaatggatctggagtcaccaccataccgcataacgctatcttcacagctctactgcattgcttttgtgcatactgggaaaaagttgcgaaggaaaaagatcgcaccaaagagcacttcaaagaagaagagagcgaccttctcccacggctagaacaagtaagacggatgcagcgggaggaggggaaggtttctggcaggtccagttctgcatgggcttcggaggcagtatctacaatggagatgacacactcgaagctcttccccttcttcatgactggtctccttcctcaggaggccatgcaatacttagacctagtgtgccgatgcacgaagaacacgcgccatctggtctccatgctcagatcccttgccgagcgcctggaagacgcgaacccgtcaattatacacaacaaccctaccaaactgtatgagcacctactcgtaaagtccccataagcctcgaacacccttttctttttcttgtgtgtagtgtagctaatgtatttggggggttttggacgattgtgaaagcgtggcgtgtatagctgattgtgttatccaagcgtgagtaactacccgggaaaaaaaggaagtgattgaaatgtgcataaaaaaaaaaaaaaaccccaaaaaaaaaaaaagaagggcggccgccaaaaagtgagctc

SEQ ID NO: 91946 - DNA, 826 bp, Zea mays
  Clone ID: MRT4577_183851C.1
atgaggatcgtggagaatgtgtttgatgggtacaagataacatatggtaaagcttggagggctaagcagtgtgcgtggaagatgatatatggggactgggagtctgggtacgagcagctacctgttcttttaaatgcaatgaaggcggtcaatccaggcatgcattatgagtacatccctaaaccaaatgcatggattgatgggagacagatattcttccgtgcgttctggtgctttccccagtgtgtggatgccttccggcattgtcgtcctgtcttttcaattgacggcacgtttcttctcggcaagtaccagggcactcttctaattgccatatccgttgatgcaaacaacaagctagttcccctagcatttgctctggtagagaaagagaacaaagacagttggggctggttcctgcgactggtccggatacatgtggttggcccaggacgggaagttggtgtaatatcagatcggcaccagggaatactcaacgcggtccgtgagcagatcgatgggtaccctcctttgcatcacaggtggtgtactcgacaccttgctgagaatcttctgcgtaaggatggtgtcaaggataactttgagcttttccaggagacatgtcgacagctggaagacaagttctttagagaaaagttagaaaagctcaaagtcgcaacaaatgccgaaggtagagattggttgaatggattgatgccggatttggagaagtggacgagagctcacgacttaggtggatggagatatgagttccagtgtagtaacatggccgagtcattcaacaaattattgttgggcatacgtg

SEQ ID NO: 91947 - DNA, 1060 bp, Zea mays
  Clone ID: MRT4577_183852C.1
ccacctcgcccgctcctctgactacctcctccacctcccacgcaagctcccccgcgctcccagtgcacgccgtgcctccccacctcgcacctcccaagtcccacccacaaacactcccaaacccttctccctgcgtggtcccactcacttcgcatgggcaattgctccccgtccccgcgtcgccgccgcccgacggagccggactcgccgccgctcggcagcaccgtgtccgcgcccaccgtgacggtcaactccatctccgtctcctcctacgcgctggagcacgccaggatggaggagaccctcatcttccctgacatacagagggcatcgtttccaggagtgtgcgataaggttaacgagcagcatgggaggcacctgccaatgatgaatggaatcaaggaggatataaaaacactgctgacgttggaattagggagccccctattccatgaagtggtggtcaacctgtcagttcgcctcaaagcgttgcaggaccacaccaaagagcacttcaaggaagaagagagtgaccttctgccacggctagagcaagtaagacggatgcagcgggaggaggggaaggtttctgacaagtctagttcggcgtgggcttctgaggcggtagctacaatggagatgacacactcgaagctcttccccttcttcatgactggtctccttccccaggaggccatgcaatacttggacctagtgtgccgatgcaccaagaacacgcgccatctggtctccatgctcagatctcttgcagagcgtctggaagatgcgaacccgtcaattatacacaacaacccaaccaaactgtatgagcacctccttgtaaagtccccataagcctcaaactgctctgcgcagcgatgcggtgctaacctttacttttcctgtcagtagtgcagcttatgtatttcgggttatttgaacgattgtgaaagcgtggcgtgtatagcttattgtgatatggcagcgtgagtaactacacggaaaaaagtggaagtgttttgaaatgggtatgatttccggctgttctctgttgactggt

SEQ ID NO: 91948 - DNA, 1188 bp, Zea mays
  Clone ID: MRT4577_183853C.1
gtaacaaactcttgtcattgtcttatttgttggttgtttaccaaaagaattccaaggtgcgtaattataacttttctcatatcttttttggtcttatacttcttatcttcctttgttataaacatatataggggaagtacttttaagtggtggtgcagcctaccattggtacttcaacccatgaattgaagaagctactgctttttacaacaagtacaccaattacacactttcatttaaaaaaaataaaatcaacagcaaaacctaactttactttatgattcacaggattgaatctgagaagataaacatagaattacccagccttgacggacaagaaattacacctccacaacttccacaacgagaacatcatgaccttaaatacatattacctctaaacccacatgatgtaccggatgaaggatatgaatgcacagtaaccattacaagtattcctgaaggcaagacttggtattatattgcttgcaatacttgcccaaacaaaccaagcattgatcctatcatccgtcaatgctccacatgtggatcaacaaaatactgcttcaggtacaagctcactttcaaggcatcagatggaactgcagaagctgaaatgtttgctttcgacactgttgcaaggacaattattgggaaaccatgtccaacagttgttgcatcctttcctgatgcatcagctatcccacctgaaattgcagcaatagtttcacggaaatacacattcattatagaattcaacagccagtcattcagatttctagaaaaaacattgctcataaaaggaattgtagcatcatatggaagaatgacatcactaccaatagtacaagaaaaatttgatgtgcaacttcctctcactccaacaaaaaacaaactgataacaacagctgccgaatctccttctacacccatgtctagactttccacagcagactcaccaagcatgccccaaaagctgacatattctccagcaaagaataagccttagacaaacctccccgatgctaacagaagcagagctcctacaactacaattgagtcgccaacaaaaaaatttccaccgactagttctagatcgcgaaacaagaccctaagaatcaacaagagtagacgttgggtgcaacacagtaaggaatacttctgaacatcacgcccaaacttcaacaa

SEQ ID NO: 91949 - DNA, 192 bp, Zea mays
  Clone ID: MRT4577_183854C.1
aaaggtcaaacctcaaactttataggggttcaacccatactggtgcaaaaaaattttgggtccaacacaaaggacccaacgggtcctttaaaccaacgaagccccccccccgatttttgacccccaacccacaggtgtttattaaaccaccccctccttttagggggcccccagagggccccaaaccaccca

SEQ ID NO: 91950 - DNA, 366 bp, Zea mays
  Clone ID: MRT4577_183855C.1
gagagctactagtcggcggccgcccttgattttttttttgttgttttgtacaacctgaccctctcctagcacatcaaaaaggaattaaaaacattgttcagatgcacttcatgaaccagggaactggactttcgaacactgaccatggggacagacacacaagctatcacctagaaaatggaagaccaaaacactcacaaagagggcatttagatcttatcaacttaagaacaggatgctaagacagcatggttcctgtccagcaacgctaattgacacctgcagcaaaacacctattgaaaggacaggctttcgccaattaaacgcccattatctttcccacctaaaggcatttgaaaggcgtcc

SEQ ID NO: 91951 - DNA, 603 bp, Zea mays
  Clone ID: MRT4577_183856C.1
tgcaacaaatgtggtcagagcacctgtagtttgtggaataacatcccttgggtatgatcatatggaaattcttggaaacacacttggagaaattactagagagaaggctgggatactgaagaaaggagttccggcgtatacagttccacagccagaagaggcaatgtgtgtactgatgaagcgagctactgaattgggtgtttctcttcaagttgtccaccctttggacccacagaaattagaggatcaacctcttggactccatggtgagcaccaatacatgaatgcaggtcttgcagttgcattggctaatgcctggcttgagaggcaaggccatttgaacagattacatgtcaaacattctggtaccttgccagatcagttcatcaaagggctgtcgagtgcttgtctgcaaggtcgaggacagattattccagattcacaagtgaactcagaaaatgatcgtgattcttcattggttttctatttggatggggcacatagttcagaaagcatggaaatgtgtgcaagatggtttgcccacgctacaaatagtgatggaatacagccaggtccttcggagcagcctcatactgataggga

SEQ ID NO: 91952 - DNA, 274 bp, Zea mays
  Clone ID: MRT4577_183857C.1
atggcgtcgtccatgctctccgctaccaccgtgccagtccagcaggagggcggcctgtccgagttctccgggctcaggagctccgcgtcgctgcccatgcgaccggagatgccacgtccggcgacttcatgtccgccgtctcgttcaggacccacgcagtcggcacgagcggcgggtcgcgtcgggcggcgacggaggcgaactggaaggtggccatcaacgggttcggccgcatcgggcgcgacttcctgcgggtactggcacggacgcggcg

SEQ ID NO: 91953 - DNA, 230 bp, Zea mays
  Clone ID: MRT4577_183859C.1
aatcaaaatggactcactccgagtcaacatcaagcccaccgtaaccggggcctcagcgtatccatgtccatcaacctagtagagcagcccctcacacatctaccgaagctgtcgggcaacaattagccaaccaccgcgagtttgagcaaacgtgtctaggactgcctgaaaaagtatgactatctgagggacaaagtgttccgcttcctgttgaacaggttaccactgga

SEQ ID NO: 91954 - DNA, 509 bp, Zea mays
  Clone ID: MRT4577_18385C.1
ggagaagagcgcgcggcgcggacaagaaacagagcagagcgaggagatgagctgagccacgacgcgatgctcatctgactcgattcaatgcacccgcgccgccgcagcgaaagcaaaacgcctggactgaaagaagaaagtatgatattggcttgcacgccagccacaccacaccgtgttgtcataaaataatacagagaggacgtgcctcggtcgggaatgtaatgtgaaatgctcttctcctcgactctgtactgtactctactcatggtgaagttgatatgctacccacccgaatcctctactcgacctgctctgcattgcatcatgcgatggtgttgacacgacaccttgccttgagagcaattgcgttgtgtgatgctgtgctgttccattcgagcaacgtcacttcccttgctagtggacattgcattgatgaaaaaaacacctgctctgctgaaggataatgttatgctgcaagacgataaggtgacacctcagctgacgaa

SEQ ID NO: 91955 - DNA, 577 bp, Zea mays
  Clone ID: MRT4577_183860C.1
gaggctggccgggagttgccactactaaaaacatatactgtaagcaccggtagtccccagaaaggaaatagaagtagcaagaatactcgtttcctcatggcactactcttcaagaaaagtccgaccaacatcaccgacttgataatcgcttctctcctggttcttcttttcatcatggcttcaatgtccccatccttccaagtgcatgtgaagggcgacgatggccatcagcacgagggatccctagaactcgcgcagcaactgaggacgacgacgtgcatcgcggttaagggaggcatttgtttccaaaagaagtgccagggtatctgcgaatccaatggcttcaatgctgcaactgccttctgctataaaccgcctggtcttcatctcccgcagtgctgctgcccatgatcgttaattagcctaatgcagcgtacgcatgcatcgatccgtatgctttatacgcacataaactgaataagatgtgtggctttactaataataatatattacaatgcatgtggagtatttcaaaaaaaaaaaaaaaaaagaaaaaaaaaaaaaaaaaaaaaaaaaa

SEQ ID NO: 91956 - DNA, 989 bp, Zea mays
  Clone ID: MRT4577_183861C.1
gggtacctcgaggccggccgggaagttatgtacataaacaggggctggagatactggaattcccgaggttgtggctgatccgcaaggggatgtggctaatacatttcagaatcttggggcatgtgttgttcaacagtgtgctaaaatcaggcaacaaggtaaatagactgaaagtagttcatggaagatgacctcatatacggacacaaaaaataataagaaagcaccaaataagttgtgcaacacacgcgtacataatacagaaaaagagacgcttttcttataaattgttatttttctgttgtcagtttctacagcggtgtcctacgatagatccattaaagcaatcagagtgaaagtgccagattcagacgaagagttcttgctgcatccagcaacagttagacggaacgaccgatccgctcaaagcgtggtgtgtatatatgcttttcagcattcagtatgtgggatatatgtggttctaacatcatttcttaaggatggcaagtcaaaagtgtcttcatgtcattaaattgtggaagtttcatttctacttgatcatagttggtcgccatcataaatgtacaagatctactggtagtcctttctatattttttttatttctacttaatgaataggcagtgcggttgccatttatatatttttctaaaaaaaacttaggtcatgcatggtaaacatatttggcatagctttgtttctccttgtgtataactacggattccttaaatttctgcaggatgaatggacaggggagcagaaggttcagtacagtgacataccagatgacatcgagccagaagagattaggccgatgggaaactatgcagtttctataacttggcctgatggatttagtcagatagcaccttatgaccaattggaaatgctggagcggttggtggaggctccgagtccagcagcagcgtctgcagtggccctcgtatgatacagcagaaagaatgttcag

SEQ ID NO: 91957 - DNA, 2226 bp, Zea mays
  Clone ID: MRT4577_183862C.1
cattgggtacctcgaggccggccgggaatccatctttatccccacgtgtgttatccttctcttgcccggggcctcgattttgtgggtggcggtgagctcctgccgccctgcttcgcaatcttcctgcacctcgacaacgacgccgtcgaccctcgccgctcgccgccaccgcggtctcacctcatcagcttgtggccgccacggaacgccaccgacaagcaccaggtgagcgcgagcagtctttgtccggtcggcgatgcagaccctccgccccgcgcccgcctcctttctcgtgccgcccgctccgcagctcctccgcacagcgccgccaccagccccgagagcaaacgctgctgctcttgccgcggtgtcgcacgggcggttcccctcgccgcaccgcgcctgccggcgccgtcgacgcgtgacgaggccagcgtcgtccggtgctagcgccaccgtggcctccgtggatgacgcgaagaaggacgtgctcatagcgctctcccaaatcatcgatcctgatttcggcacggacatcgtgtcctgtgggtttatcaaggatttggaggtcagtgaggccttggaagaggtctcatttcgtctggagctgacgactcccgcatgcccaatcaaagacgagttcgaacaaaaggcgaacgaggtcgtcgcagcacttccatgggtcaagaaggtagacgtcacaatgtcggcacaacctgcacagccggtatatggaggggagcttccagaagggctacagaagatttccaacatcatagcagtttcaagctgcaagggaggggtagggaaatcaactgttgctgtaaatcttgcctatacactagctggaatgggcgcccgggttggaatcttcgatgccgacgtctttggcccaagcttaccgactatggtttctcctgaaaaccggttgctagtgatgaacccagaaagcaaatatattcttccgaccgagtatttgggcgtcaaaatggtgtccttcgggtttgctggacaaggaagggcgatcatgcggggtccaatggtttcaggagtcatcaatcagctgctgaccactactgactggggtgaacttgactaccttgtcatcgatatgcctcctggaacaggcgacatacacttaacactctgtcaggtggctccattgactgcagcagtgattgttaccacccctcaaaagctggctttcattgatgttgccaagggagtaaggatgttctctaaactgaaggttccttgtgttgcggttgtagagaacatgtgctattttgatgctgatggaaaacgttattacccatttggacaaggttctggaactcaggttgtgcagcagtttggaatacctcacctctttgatttgccaatacggccaactctttcggcttctggagatactggaattcctgaggttgtggctgatccgcaaggggatgtggctaatacatttcagaatcttggggcatgtgttgttcaacagtgtgctaaaatcaggcaacaagtttctacagcggtgtcctacgatagatccattaaagcaatcagagtgaaagtgccagattcagacgaagagttcttgctgcatccagcaacagttagacggaacgaccgatccgctcaaagcgtggatgaatggacaggggagcagaaggttcagtacagtgacataccagatgacattgagccagaagagattaggccgatgggaaactatgcagtttctataacttggcctgatggctttagtcagatagcaccttatgaccaattggaaatgctggagcggttggtggaggctccgagtccagcagcagcgtctgcagtggcctcgtcatgatacagcagaaagaatgttcagttagcaaggggcaagaaggccgacttttagctcccagaaaatttatagctctgctacaaattttgaaagaattttacagtactgtagaaccattctcattgaatttttaaaaaaggcagcatctttcgtccctcttaaaccattgtgcgaacccccggtctcactaaaccacagggtaaccttggcaatacccaactataaaagaaaacggttactgttataaagatagttttttttcccagttatatagaaaattgatataaaactagtgacaaacagaaggtgcatgggtggatctaatatgtttgttacatatgaatatagtgaatacaagtattattgataaccattgc

SEQ ID NO: 91958 - DNA, 283 bp, Zea mays
  unsure (1)..(283): unsure at all n locations
  Clone ID: MRT4577_183863C.1
gaccggantccaaaaatnggggcatcgggccccacaagacaagaacctgtatttagaaattcaaaaaaaatctattcgcgtcggaaatgagagatattgtggttctccatacagaattagttgcttgtgattctgacggaacaaacaatttcggagggaacatcagagaccttgtttacccctatttatacgattcacgtatgcataaggcaattggtttttactttaatttaaactatacttttgaccttagaatgctaacagggctgattttcgattgtgg

SEQ ID NO: 91959 - DNA, 302 bp, Zea mays
  Clone ID: MRT4577_183864C.1
gagaaatctccgctagatttgatctgtcgggcactcggctcaaaagaagagcgtgcaacactgttttatacttcgggtgccagaatctcgtgtcaacactgaccaaggcatgttagacgcatgtccgtgcaaaactagatggttgtgcttaagccgatcggggtgaggaggctccacttagccggtgccaccgggcgtcacgctatcaccagggccagcgatcatctactcgatatccttgagggtttcggcggtcggcacgggcactcattggtgcaccaacgataccctcggggacgtga

SEQ ID NO: 91960 - DNA, 370 bp, Zea mays
  Clone ID: MRT4577_183865C.1
gtttgtcttgactgccgcaggcactcaagctgagcaagtaattgatgcactgaaacctgcacaccgagggaaactacaaagaatacctgtgttctttgtcgcaaagcgactgacgtaagcacccccccaacctgtcaatcgtgcaagatatgaaaatcagtggtattcagtttcttccaagtagcgagccccatatggtcaacaacaacaaccccatattccttccttctgttttgggttctctgtcactgttacatttaggtggctgacgttagcagttgcaactttttttttctgaaattgtggtgcctgcaggacaaaagtactgcaactgtttccggtggcacagaaagaacaatgaaggatccac

SEQ ID NO: 91961 - DNA, 411 bp, Zea mays
  Clone ID: MRT4577_183866C.1
tgcttgtgctttccattgtacattgatctttttgatgcctaatttatcaagtccctgaaagttcaggtgtaaaaaaaaaaaaaaaaaaaaaaaaaaaaaaaaaaaaaaaaaaaaaaaaaaaaaaaaaaaaaaaaaaaaaaaaaaaaaaaaaaaaaaaaaaaaaaaaaaaaagggggcagctcaaaaggatcaaagctaaattacgcttaaatgaaaattaaaatcccttcaaaagggtcacaaaaattaaattaacgggccgtcgtttaaaaacgtcataacgggaaaaaccctggggtaaccaaactaaaccgccttgaagaaaatccccctttcgaaagcaggcgtaaaaccaaaaaggcccgaaccgatagcccttccaaaaatttgccaaccctaaatggcaaatgg

SEQ ID NO: 91962 - DNA, 385 bp, Zea mays
  Clone ID: MRT4577_183867C.1
aacccgaaacttcgggattaaaaaccgaaaatcgggttattagctcagttttccttttaaggttcggcggcgtcgtcgttgggggaccttatttttactactaggtacccaagccccgcttgcaacttaacaggggccatgacgaacggcctgacccatgacaaggacttcccattctggcatccattaggattcaggggatggggccccggtttttgggggtttcgacgggatccctggagatcttccccatgggggggatccgaaaccccagcgcgatgggctttttggaccccaccttttgttttaccagcccagggtgggtgtccatggggaaacttgggcccctttgtatcggggtaaagctcggcgactttggggggga

SEQ ID NO: 91963 - DNA, 806 bp, Zea mays
  Clone ID: MRT4577_183868C.1
ctatacgacttatatgggaacctcgaggccggccgggcggccactgctgtcccggcggtgcagccccccggtgcgcgcgggcgcgggcgcgaggcacgcgggggcgcaaggcgcgacggctcagcgcggtctcgactgcccgtctacggcgcagccaccccgtggcgggcggctcccgacctcaacggctcgggcgcgggtccggctgctcggccatggcggcacaagtgcgcggccccctgagcgggcgagcgcgcagtcccgcggctctggcagtgcgggcgctaaccaggcgcagccagtgtgggttcgtcccggcgggcgcatggtaccggccatggtgccccgttgaggcgcgtgcgcgcacatggtattctcacggaggcaaccagacggtcgaacggatcatcatggtacagaacactccatgcataggagtgggcagaaagactgccagactccagcgagatcatctccttccagtggtgtcgggttgttgtccagcgtccagccattagacatgtactagcctctgtagccatacctaagcagcgtctccatgaacttgtctttgaatcgcttttcgtccgacagacgccggatgcacggatgcatggacattgctgtcgacggtaaccgctcggtggagagcaaagtgctgataacgtgttgaatctcagtggagagagacagataatgacaaatgactgaactcattattgcagggaacatcctgatatatatacaggtgaagggttgcgttctcaagggggtgtcccttggaaaaaaaaaaaaaaaaagcggcc

SEQ ID NO: 91964 - DNA, 465 bp, Zea mays
  Clone ID: MRT4577_183869C.1
gggaaaacaaaaaccccctggtggaaaaaactgggtaagcacaaaaaacaccgccgggaacacttggggcccccccttagttgggacaggccctaacgggccccaaccccaatcagggcttaaacctaaagcaacccattttagggggggggcttccgggcctttttgggggggggggacttaacgggcttcgggttggccttggccttgggggggggggactttttcgggttccccacaaccttttttttgggcactttgggctggggcccaaaaaaaggggccttttttgggttgggagccgctgccttttttgacttgggggggggggccttggccggtttgggggcgggggttttggaagggggggcctttgccggcttaaccttgggcttgggggaagcctttttgggggggtccgaaagcttgtacaaaaccttgaccttcacgagcttgcccttgggg

SEQ ID NO: 91965 - DNA, 349 bp, Zea mays
  Clone ID: MRT4577_18386C.1
acgtgggcgtttctcttgtctcaccaatacgagcgaagcacgttgcctgttgccagccaccaccatgttatccaggctctacccagtgcaagagctggctcaagaacacacgccaaagggcgtgggggcgcctgcccctgtatcccggctgctagctctcccgaaaagaccgagtgacgtaccccgagatcaacaccacctattcccagcggtgcatacagcaggcgcgtcaaacgcatcccaggctggtgcgcgaccgcctgcatccagcgcctcaaacgagccatgaaccgtcacgatgataaaggagtacttccaccaggagctccagtgacagcaagtatccatt

SEQ ID NO: 91966 - DNA, 776 bp, Zea mays
  Clone ID: MRT4577_183870C.1
aggcacgcgggggcgcaaggcgcgacggctcagcgcggtctcgactgcccgtctacggcgcagccaccccgtggcgggcggctcccgacctcaacggctcgggcgcgggtccggctgctcggccatggcggcacaagtgcgcggccccctgagcgggcgagcgcgcagtcccgcggctctggcagtgcgggcgctaaccaggcgcagccagtgtgggttcgtcccggcgggcgcatggtaccggccatggtgccccgttgaggcgcgtgcgcgcacatggtattctcacggaggcaaccagacggtcgaacggatcatcatggtacagaacactccatgcataggagtgggcagaaaggtaaatctggttgttgaaacaaattaacatacgatctttgaaaacctgttgctgagtagagatcaactccttgtggccagactgccagactccagcgagatcatctccttccagtggtgtcgggttgttgtccagcgtccagccattagacatgtactagcctctgtagccatacctaagcagcgtctccatgaacttgtctttgaatcgcttttcgtccgacagacgccggatgcacggatgcatggacattgctgtcgacggtaaccgctcggtggagagcaaagtgctgataacgtgttgaatctcagtggagagagacagataatgacaaatgactgaactcattattgcagggaacatcctgatatatatacaggtgaagggttgcgttctcaagggggtgtcccttggaaat

SEQ ID NO: 91967 - DNA, 510 bp, Zea mays
  unsure (1)..(510): unsure at all n locations
  Clone ID: MRT4577_183871C.1
cgggggtgtgggttgtttttttaaatattttttttttttgggggtttttttttttctacaaatgtttgttttttctctttgtacacaaaacggatgtttattcgcccaaaaaaagcactgatatctcttttctgcaagcaaccaaggaactcatcaaatggggaagccggggaaaaaattnctcatttccacccaaaccgccctacaaaaaaaaaacctgaagttaaggtacaggcccaaacatccaaaagtgaatgttgaaaaaacccgtgtcccccgaaaagaccgtctcaaaaaaaaaaaaaatgacccccttttcaggggggtaaaagaccgaaaattacgtgtggtaaaagaccaaaaccaaccactgggaaggtgccggtggctacaagtagggccagccggaagccatctaggggagaccgggggaacaccccacacccaaggagtcatattcctgggaccccaaaggcaggggcaggtttagggttttgtgcatccacagga

SEQ ID NO: 91968 - DNA, 541 bp, Zea mays
  Clone ID: MRT4577_183872C.1
cttccgtctcccgcctccttcgatgaccttcgccggggcttcacgccgccggcgagcatctggttcccatccccctctccctctcatagccatcgtcctcctgctagtcttcccacctccttcccgcacttacgcgctccgcgtcccactgcgcgaggtcgcctccctcctctccctctcccactccctcctcacccgcatcgcggtcacccgcgccgaccggggggacgccgctgccgctgcccgcgctcgccgaatcgcctcacacatatccattctatcctcccgcggtgcgtgggctcttggctgggactacctccgccactatgctttctcctccgtcaccggatgcggcttctcctgtgccactgccgccgcccgcctcctcgccgctgcggcggaggcctcgcgcctaaagtcacccgtcgatgcggcccagtggctgcgccgtaattacggtgacctcctagccgccgctacgcagctcctaaacggactcctctccgccttctccgagcaggggccgctaagggaggtggtg

SEQ ID NO: 91969 - DNA, 352 bp, Zea mays
  Clone ID: MRT4577_183873C.1
ggggggaatcgaacaaacattctcactcagattgcctcttgattataacataggtgacttgcgccaacctttattctccgtcttgtcgacaccaggcatctgaaaacggggggggctctccattatacgggattcacctggaaaatggactttcttacacccatgaccgtcactttccattcatcggtaccagtctgcaggccggcctgaccttagcagccagcctgggtcctcttctgagcctcgaagagaccgtgtcccggtcctcgtggcgctccgggatacgggacccggcttgtcgggccacctgacacccgaatctccgagcgtgtcggtgcttgcccgagtagat

SEQ ID NO: 91970 - DNA, 755 bp, Zea mays
  Clone ID: MRT4577_183874C.1
cagattgttctattgtcctattaatcttctgcattattttctgtttttgttgaaataggcacaaggtatgtccatactgtacctagtcacgagatatgatacctttcgctagagtggcagtgatgaattagcacatctactataatattgattccaccaggccagatgccactgtttagctgtgggcacgaaatagtacctcttcagctatagcaaagaataatatataaatttggcaaattagatgtgattgtattaaagggaaccccaagttaatatggcatgattatgatagtagtatttagtttgttggatggttgaaacaacgtttcatgttgttgtataggaaatgatatcttagttgtgacatcctgttggtttaggtgttttacattcctgttgcataatatttgctaccgatgtcactgcatgtttcacacttgcatttatttgcttcgtgctctgaaccctttatctttgttttggtttgcaggtaagtaggtcacataatgtcttctgaagataaagcaatggctaatcgtgtcacttcacactcgccaaaagctatggtgtcggaaccagatcccaacaggatgatgatgtttagatcaaatatggagtattcacaaacaaatggccagacaaatgctgttcttggtcctgtggctatcttttgggacattgaggactgtcctgtttcatgtgatgtacggccagaagatgttgctggcaatgttaggatggctttgcgcatg

SEQ ID NO: 91971 - DNA, 396 bp, Zea mays
  Clone ID: MRT4577_183875C.1
acttgttgtgttttttttgtctttttctcgagaagtacctcccaaatctcttgggttattttatttaaaacgagactacccgcaggagctttacccttaaggttacatgactaattgcactaactacagctggagctcaagacatttgtgacgacgacttccaaaacatgagatgaaaaaggcagtcatgtgtcccgtagcaaccattttgcagctgcccaagatctcttcttttctgtcccaaaactaagcaacaaacccccattgcagccacaacgatcaacattgctcaagtaaaggggcagtaaaacgggtcccctcccacgacattgcttcggagatgagacgatccgtccgatcacttggagtcctcggtggggaggtggtgtctgttgg

SEQ ID NO: 91972 - DNA, 573 bp, Zea mays
  Clone ID: MRT4577_183876C.1
accaacccaacccaggccaaggaaacaaaccccggggcctcaaaaacaaaaaaatggaaagggcaagcccaaacaccgccggaacggaaaccacaaagcgagaggcaagggacggaaagaaaaagggcagcgggagccggggaaaaaggccaggggggggaaacccacagggaggggggggaaaagcacagggggaaaaaccagcggaggcaaaacaaaaagaggcaaaatcccgcccccacacaaaaccaaaaaaaaaaaagaccccccacggaaacggaacccccacccccgggaaggggaacaccaccccaggggcccaaaaaaaaggaggcttgggaaaaacaaacccaagccttggggaacccccccccccgaaaaaggcccccccccccaggccccggttcgggaaaaagacccccccgccccggggctgggagggaaagggccacgagaagacgtcaaacgcgtcccccagggataaaggccaaagggggcccgcggacaggggcacaggggaactaaacaaagcggcccccccccaaagggggcctgccctagggggggaaaggg

SEQ ID NO: 91973 - DNA, 683 bp, Zea mays
  unsure (1)..(683): unsure at all n locations
  Clone ID: MRT4577_183877C.1
agccgagtccatccattgttggacgcgctcccctgctgctctcatgctgatgtcgtggctacgaatgcatgatggacgctactccttgataccttgcctggcctagcgctctcgcatgagctgctctggttggacttatcaccgaaaatcggatgctacatgttatgcatgactcagatacgtgatgtgcgtggattctgcattactacgggctcgaatgatcttggactgggagaaagcaacacaccgcgggctggatcctgtgatccgttagtcctgtgccttgaacgtgcatcgttgtctgtgtgtatgggagtggcctagcctccgttatggttctcgcgttctgacctccattatactgtgactatattatttaacgtcgatgctcgtcgtgtgctgtcgcgtgcgggctcatactggctgcggggcgtgttgcggagccatcatgttgccctgcgactcctgcgttcacctggatggatgctgctcttttgggctgatgcattagtacggctcatagctgcacatgctcattagaagatctatgagatgccccgtctggaagagtggacgtcagctgattattgtgagcgtatgggggcgcttaccgcagatcagacgagccgagctgcctcatgctcangagagagctttgacatgatggctgctggtcgcatcgc

SEQ ID NO: 91974 - DNA, 473 bp, Zea mays
  unsure (1)..(473): unsure at all n locations
  Clone ID: MRT4577_183878C.1
ggggcacaaaacgggaaaagggtttttttttggccctgattttaaacccaagaagggcttcctttggcccttcccaaaaaaaaccaaatggccccaaatttttttgggggggggggcccccaaaaaccaggcctttttttttttttggggggggggggggggggggggggggnnnnnttaagggcccccctcttccccaaaaaatggccccccgggggaattgaaaaaaatttggggcccaacaagggccccccggggggcggttaaggggaaaagcccccccaccccttttttttccctttaagcttgccgccccaggaattttttttaaacccccactgaattttttccaaaaaaccatttttgaaaaaaaaaaaattccccaaggtttaaacctttaaggggtggccttccccccataattgaaaatttttttttttttctgggaacccttaaccctggaaaaacctttt

SEQ ID NO: 91975 - DNA, 358 bp, Zea mays
  unsure (1)..(358): unsure at all n locations
  Clone ID: MRT4577_183879C.1
cgcgtacgcagcttggatcctagcagccggcgcgcccttnntttttttttttttttttttttttttttttgggctgaactttattttgattttataaacgcaaaaaagaaaaacagagagtttgaagagcctaaaaaggtgcggggaaaaaatgaggggaaccccacttttttaagagggggtggccatgagaaattaaaaacggggcgccacgaatcgaaacaaaatatgtcaggggtggtgtggcttatggaattcagagcggtccccggtgggagcaggggcaggctttattgcaaagaagcattttttttaacaccctggctatgggagctacatcccaagccgtgttgggggc

SEQ ID NO: 91976 - DNA, 1441 bp, Zea mays
  Clone ID: MRT4577_18387C.1
gaccaaacaaggagtaccatctaatacttacattacttagtaacacatagtattatttatatacacaaattgaattgtgcggacaatcttatggagcttacatgcacgattctcacttgagcaaagggggcacatttaaaaaggtgagcctctccttatcctctggagagctccaggagcgcccagcatttcatgagctgtacacaaaatgaaaatgaaaaatactgtacaggggtgcattccgtggcatacaaagtcacatagattctagagcttgtggttcttgcgggtatcttgacaggatgatggatccatcaacttcacgaacgtagttgtatacttggttggctgcaccaatcacgaattgacaggttcctcttgaatcagcatgtagtgtgacatcatagtactcaagatgatctgctacgctcatcccatagaccgacctgctacaggtcgggtcttcaccagaatcatcacataccgtctcgtttctggtaactacatttccatctatgctctcatgaagccatacctctctagcaaagtggtggtatgtccattcacctaggtaataataatacggtggtaaatgcggcacaatatcattctgatgggtcacacggattgttcttgggacttgttcaccaaagtatacagcaaatgcaggattgcctatccgaggctgtccaaaggtcatgagttcaacctcctgcgatccaaatttaacagatagatcaagggcacaaaacgaagctaaagcccctcccatggagtgtcccacaacatttatgggtagatttccatatgtttttcttgcccatttaatagacttcaggatctcatatcgcagagttgtattataatatgcagaataaaacccatgatggaccattgcatccggcatgcctgggtatgtcacatcaagctgcttccagaaaagatcttcgatccaatttgagacactgtgctgttgagtgcctctaaaagcaatgattatggatcgagggtcaggtgcaactccaacaaacgcctgtaagcagttctccacatctactatgatctctatgacctcaaatccctttgtgtggcctttgcaccttggacaggtccatgagaaaagtgatgtcaagtcagatgtgtacaccgcagacgcgtattcgacaagaatatgagccagagtatggttataagaatagccaccgtcactgtgcttcagcctgatcactctttcctcctcctctcccgccgccgccgccgccgcggaggttgaagcggaggccagaagcaccacgagcagcagcaccagcgtctccgtccgcctcagccaggccatcgccgtcgtcgtcgtctccctcgcccgcaccggaggagactgggtaagaagaagaagaagaagacggcggcagcgaggagcccggccggctcgaggtacccaatg

SEQ ID NO: 91977 - DNA, 203 bp, Zea mays
  Clone ID: MRT4577_183880C.1
gcgtccacgcgtgcgtccacgcgtccgtccacgcgtgcgcttcctcgctccgtcaccggcacgctgaatacccacgcgctaagtgcgctccaccaggtctaccagacgctctacggagcggcacgcgcgcgccaatggcagcgccttgaggtgctcagagggtgagggacggacgacggctctggatatagagggctttaagc

SEQ ID NO: 91978 - DNA, 828 bp, Zea mays
  unsure (1)..(828): unsure at all n locations
  Clone ID: MRT4577_183881C.1
nnnnnnnnnnnnnnnnnnnnnnnnnnnngggtttgggggtttttcaccattttttttggggacaattttttgggtgctccctagcaaaagctcggcagccttttgggtactagacaactgaatatatataacaatgcagactctaactcatggcactagttgccctacatgcgcggcatgccgcttgatcagccatgccatcccatagccacgatttgaccgcgcacgatcctaaagactaagacatgcatcaggttcctacagaaccgctcagcccaacaaactggctggcttattcagctaaggaaatgggaaaaataacggacaagtacaggattaaaacaacattctcctcctaatcctgaaccttgtccttgacattgacgatgccgatgcggtcgcagagttcccgaaacttcacgcgtccaagtggcttcgtcaacacgtccgcaagctgatcctttgtagaaatctgcttgaggacaatcctcccactctccacgcactccctgatgtagtggtattttgtgtatatatgcttgctacggtcgtggtggacaggattcttactcaaatcaatggcggacttgttgtccaccttgagctccggcgctctagactctgagccagtgaggtccctcaagagtcgagctagccagacaccttgacatgctcccagagctgaggcaatgtactcagcttcacacgacgaaagagccaccactttctgtttgcttgactgcaggtgataggactgttacctaagcagtatagaatcccgctggtgctcttccgatcatncttgttcccggcatggtcgctatcact

SEQ ID NO: 91979 - DNA, 252 bp, Zea mays
  Clone ID: MRT4577_183882C.1
ggacttctgtgattttatctcaccttctactgaagagcaatcttcacgagcagctgctgtgcaagatgtctctgatgttgtcaaacatatatggccacagtgcaaggtggaagtttttggatctttcaggacaggtctctatctaccaacaagtgatatagatgttgtgatatttgaatccagagttaagactcctcaagttggtctatatgctcttgcaaaagcattatcccagaaaggtgttgctaaaaa

SEQ ID NO: 91980 - DNA, 323 bp, Zea mays
  Clone ID: MRT4577_183883C.1
gggaaaactgggtttttaatttttggttataaccatagcacacacattcccccaaaaacatagcccaaaggaaaacacccccttcaaacttaaaacacattttggaacggggtttcccaccaatgggggggttacctaacactaaccccatggaacaggggggaacccccaaattttttaaaacaaactggcttatttcgggcttttaaaccatggggcttttaaacgacttatttcgccctggcaaactgggtgcggataaacttgggggcccaaaccattttggtcagggggggcttgacctccgggtacttgggggtttt

SEQ ID NO: 91981 - DNA, 491 bp, Zea mays
  Clone ID: MRT4577_183884C.1
cctcgaggccggccgggccgggattacattctttgcagtatcaccgccagagctagcctcatttatcatggcatccttcatcagctgtccgtcaatctattctgtggctacatgtggtaaagccatggatgatcttcgatcgcagggtggtcatgcctgaaagcctacagcgcagagggcaacctagcatctttggcagagtcttgtatgtctccttcaattgattatgcgtatactacagcttgtcctgaactcatgtactgttgtcaacttctatattactaaagagtaatgaactgattatcacttctttgaaactcattatattgtctattgttgttttgtccctatgtgtgattgtaatagagacttgtggtattgagagattaaagcccaaaagttatcttattaaaacttttcggtgatatcgctaagaaaattaaaatgatgagtaaaaaaaaaaaaagaaaaaaaaaaaaaaaaaagcggcc

SEQ ID NO: 91982 - DNA, 269 bp, Zea mays
  Clone ID: MRT4577_183885C.1
cacgcccgcaggcaccggaccggaatattcggggcgacggggcgtccggcctttcagaaccccgctgcttattcgcagcagcaaatactactaccatgcagccagctagctgcagcaagcctgtgctttcttgttgacacagcaacagtagctgactacctaccagcaagatagcaggctaaccttttttttctccgagggtgcacaaacagacgccgcagggacaaccagaacggacaaaccccacaacccccgaccaacaacacaaa

SEQ ID NO: 91983 - DNA, 388 bp, Zea mays
  Clone ID: MRT4577_183886C.1
gggccccctattttttttccttttattaccggaaaaaactgaatttacacccaaaattacaaacaccatttttgaggcatcactaccagcttggggcccgggcatatgttgcattcagggagtctatgatttcagggctttaaaacatttggacccccgggttaggaactttaaaggacggggcccggaaaaaccccttttttttgaaaaaatcttggcgtttggggctgccccccgcccccctgggtaacaaaaggggcaattccaactcgacaaggggtttttgttctaatttacaaaagggggatccctcatatgcccaaatttttatgggctgggatgggacctttgaaacaaaggaggaatttccctttccaaaaccaccaaa

SEQ ID NO: 91984 - DNA, 311 bp, Zea mays
  Clone ID: MRT4577_183887C.1
catcctttccatccgccgtgcatggcaaacatggcagctgttgcatcacttgtgacgccagtcattatcaacgaggatgaggaggacaatctggacaccgctagtaggcaacaacccataggccagaacctcaatgggtttgacgagtgccattatacacaccccaggatccaccgtatcccactaaagcatgtttggcagtttatgttggaaggatccgacatacacctcaacaaggaggccggattcaatgcttaggcaaacgagaggccactgctcaaaactcaaacccttgtattggatatgctgct

SEQ ID NO: 91985 - DNA, 456 bp, Zea mays
  Clone ID: MRT4577_183888C.1
cgttgcgatgagacgctgctgcggcggcggcgaggagtgcatccctcggcgatgagcagaatcaccaccggatcttaatctcccttgcctcgtttgcggcgagcctgcgctgtcggcggcggcgcaccccctccccttcccccggcgcttccgtctgctggctggactcagttcttccaactcggcccttaacaagagaacgacgaccatgccgatgcgtggcgtcgatttcaagtggtatgatgggttcttcctctccatgctcgccactagcgtgtatcctacttcacccgataagacctttaccaacttcgtccaatccaatttgttatgtgtgcacctatattattttgttgctaaatgctattccttaataatcgtctgatgcatgattagaattatcgtttccattaattggaagaggtatcgcctgtgtgcccacccgctccacatttg

SEQ ID NO: 91986 - DNA, 1864 bp, Zea mays
  Clone ID: MRT4577_183889C.1
ccgctcggttcgcggttcggcctgtgttgccttgcgacttgcgactgggcggccgggtgcccgagtcggtgcggccgtgcaggagcgtttgctgtctccgtttccgtcccgttccctttcgtggactgttttggaaggcgttgcgatgagacgctgcggcggcggcggcgaggagtgcatccctcggcgatgagcagaatcaccaccggatcttaatctcccttgcctcgtttgcggcgagcctgcgctgtcggcggcggcgcaccccctccccttcccccggcgcttccgtctgctggctggactcagttcttccaactcggcccttaacaagagaacgacgaccatgccgatgcgtggcgtcgatttcaagtggtatgatgggttcttcctctccatgctcgccactagcgtaattatcgtttccattaattggaagaggtatcgcctgtgtgcccacccgctccacatttggatagtggtggactacaccactgtcttcattgactgtatccttatgatcaaaataatgataactgtgccatttatgatttatcttggtgcatgggactttcttgacacctgttttcctaccataatttttgctaccttatggttgtcattctcatactgatgttttaggtttctaagctttgtcttgtttgtttgttccacaaccaatgactaactgaactttgcaaaagtatggctgtcagtttattctattatgtatcttcttttttgaaaaaaattagctcgctgcaggaatgttagatctcggatggcaacagagatatgctcgtttttgtggaagaataattgtcctctcagttcttgtgctacttctctacccctttctctgggtttggactgtgattggaacattgtggtttagcactgcaagaggctgcttgccagaggaaggacaaaagtggggcttcttgatatggctgcttttcagttactgtgggctcgcctgtattgcttgtgtagctattgggaagtggttacaccgaagacatgcacttcaacagagagcacaacaaggaattccagtctctgaacatggggttttagttgatatgatccgtgttcctgactgggcatttgaggctgttggcctggaaatgagagtgggtcaagatactgcatatcatcctggtctttatttaactgatgctcagagagaagcagttgaggcactgattcaagagcttccaaaattcaggctgaaagctgttccaacggactgcagtgaatgccccatctgccttgaagaatttcatgttggcaatgaggtccgtgggctcccatgcgcgcacaatttccatgtggagtgcatcgaccagtggcttcggctgaatgtcaagtgcccacggtgccggtgctccgtcttccccaacctggacctgagtgcgttgaacaatcttcggtcgaccagcgagccggaccatccatccgccagcgccagcaatgtaacgacggcaactgcagcgacgagatacgtgaggtcgcagccggcaggtcaaagctatttggtgcggttgcaggggctgctgctccgccctgtccggcacgatagcgtggagagtgacggtgagccggcggtgggcaacagtcgcttggttggcaccgaagagctgcctagcatacttgtagacgatggccatcagctgccagatcgctgactgatttgatgacctgatggatccagcatacttgtcagcataatttaggatacttgtcagcttttcttttacagttttcttttgcaaatgaaatgcgagttttgttgaaaaaaaattttttaactgaacactgaaataagcaaataaaattatttgcgtcgaaaaaaaaaaaaaaa

SEQ ID NO: 91987 - DNA, 389 bp, Zea mays
  unsure (1)..(389): unsure at all n locations
  Clone ID: MRT4577_18388C.1
cccacgcgtccgcttatccatgtttgaaaccaagcaaccagcacnctagtagtcactagggggctatttatacaaaaaatgatgccacaaacctccccagcacgaacaacacgtctgccaatcgtgtgcctaacatcaatagctcaaacaaaagttcggtgctaaggcgatatcaaacatcttacagagatttaggatacaacactgacacttgctgaaccagtcgctatactactgcaaccgcaccattagatgagagcccgtcgaaagacacctctcacagatatgagtacagatggagcatatctcatatccacgactgcacctacaaacatatagatgacacccaagtgccatgcattaattatgacatacacaatgtcctgcaa

SEQ ID NO: 91988 - DNA, 284 bp, Zea mays
  Clone ID: MRT4577_183890C.1
acgacccaaaccctagccatctccactcgtactgacaccgtcatggcctagaggcatgggtggtttccggcaccgtatacgacgtccgggcgccatcttcgttgccaccgatgctcgacgaagaggccgatgccatcgcgaaggacgaagcctcggtggtcgagaagatgtagtccgtatggcccggggacatcagagttcctgctggtggtgcctgtgctcataggcagaagcataatccggcgcatgggctagctcattattcgcctcgtagaggagaccaa

SEQ ID NO: 91989 - DNA, 816 bp, Zea mays
  Clone ID: MRT4577_183891C.1
tccgccccgcgtccgccccgcgtccgcggccggccgggcgcccggagtcacaagtcacaactcacaagctagcgatcttcctcgtgcaatcgaagcgagttctcagagctgtctacggaactctgaagctcaacgcagcgttcgcttctgaattcgacccgaagcacagcctcgctcaaggcaataaaagccggtgttactgttgccgcgccatggagccggagatggaggcggcgctgatcaaggtcgggatgttcgtgctggtgcaggcactggtgtacctcatcctgtcgcagtcctccaccgtgttctcgcgcaccaagagccttgccctccgccccgcgcggtcgctcagcgcgcgccgcatgctcgcgctgctctccgacctgccgctcgtcgccggggagccctcgcccgtcgccgccttcgcccggacgcggtccgcgttgtcgcccatgctcgccgccgccggccggaagcaggactgagttcggcgaccgtcgtgtggccacttagctataagctagctcttcctcggtagtacagtattctttaattctttggtttgatcgatccatgtgtgtcggtttggtttggtttggtttggttgtattcaagtatagcttccaaatttcatggaagtttgatttgcgcatcttgtgctgagcctgtacctgcatcatcgcagactattcaaatcgtttttatacgctgtggacatttgttaaggatatctcgtcaaatatgtaacttcgacagtatgctgaatgtgactactcggtgctgatacgatatgatgtaaaaaagtccacaaaa

SEQ ID NO: 91990 - DNA, 418 bp, Zea mays
  Clone ID: MRT4577_183892C.1
cttcccttggggggagggccaactggtttgttttaaaacggggccaaccctaaaaaaaaaccaatttgggggagcggccaacggtttaaaaaaaaaaagggttctaggggttgatttgatgaccagggaaaggggctaaatctttgggggaaaaaaccctttgtttttaaaaattgaatgggagggggttccctctcctagggatcccccctatttccgggggcatcaacccaaaaaaaattggggggggaaaatccagttttttgggcagttggggcaaccccccccccaaaaaaaaaaaaaaaaaaacctgtccccgggtttattggccccgcctgaatttttaccagggtttttagttttgattcccgtctcacaccctttatggggggcccccaggtaaaccaccccccctccc

SEQ ID NO: 91991 - DNA, 585 bp, Zea mays
  Clone ID: MRT4577_183893C.1
attcctcgaataggcagatgcctcgtcgcctccattcagcactctggacattgcccatgccccacacctcgcacattgtcgagaaaacactgacacgtaagaccatcgcccactaggcatggagcactctgcaccatcgaccatgacaaggaccccttatctacacaatggagggattccgaccagaccgtgatcgacagatctttgacggaaagtagctgaaatgatgaacggacccttgcagaatataagatcgatcagagaactacacttctcctcgtgactataggctccaccatggaaatagttatgcctcactgtaagagctcgctcgacatactgcaccagcattaaaggatctgcagaacatgatatgctcgactgcatgctaagtgtgacctctgacgctgaatgaactgtgcttactaattgcactcctgaagtgcaggaataagatgctgaactgacgtgcgtgcgtcctagacacgtgcatgtgactctgcttgcgtgcattcgctgtgtggaagatgaagacgtgctgcttgtacacaacatgtatgccttccgtcatgatacaccttggtg

SEQ ID NO: 91992 - DNA, 761 bp, Zea mays
  Clone ID: MRT4577_183894C.1
ttcggacgcgtgggcggccgcgtgggggggtttttgagttttgacaatcagaacaatagcctccaccgtccaccctcacgcaactgcctcttcgcggcggcgcaaaacaccaacacgtcttctctctccggttgcgaggagggtataggatttcgccgcggcgagatgtcggcgtacgacgaggtggagatcgaggacatggagtggaacgcggagctgaaggcgtacacgtacccgtgcccctgcggcgacctcttccagatcacgctcgacgacctccgcatcggggaggagattgcgcgctgcccgtcgtgttctctcttcctcaccgtcgtttacaacgccgaggactttgctgacgccaaggagccgacccacaagccgtccccgagcccagtcgccgtcgcctgatgtggcccgtgcccggcgagatggacgcatggaaatggatctcagagcaggataacgaatgagtttttgtttggcacacaccactacgggagcatttgtactactcttagatgagtcaacccactgcatattttcagagctcaggttgttgaactatcttttttttgtgcttgacattgtaaggtgacatggacagaacatgctatgaaaaaatttgtttagtcactacttatcgttgatcgttgtcttaccaagtttgagacccgatcgatcttcggtgaatattcatcattgggtcgtgcagaaattctctgcatgaatccaaaaaaaaaaaaaaaaaatttgcggcc

SEQ ID NO: 91993 - DNA, 245 bp, Zea mays
  Clone ID: MRT4577_183895C.1
gggtatctggtgaactttattgctttattacatttatatatatatatatatatatatatatatatataaatacactcacacttacatcttacaagttgaccactcttacccccctaccacttacaaaatattaatcaatacacgcttatgtttatacaaaaataagacataacaataaatcggctgcctttccctccgtctttagcctccttcccatttccattaagcgacaaccacaatctcct

SEQ ID NO: 91994 - DNA, 439 bp, Zea mays
  Clone ID: MRT4577_183896C.1
tggattttgtggaccaatagaccacccaaaaaatagacatgcatcgtcggtagtactcactttttcatagccatagatggtaatggtatacatcgatctggattgtttccaagtcgaagtcgaacaccatggcaacatgcattatcaccaaatcaccacatggcctggggccctcgtcaaagtgtagccttcaaccaaaatgcaggattaaggagcttctccgtcatggatcgcgatctcttggagattcttgccgtgatacaaatgcagctgccaagagaaagagatcggtatgccatatcaaaacggtggccttataccaccgctccaggtgccgaagttctctccgggcaactcgtagccagccgcgttccctccaagatcatacagtgacatgccatgaccaatgccgccgacatcgccacccgtcactccagaa

SEQ ID NO: 91995 - DNA, 389 bp, Zea mays
  Clone ID: MRT4577_183897C.1
gagagcggttctttctttctttctttttctaaccattaattttctatttttttttattactttttgctacctttgatcaaccaaggaaaatctgggaaacctacctccctaatatgggggccccaatactttccaaaaaaccgggggggggggggaccctaataatcaatttaaaaaagggccccccccatgaagggttgttggtaagaggctccttggtttaccaaaacaagttggacaaaagccaacaattcgtactaatccaaaaggggtacggggttaaccccaaactgctaccaaaaaggcagcaactgtgggtggggcaaaaaggaaaccctgattcatcaacataacctgccaaatgaccagaaaattgggggttacaaaaa

SEQ ID NO: 91996 - DNA, 416 bp, Zea mays
  Clone ID: MRT4577_183898C.1
ccgacccactcgacccacacaagtgatcgtactttatgtgcccttttattttgtgccaccaaatggaccaaacgtgacgactctatataatctgacagatgctgaaggaacaattaccattcagccatctagctcctgactacccccattaattacttccattcaaccaactagcaacattgaactctgctgattatttacagcagcaacatctactaccattcactcaactatctgatgtgagccctgctgccttcttgacacaacaacactatttgccgttctacctgcacactatgcctaacgctgacaccctcttacaactgcaacaatttcttccattcaacccactttctattacaaacccaacagtcatctactcaacaacccatcattgctggagcactctcttacat

SEQ ID NO: 91997 - DNA, 262 bp, Zea mays
  Clone ID: MRT4577_183899C.1
gggccttaaaaccacccctgcgctgggggggggaattttttcgggccaaaaccctttccaaaaccaaagggttcccccttttttcgtcccaaacttaagggggggccccttttttttggcttgcccctggttttaaaaaccaaatcgccccagccgatgcttttcccgagtttttcaattgtaaccgggtgcaagtgttccccggccccctggtttaagggtgggttgccacaccacagaactttccggggccaacagggtt

SEQ ID NO: 91998 - DNA, 866 bp, Zea mays
  Clone ID: MRT4577_18389C.1
gcgggggctgggtaacacaagtacacaccacaaacacccatctcctccgcctctgctcccttctgctcacccgcacgatggcgccggaggcgcgaggtgaggcggcgctggtgtacagagacgcattggcgccagtggaggaaagggtgcgagacctgctgggccgcatgacgctgcgtgagaaggcagcgcagatggcccagatcgagcgcaccgtcgcgacgccgcgaaccctcacggagctcggggctggcagcgttctcaacgccgggggaagcacgccctgcgagcaagcctcccccgccgactgggccgccatggtcgacggcttccagcgccttgcgatctcctcccgcctcggcgtccccatcctctacggcactgacgccatccacggccacaacaacgtctacggcgccaccgttttcccccacaacgtcggtctcggcgcctgcagggacggagagctcgcgcgtaggatcggcgaggcgacggcgctcgaggttcgcgccactggcatccactggacctttgcgccgtgcgtcgccgtctgtcgggatcctaggtggggcagatgctacgaaagctacagcgaggacccagagatcgtgcgctcgttgaccaccatcgtcagcggtttgcaggggcagccgccagcagaccatcctcatggttaccccttcctcgcttcgcctagggagaatgtacttgcttgtgctaagcatttcgtaggggatggcggcacggacaagggggtcaatgaggggaacgccatttgctcctatgagggattggaagcaatccatatgacaccttacccggattgtatagctcaggggtgggcacagtaatggcgtcctactcta

SEQ ID NO: 91999 - DNA, 237 bp, Zea mays
  Clone ID: MRT4577_1838C.1
tattgtgtttttttaatttagagcttccaattaataatttttttttccgggcaaattccattggggagctcaccacagaacgtgcggtacttgggtctattaagcgccaggttcaaaaaaaaaaaaataaaccccgacatactggtggaggcaccgccgtgaaaaaaaatcccggctcatatcaaaactcactaactgtgaagttgcgatatttaacatacgagctgtcaaatgaac

SEQ ID NO: 92000 - DNA, 593 bp, Zea mays
  Clone ID: MRT4577_183900C.1
ttcagcagacattccaaggtcaagtcagtcttgagattaactacaacctcttatccacctcttcgattatattctccataaaaacaaaactaaaaactaatctgacgatgctcatcatccgccgcaggaacctgctcaaacccttatccctcgacctctgcaacccctttgatggcttccccttcagtacggacatcatacttcttcccctgaaccgccgacagcttgacagcgagatcttcgctctcaagccaatccaccgtgaggagaatgcacacgcgcatgtggacaacaccgacggatgggtgctaactgaggacgacttcaaggcggatgtcgaggaccatgacgcacctcaataagagaccagcgtgacaaggagtagtaggaaaagaccaacaccagaaaacgctggtagtaaagccgcgattaggtgacatgcgaaatactctcgactgtccaacaacgtcgagacgtagcagatcaggtgcgccatgtacaacggcgtgcgtacagtcactgagcccaacagagagacttacaagagagcatgaagagaagcccattcagatctccccctagacctcattctg

SEQ ID NO: 92001 - DNA, 199 bp, Zea mays
  Clone ID: MRT4577_183901C.1
cggccgggaatttcccaatcgccttcaacccccacacccaggccgccgcaaacccctgcatttccgccgcatttccctcgctgtcccagatcaccggtacgacgggtgcagaggctcgcggctcctgtgttcctggggcctggaagggacggcgaaggatgcaggccgcgaccagtagcgtgtcttgcataggcgcgca

SEQ ID NO: 92002 - DNA, 404 bp, Zea mays
  Clone ID: MRT4577_183902C.1
gaaaaacacatacttagcccatgcagtcttttatacatccttggattggaattgcaagacacttccaacaagagtggatacatactcaacacatacaatctttaactttaataaattaataaagcaatctgcaaatactcaaagttctcatgggactgcataaataaaacatatagtaattagagccaaatcctctcttagtctattatcatggtcttataccgtgtcttggcaactcttctaggataaaaggggtaaaaattggttataactgcatattcaactccagaggggccactcctgcaggtttaagcatcctccaactttggttcaagttcatcagagagatggtttggctctactgacaaagagcttcctattttcctcttccaggttagcactac

SEQ ID NO: 92003 - DNA, 984 bp, Zea mays
  Clone ID: MRT4577_183904C.1
gtccaccgcaaccattcggcttctcccaaatcccggcacggcggcacgggacctctccctctctctcccgctggcgggcgatggcctcctcctcctcttcctcacctgcgcccgccttggccggggaggcgctacgccagaaacgcatcctctccagcaagctctacctcgaggtcccgtcctccaaggcgccggtggtttactcgccggcatacgacatctccttcctcgggcttgagaagctgcacccgtttgaatccgccaaatggggccgcatctgtaggtacctcaccagggaagggtacctcgacaagaaacggatggtggagccattggaagcctgcaaggaggatttgctagtggtgcacacggaggcgtatttgaacagtctcaaatgcagcttcagagtttcctccattgtagaggtccctcctgtgtcgcttgtccctaattggattgtgcacagaaagctactacaccccttccggaagcaggtgggtgggtccattttatcagccaaacttgcatttgagagaggttgggctattaatgttggtggaggatttcaccattgttcggcagatgaagggggtggattttgtgcatacgctgacatctccctctgcatccattttgcttttgtccgtctaaatatctcaagtgtattgatcatagacctggatgcccaccaaggaaatggacacgaaaaagattttgctaatgatgcatttagatgatgtaattgttcacagatcgaaattgaaaaacagcagtttttttctcgaacgaagctggagagatacgtgtctttgcatatagaagagaaaaaatagtacaaggagagatcaaaagacctctccaagagaaaaacagcagttccatccaactgttatactgcaatgaattccgacggtctcatgctatcagttttgtaacagtccacattaatatgatgtagacaccaaaataaaggacgggttttgt

SEQ ID NO: 92004 - DNA, 305 bp, Zea mays
  unsure (1)..(305): unsure at all n locations
  Clone ID: MRT4577_183905C.1
ggttggcttacccgcnccgggacattgtatagcaaagagagggctttatccccccaacttacatgttaaaaccatcaaaagtttctgtagccgcagcagccaagaccatgcacatcgcaggccatggcgtcgcagctgcgggaacacaacaacattcacatgaactttagctactggtacagggcaacgctcagcagagcggcaggggctcgccgttccactccttgaggcactcgagcagcgggacgatgtgcttgcgctggttgatggccacgagcacctgggtgagctccccgccgggcgac

SEQ ID NO: 92005 - DNA, 390 bp, Zea mays
  unsure (1)..(390): unsure at all n locations
  Clone ID: MRT4577_183906C.1
ttagtttcgggcccaaagaggccaaacctttcccctggggttggggtgggtttgaaactgggggcacctaaagacacccggttggcctaacgttaaagggggctttgggttgggggcaggttaaagcccttgttaaggggataccaactaaaattgggttggttttgggatgtacctgtancgaataaggttatttaagggttgctaaaagggtttgggggggggttggcaaaaaggttaaggttaaggccggcccccggttttggggccccgggatttttaaggtttttattctccaattgtggcctcgaaaaaagttttgggggggcccctaccttaatggggccgaggttagaagttaaggaaccctttttatgagttggtgggccg

SEQ ID NO: 92006 - DNA, 219 bp, Zea mays
  Clone ID: MRT4577_183907C.1
acgccctcactaccgcccacgcgaccgcccacgcggccgcccacgctttcgggaccaatgacaaggacaagggcggcgatgtccccaaccaagaagctaccttcagccagcaagctatggagaagctccggattcaaccaaaaggagataaatcatctatctgactgtgacggactcgaatgacatttgcatgcgtccgctacttacgcgaatgacgtg

SEQ ID NO: 92007 - DNA, 476 bp, Zea mays
  Clone ID: MRT4577_183908C.1
ctctctcacttcactttataacttgagttggggagctgggacaggaccagatcgcatataggttacgtatcataaaagcatagacatgccctgcccattcaagttaactccacgactaacgtacataccttacgcacagctccaagacttgactagagcatagcatacacctcacagagacgaatcttgtaccagcccaaccctatcccttgatttaaaacccaaccctatccacactactcttttctttaccccaagcaccgagctgatcaagtcaacaagcgcggcgctgggttggccatcccttgcctgggcgtcgatctgaacgcccaccgcctcgtccccaatctatgtgatgggggcgaccttacatccgagcttggcttgtatagatatgatcacggcacacggcagcatcaggtgaaggcaagcaaggaaccgtacagttcaggtactcgactccgcggcgggcgggg

SEQ ID NO: 92008 - DNA, 868 bp, Zea mays
  Clone ID: MRT4577_183909C.1
ctgtgctgggctcgtgccggccgggccgggctctcctcccctcttctcactcagctcaccagtgctcgctcacctttcccctccctttcctttcctttgctttcctatcctcgtgccctcgaatcggaaacccagccagccatgtcgtactacggcgaccggcgcgcggagtcgtcgatcgtggaggcgttcacgctgtcgccgctgccgtacccggtgatcctggtgctgctgatggtgacgctgctgctgggcgcctcgtggttcttcacgtacgacgacttcatcgaggaggcgtcgcagcagctgagctgggcgctgctgggcgtgcccatcgcgctcgtcctcctcatccgctggatctcctccgtcgactccttcgagggctacctgggcttctacccgacggagagccgctggaagggccgctacgagcggggccccgccgagggcagctcgccctggggcgtcgccttgctcgtcctcctcctcctcgtgctcgccagcttccactccaccatccacgacatgtggggcccgtgaacggatgtagtgattgtagtcctgctcctgttcggttccacgcgcgcacgtatgcgcttgtgctactggttgctgcttgatcgatcgatggatcgatgattccatgtacatatttgttagggggatgctgcggctaggctattagctgcaggctatagagtttgagggtgatatacttatcagtttgctgcctgtaagactggttttggttttgctataatcgtgatatattccgatgtacagcatacagaaaaatccttttgctttgttttcccttgccttgcaattgaatggtggaatgagacccgcctcatcctttgtctcc

SEQ ID NO: 92009 - DNA, 858 bp, Zea mays
  Clone ID: MRT4577_18390C.1
attgggacctcgagccggccgggaaaaaaaaaatatgcctcccctgcaatgcaagtacgacagcacaccgagccagcagacaggcacgagcaccagcagcagagggcaagaggaagcccaaacaacgtagtacgggcgaacagcaagtacagtacgcacgcacgcaactttccatggctccctcccgcctacgccgccgcacggcggcggcgttcgtcttcgccgcgctcctcgtcctcgcgtccatgccgcagctgctgcaagcggccaggacgacgccgagcgatggccgccacggacgtgtacagcagcagcatcagcaggaggaggaggcgcgtgccgcggcgacgacgacgacaacaacgagtagcagcaggggctgttgtgccgggtccacacctgcgccagcgtcgtcgtcggtgcaagaaaggccgcacccgctcgcactgctgctgccgccaccgccgccgccgccgccgctcaccaccaccaccaccaccgttgaggaggaggcatcgtcgtcgtcgtctccccgcagccggatgctcggctcggtgcccagccccggcgtcggccactagtagcgcgctactctcctgcctgcgcacccgcacctccacgccccgcccgcgcgcgcggggggccatatgttccatcatcgcctcgccgccacctcctcgcccgatcttgttccacacagacatactgtttgtcgatttgctgacggcgcattctggttgatcccgatgtggcgtggaacgctgcgaaaaaaaaagttcaagcttgtcgacgtttcacgtgggttccccttttgacttcccatccagctgaaaacgaaacgatatatatatacccctg

SEQ ID NO: 92010 - DNA, 850 bp, Zea mays
  unsure (1)..(850): unsure at all n locations
  Clone ID: MRT4577_183910C.1
ctataggggaaagctggtactgcctgcaggtcggcggtccggaattcccgggtcgacccacgcgtccgcttcaatggggaattctgggctgtgtatgcactccaccagtttattggaaatcttataacatttgctctactgagtgatgatcagcaggagggaagtaccaagggcacaactttattgtttattgtattccttttcattatgacctttggtgcaatactaatgtgcttcttgcgcaaacggagtgctaatagcaagggacaacaagagctttcaggtgcagatgctggcgcatgtgcgtccttgaagtctctatccaaatcacttgccagtgcattgtctgatgtaaagatgttgttgatcataccccttattgcatattcaggtctacaacaagcatttgtgtgggctgaattcacaaagtatgttgtaactcctgcaattggtatttctggtgtgggtagttcaatggcagcgtacggggcttttgatggaatatgttctctgcttgctggtcgtctcacctctggtctcacatctattacaacaatagtttctgtaggacttttcgctcaggcagtcgtattagtcttacttctgctaaatttcagcataagtagcggatttcttggtactgtttacatactcttcttggctggtttattgggcatcggtgatggagttctaatgacacaacttaatgcactgatcggaatactatttaagcatgacacggaaggggcttttgctcagctaaagatatggcaatgcgctacaattgctatcgtgttctttttcgcccgcttatctcgttcaaagccgngcttgtgattatgcttgctct

SEQ ID NO: 92011 - DNA, 809 bp, Zea mays
  Clone ID: MRT4577_183911C.1
cggccgggctcctctcctcccctcttctcatcaggcaggcactcagctcaccagtgctcgctcacctttccccttcctttcctatcctatccttgtgcagttgtgccctcgaactcgaatcggaaacccagccagccatgtcgtactacggcgaccggcgcgcggagtcgtcgatcgtggaggcgttcacgctgtcgccgctgccgtacccggtgatcctggtgctgctgatggtgacgctgctgctgggcgcctcgtggttcttcacgtacgacgacttcatcgaggaggcgtcgcagcagctgagctgggcgctgctgggcgtgcccatcgcgctcgtcctcctcatccgctggatctcctccgtcgactccttcgagggctacctgggcttctacccgacggagagccgctggaagggccgctacgagcggggccccgccgagggcagctcgccctggggcgtcgccttgctcgtcctcctcctcctcgtgctcgccagcttccactccaccatccacgacatgtggggcccgtgaacggatgtagtgattgtagtcctgctcctgttcggttccacgcgcgcacgtatgcgcttgtgctactggttgctgcttgatcgatcgatggatcgatgattccatgtacatatttgttagggggatgctgcggctaggctattagctgcaggctatagagtttgagggtgatatacttatcagtttgctgcctgtaagaactggttttggttttgctataatcgtgatatattccgatggtcagtataaagttccttctttgctttgggt

SEQ ID NO: 92012 - DNA, 346 bp, Zea mays
  Clone ID: MRT4577_183912C.1
tgtttttttttgacattactgactggaagagcctactgggagatcatggggtatctcagaatgaatacatagatgcagttgcctatgtagatagcatctggaaataccgacgctgaaagtaaggtagtactttcaccaaaagcttctcctgatgtattgtcttggcaatctaatggaagctccatttcctgaacatcatgtagctgcaattccattttctgatagtcatgttcgggtttacattgtatttaagattcttcaatactggaacaccaaacgattggctgtggtctcacaagtgggcaacacatgacttgcaggacgaagtgtggctgtatcttgttag

SEQ ID NO: 92013 - DNA, 789 bp, Zea mays
  Clone ID: MRT4577_183913C.1
ctcaatcaggcaggcactcagctcaccagtgctcgctcacctttccccttcctttcgcgtcctatccttgtgcagttgtgccctcgaatcgggaacccagccatgtcgtactacggcgaccggcgcgcggagtcgtcgatcgtggaggcgttcacgctgtcgccgctgccgtacccggtgatcctggtgctgctgatggtgacgctgctgctgggcgcctcgtggttcttcacgtacgacgacttcatcgaggaggcgtcgcagcagctgagctgggcgctgctgggcgtgcccatcgcgctcgtcctcctcatccgctggatctcctccgtcgactccttcgagggctacctgggcttctacccgagggagagccgctggaagggccgctacgagcggggccccgccgagggcagctcgccctggggcgtcgccttgctcgtcctcctcctcctcgtgctcgccagcttccactccaccatccacgacatgtgggggccgtgaacggccggatgtgggtcctgctcctgttcggttccacggatgtgcgcttgtgctacttgttgctgcttgatggatcgatgattccatgtacatatttgttagggggatgctgctgctagctaggctattagctgcaggctatagagtttgagggtgatatacttatcagtttgctgcctgtaagactggttttggttttgctataatcgtgatgtattcagatgtacagtaccctctttgctttggtttccctgtctgtcttggaattgactgctggaaccgtct

SEQ ID NO: 92014 - DNA, 1156 bp, Zea mays
  unsure (1)..(1156): unsure at all n locations
  Clone ID: MRT4577_183914C.1
gttacacgcgccctcgtccccgctccaccccacctgccccatatccccctccccccgtctcctctctcacttcgcccgtcctcactcgcacctgcgcatcttctccccgccgcagccatcccgaccttgggcggccgcggcggaacgccggccagcgacggttccgcccggccttcggcccggcgcggcatcgtttttcttgaaccccccggcggggctctcctcccctcttctcactcagctcaccagtgctcgctcacctttcccctccctttcctttcctttgctttcctatccttgtgccctcgaactcgaatcggaaacccagccagccatgtcgtactacggcgaccggcgcgcggagtcgtcgatcgtggaggcgttcacgctgtcgccgctgccgtacccggtgatcctggtgctgctgatggtgacgctgctgctgggcgcctcgtggttcttcacgtacgacgacttcatcgaggaggcgtcgcagcagctgagctgggcgctgctgggcgtgcccatcgcgctcgtcctcctcatccgctggatctcctccgtcgactccttcgagggctacctgggcttctacccgagggagagccgctggaagggccgctacgagcggggccccgccgagggcagctcgccctggggcgtcgccttgctcgtcctcctcctcctcgtgctcgccagcttccactccaccatccacgacatgtgggggccgtgaacggccggatgtgggtcctgctcctgttcgattccacgcgcgcacgtatgcgattgtactgctggttgctgcttgatcgatcgatggatcgatgattccatgtacatatttgatagggggatgctgctgctaggctattagctgcaggctatagagtttgagggtgatatacttatcagtttgctgcctgtaagactggttttggttttgctataatcgtgatgtattcagatgtacagtacaaaaaaaaaaaaaatatctccgctcccctctcctctcgcttgtcccattccaagncccctctncacgtgtggcgcccccgcnntctnctttataaatccnnnnnacnnttcccnccctctcaccgggctcccctgtccttacccattgcgatnncttttcaattaatncaaaatataa

SEQ ID NO: 92015 - DNA, 371 bp, Zea mays
  Clone ID: MRT4577_183915C.1
cttactcgtccgcggacgcgtggtctccgggggagtcatcagtcgtgcgtgccggtgcccaccccgttctgacccgctcccctacctcaactccctcactcttgctattacgatccattcaagatccctgcaggcgtacgtccatccatccattcatccgttaagaggagaggggaggccgtccggtcgtccggtggagctgcaataagggggcagacagagacagagcacggggcgaggactgtgaccgctttgcgttacagtgagaggccttggtggtcctggaaacaacacattcagtaagccctgcgcaggaagtgctgacggactccaagagggtcactgattccaacttgcacaagagcaggtga

SEQ ID NO: 92016 - DNA, 295 bp, Zea mays
  Clone ID: MRT4577_183916C.1
ttttgtctttttttctttttttttttttttttttttttttttttttaaaccaaagaaactgcccagttcatacggggcaaacagagggggctgaaccacatttcggggggaatcccccccatagcgttttttttttatccccagggtccctcccttggttccccaaaacgtggggttttccccccccaaaaggggggctcggagctccttaaaacaaacaacttgggatacccgcgggccccccccccggggggggggggtagggtccccccaaaaaacggggccggacagcctg

SEQ ID NO: 92017 - DNA, 215 bp, Zea mays
  Clone ID: MRT4577_183917C.1
tgcatatcggcatgccggcatcatgtttctatgtgctgtccgacggcggcctttgttgattctcacaatcggctcatcacttaaactaaggcggtcgtcgtgatgctttcaacccttgctttgtactatgttaattgtggagtgttaattgatgatgcatcatgcatgcattcttacttgtgatactttaagtctatttattattttgattctat

SEQ ID NO: 92018 - DNA, 288 bp, Zea mays
  Clone ID: MRT4577_183918C.1
acctttttctccattgtttccagaaaaatctccgcgcataataattctccagagcagacgctacaacactagatcgtccgcacgacactcccgcagttcctcgacagggggggtttccattccaggcggatgcggctggcggcggagatgagccgggggagcaagctccggtggctgtggcgcgcgccggcgcggacgctggggcgggcgcgggacctgtacgtgcgggggctgactgggtgggcgcgccacgttccttccgaccccgcgttcgggtaccccgtgttc

SEQ ID NO: 92019 - DNA, 405 bp, Zea mays
  Clone ID: MRT4577_183919C.1
gcggggcaacatcaagctactcccagatcaaccaggtacgctgtggcctacccttcactacctactttccatacacaccaacttggctatgcattgaacctatccggctatatctgcagcctcgacttgctactaccacttcagccggatgtgccggcgtgagccctgctaccttcatgacccaaccactggtgccgtcgtactaccatgacgctgctcctaacgccggcaccctcttacgacagctacaattgctgccattcaaccaacttgctttgacaaacctagcagtgttctaccaacaacccatcattgctggtgccctcttttagatttcttatgagttatagttcaataataaagttttttgtctgatgtttgaggcttcccagaaatatgaagagt

SEQ ID NO: 92020 - DNA, 161 bp, Zea mays
  Clone ID: MRT4577_18391C.1
agaaaaagcacacaaagtgcgccaagggcacggtttaaaaataacatgggggagattttgcgacgacattaacccacccagttgctagcatattatacattatggctttgcacttgcgtctaatgacccctttaaaaaaacccttggtctaggctggtttt

SEQ ID NO: 92021 - DNA, 319 bp, Zea mays
  Clone ID: MRT4577_183920C.1
ttttctcttgcggagaagaggttactacgaaacgcgcggtgggactgttcgggcgtagaaaagaaggagggtcagaaagtatcagtttaacaatgaagggctgcatggagcctgggctttatagactgagctggaagctgctaaaatatagtatctgttgtttcccacaagactttctgtggaaccagacatcatcttcaataacatggaatatgtcagattgtctataactcaggacttgtacgactacacattcattgagcttctaatagtcacccactacgaatgctgggatacgtactggaccaggtctcacacg

SEQ ID NO: 92022 - DNA, 1441 bp, Zea mays
  Clone ID: MRT4577_183921C.1
atggtgcggatcattgagcaccgcgccgagacttcggttgactttgcggtggagggagaagctgcttcctccacaccgcaggttcccagtcgcctagcaccagtcactcctgctgtgcacgccgcacgacagcacacgatagcgcaaacgtcccggactccatcaagggcgtctccgggggcgttgtcagcagccagggagttgttgcgacaccctccaagctccacgacttcactaggagccatgaagcaatggcgggacgacgtcgaccgactgctcagtatggcgcattctacctcgaccaggtcgaagacgcggtcatcccggcgccaacacgaggcatcagcatctgtgcgctcgccctcagtgaggggcgcacagaccaatgacctccgggcagagctcaaccgcatgcgtgcgggagaggacgcccgggtatccttggaaagggcacgcgagcgccgccaaaacatcgatggtcgcgacctcgatcaaggcttcgctgcggttgcaccgcagacaccaatgggcacccggtcccaaatgggtgtccccttggccggtgtgggctgcgccgctcttgcggatcatctccgcgtggcgtcctggccacccaagttccggccgcacctgccggaaaaatacgacggaacgacgaacccgttggagttcctgcaggtgtacgttaccgccatcacggcagcagcccaaacctggctcatgaacctcaccccgggatcagtctacttctgggaagaactctgtgcgcggttcgtggcaaacttcgccagtgcttaccaacagcacggtgtggaggcccacctccatgcagtgaggcaggagccgggggagaccttccggaagttgatctcccgcttcaccaagggagtacgtgatgaaaaaatgttggagaagttggccacacatgacgtggaaactgtcccccacgctcttcgctctggccgacaagtgcgccagagccgccgagggccatgcatggcactcggccccacaaactggagctacccagtcgggtggctcgggggccgtcctccgggacgaaaagaagaaaaagaagaaggaccgcgactaccagaagtcgtggtccatcgctctggtggtcgcagcagcgaccggaggccagggcgaccgcaacaaacgcccacggccgcagagaggtggcagcggttcatgccctgtgcacccgaacggtcgccacagcgccgcggagtgccgcgagatcattaacctcgcaaaacgcgttagcgagcggcgcgagcagtcttccaaagatggttccccgcctcgccgccgccccggcaaggaaaaggtggacgacggcgaggtggtcgcggctgagcgggacctcgggtatcagtcgcccgagggggacctgaaggatatcttcgccggaggctcctactccggtgaagacaactag

SEQ ID NO: 92023 - DNA, 153 bp, Zea mays
  Clone ID: MRT4577_183922C.1
ttaaatacttgtaaaaccataattttacacgaggtgagtagccttaaacataatgcgtaatttctgtggttgcctatatgagtgaaataacttacattaattgggttttgctaactgtgcgctttctagttggtaaatgtgtggtccctgttg

SEQ ID NO: 92024 - DNA, 545 bp, Zea mays
  Clone ID: MRT4577_183923C.1
cacaagcttttttttttttttttttttttttttttttcttttttttttttttttttttttttaattttgtttttttttttttttttttttttttttatttttttttttttttttttttttacccggccgggggggcgaaagggggggggaaatccaacacgcgggggggcgttagggggggaacccgggtccgaaccaaggggggggaaaggaggggcatagttgctgccggggaaaaattggtatcccctaacaaacccaaaaaaaaaacgggccggaaaaaaaaaggggaaaggggggggggccaaaggggggaaccaacccaaattaatgggggggcccccaccggcccctttccaggaaaaaaaccgggccggcccgtttaattaaagaaccccccccccggggggggggggggggttagggagggggccctctttcccttcctaaataaataactcggtggggtcgggcggtcggggggggggggggggtttaactcaatggagggggggaatacggccacccacaaaggggggggggaa

SEQ ID NO: 92025 - DNA, 275 bp, Zea mays
  unsure (1)..(275): unsure at all n locations
  Clone ID: MRT4577_183924C.1
cggggaccagacaaccgacagacagcgagggcggcgcaggcgcacgccaaacaaagagcagcaaggcaagagggcgcgaaggccagaagaaggcaaagaagcgacgaaagcccgcaggccaccagggcgagcgaacacgacccgcacccgagacgagagaaggcgagcaganccgcgagacagccacgcaagacacaggcggcgcgcacaaacccaacagcaggcgccacggagagacccgaaccaacacgaacaacaggaacaagaccgcagag

SEQ ID NO: 92026 - DNA, 510 bp, Zea mays
  Clone ID: MRT4577_183925C.1
aacaaatggtatcattttttttttttttttttttttttttttttttttttttcctttttttttttttttttttttttttaataccgggaaaaccggttttccggtaaaacgggaaaaagcccaaaaaaggggcaaagcaatggcccaagggcggggggttggggccccgtaaacccccccaaaaaaacccccccctttgttgctggaaaccctccccaaatggcaaaacaaaaaaaaaggctaagtcccgggggggttctatttttcacaaaacccgccaagaaaaaggcccgaatccatgtaggcccagggggctggggccaagcccaagggttttttaaaattctgcccaaccggttccaaaaccaacaggaaagtagggcccggccaaaaggctacccccaaaattggaagaaaaaagggcaatccatctgatttttcggggaaaggtctctccccaagggggctgaataaaaaaacctatagggaacctcccccaacccccaaagg

SEQ ID NO: 92027 - DNA, 314 bp, Zea mays
  Clone ID: MRT4577_183926C.1
tcggctcaatccaggcgttgaacaggaccaaacgggaggtgaagcagctgttaagggcgacacggagaattttgacaagatcatacttgatggtgctgacgactctgaacgcgatggtgaccatgccgagctacatccaggcgtgtaggaaaacttcaatgtcgccggtgacgaatgagaagccttgcgtgttgaacacaaattcgacctgatgaccgccgaaaatcgccttggcgcacgaggccaaagaataacgagaggcggtggttgtgctgatcgatgcttccgaggcttgagtgatgcctccccaaaaa

SEQ ID NO: 92028 - DNA, 751 bp, Zea mays
  Clone ID: MRT4577_183927C.1
cctcgaggccggccgggatatccctagctgctgccttttgtggcttgtcacagtagcggctcagccacccacctctcctttcccatggccgccgccgccgttcgccgcctactgcgtggggcctcctccacctccgtatccaacaccagccgtctcctctcctccaccacctccccgcctccccaccggagccccaacaccaactcaccggttgccttcgactggtccgacgacgacgctgacggctcctcacatctaccgccgtccacggaaaagaaggatgaactacctcccccctactacgaccccttcaacaagaagcccgcaattgccgagccgtccgaccccaccaacctacaggaggtcttccacaagatgcggaaagagggcctcaccgattacgccatcaagatgttcgacggattgtccaaggacgggctcacccacgaagctctcgcgctctttgccgtcatcaaggataggggctccatgcccgacgtcgtcgcccacaccgccgtcctcgaggcgtacgccagcgcaggccccgcgcactggcgcgacgccgtgcgcacgtacgaccgcatgctcgcgtccggcgtcatgcccaacgcgtacacgcctggccgtgcttgtcagggggctcgcggccagcgaccggtgcgcagaagcaggcaagtaccttgtcgagatgctcgaccgcgggatgcggcccaatgtggcgacgtatctggccgcgttcgaggcgtatctg

SEQ ID NO: 92029 - DNA, 621 bp, Zea mays
  Clone ID: MRT4577_183928C.1
aaaggaacacaacggagctcgagggccgcttttttttttttttttttgggggggggggttttttttttttttttttttttttttttttttttttttttttgggaaagggaactttttatttctgggtggccacaaacatcatccaaaaaactttattattgaattacatctaataagcaatctaaaagagggcaccaccaatgatgggggggtggaaggaagctgctgggtttgtcaaagcaagttggacaaagggcaacaattgttgaagttgaaaaagggttgcggggttagcccaaaactgctggaaaaacggaagcaactgttgttggggcaaaaaggaaacacggtttgctgtaactagctggcaaaagggaaaaagaatttgctgctgcaaataagcagcggggttcagggcggccaattggttaaaaggaaaaagttgttgatgttaaaagtaggcaatagctaactggctaaaggggaaaagatggtgctgaaaataaacagaaggggtcagggtagacagtgggttgaatggaaaaaaatgttgtagcggaaagtagggaaaaaggtttgccagagctacttggttgacacaggtaacacaagttgctgcaa

SEQ ID NO: 92030 - DNA, 284 bp, Zea mays
  Clone ID: MRT4577_183929C.1
cattgggtacctcgaggccggccgggacttcggtgcgcgaccgggggtctatgcgcatgacgtctgcgaatgacaagccagcggcggcgtccgggagccctgctgcacggccccgaccgtcgtgctgtacctggtcccactgtcctggcgcacgccaccgagctacctgacgggcgcacgtgtcccgggacgactacaggctgggacaccgcgggtctgcctgcggatccggagacattcgccgagaaccgcgagctggaggtgatccactcccgctgtgctat

SEQ ID NO: 92031 - DNA, 806 bp, Zea mays
  Clone ID: MRT4577_18392C.1
cctcgaggccggccgggccggcggaagtacacaccacaaacacccatctcctccgcctctgctcccttctgctcacccgcacgatggcgccggaggcgcgaggtgaggcggcgctggtgtacagagacgcattggcgccagtggaggaaagggtgcgagacctgctgggccgcatgacgctgcgtgagaaggcagcgcagatggcccagatcgagcgcaccgtcgcgacgccgcgaaccctcacggagctcggggctggcagcgttctcaacgccgggggaagcacgccctgcgagcaagcctcccccgccgactgggccgccatggtcgacggcttccagcgccttgcgatctcctcccgcctcggcgtccccatcctctacggcactgacgccatccacggccacaacaacgtctacggcgccaccgttttcccccacaacgtcggtctcggcgcctgcaggtaacgatcgattcgatccacagaccatgttctgtgtgatggccgcgtcactgtactaccccaatgttttgtccgctaggcaaccatattctgttgacctcacagtcacaggacggagagctcgcgcgtaggatcggcgaggcgacggcgctcgaggttcgcgccactggcatccactggacctttgcgccgtgcgtcgccgtctgtcgggatcctaggtgggggcagatgctacgaaagctacagcgaggacccagagatcgtgcgctcgttgaccaccatcgtcagcggtttgcaggggcagcccgcagcagaccatcctcatggttaccccttcctcgct

SEQ ID NO: 92032 - DNA, 2049 bp, Zea mays
  Clone ID: MRT4577_183930C.1
ggttttccagtacgtctctccccgttcccggcctggatgccacccacaacgttttgatccgccccgatcgcaactccgcaccgcgctcctgttctcagatacacacactgtcaactcatatcaaaatatacatacaaccaccgcagcatggggatggtagtaaacagcagtgcagtcccgttctccatcgcgctgcttgccgtcgtcatcgcggcagtagtaatcaccaaggctgcactgggacgacgacgacgacgacgaacagccgcagccaacaacccagcaccaccaccccgcaacgacgtcgacaccggccggcggcgtccccccgcggccatcaccggcgtcacctcagccgtccgactcgtgcacgcgctcgccaccaagggtttcgaagccacgctgtacgagcagtacgcgaagctggggagcgtgttcacggtgagtctcttcgggatgaagacgacgacgttcctggccgggccggacgtctcggcgcacttctaccaggggcccgactccgagatcagccacggcgacctcctcgagttcaccgtccccatgttcggcgagggcgtcgccttcgccgtcgacgccgccacccgcgccgagcagcatcgcttctacctcgacgcgctgaagccggccaggctaaggtgccatgtcgctcccatgctccaggaagtggaggagttcttcgcgagatgggggcagcagggcaccgtggacctgaagcaggagctggagcaggtgctgatgctgatcacggcgcggtgcctgctggggaaagaggtgcgggagaggatgctccacgaggtcttctccgcgtaccgcgacctcacggagaacagcctccatctcaccagcctgctgttcccgtacgcgcccacgccggcggcgcggcggcgcgacagggcgcgcgccacgctctccggcatcttctccgagatcgtccgctcgcgcaggcgctcgggccgccgagccggggacgacgacggcgacgtgctgcagagcctcgtggacgccaggtacagggacgggcgcggcacgacggaggccgaggtcacggggctcgtcatcgccatcctcttcgccgggaagcacacgagctcggccaccagcacgtggactggcgcgcggctgctgcgccacgcggagtgcctggacgccgccgtcgacgagcagcggagggtcgtggcggagcgcgggagcggcgtcgactacgacgccctggcggagatgggcttcttgcactgctgcatcaaggaggcgctgcggatgcacccgacggcgccgctgttcctccgtagggcgcaccggggcttcaccgtgcggacgagggagggggccgagtacgatgtcccgagcgggcagaccgtggccagccctctgctgatcaaccactacatcccctacgtctacagggacccgcacgtgtacgacccgcggaggttcggtccgggcagggaggaggacagggtcggcgggaggttctgctacaacgcgttcagcggcgggaggcatgcctgccctggagaagcgtatgcgtacatgcaggtgaaggtgatatggagccacctgctgaggaacttcgagctcaagctggtgtcgccgttccctcggaccgattggatgaagctttcgccggaggcgagagggaaggtggtggtgagctacaagaggcggatggtgccggttgggagcgtgttggagaactgatgtctctgatggttacttttgtatgagctgtgtgtttgtatgcaatgtgtgttgagcaccatttgtgacgctggcacggtcggacggcttggccctgaagactggacggtccggctcgcggacggtctgcgaatagatcgaataagacacaactaatttctttttcgtgcgagtttattcctctaaatccatggttgctgtcgggagatgcctagaaatggatctagacattccctctaaatatattaagtacctctatatatattaagagatacggtcaattgcaatcatcaacaatcgatcaaacaaaaaacatataaaagcgacaga

SEQ ID NO: 92033 - DNA, 493 bp, Zea mays
  Clone ID: MRT4577_183931C.1
cccaaggcaaaaaaaatggcaaaaaacccatttggccagaaccccaagggcccaacaacaacaatttaaaccaggccccccgcccccattttttgggaggggccccccgggccccctttttttcaccctaaaacacaaaattaaaagcccccctttaaatccaggggctaaacccaaggacccagccataatcccccaaggccaaccccagaccgggggggccaaaacacagttttgtccgcaaaaaaattcaatgggcccaggttcccaaaaagcccccccacgggagaaggaacatttccagcagggggggccaaggcccggatgttccccggggggaaaaaaaaacccatttttgggagcggaccaaatgggggggcaaacagttcttcggggggcccattaggggctttgggaaaccctaggccccccccagccccaagccccctgaaaatgttcataaagggggggggggtaaaatggcccgccccaa

SEQ ID NO: 92034 - DNA, 142 bp, Zea mays
  Clone ID: MRT4577_183932C.1
agcgaacgactaggcgcgcacatagacaagaacctcggcgctgacatgactgatgacatggtgtccaggtcccacctctcccacgacatcctgcgcaacaagcgtgcctacagcagggccgaagcagccgtgtaccgtgtca

SEQ ID NO: 92035 - DNA, 471 bp, Zea mays
  unsure (1)..(471): unsure at all n locations
  Clone ID: MRT4577_183933C.1
tgctcccgggcgncatgggcgagggatttcgagcggccgcccgggcaggtaccacttgctaggtaacacgcatggcttatttgcttggcgaggttggcaattgatgcaagcatcaaaaagtattgtgggaatacaggagtcaacaattcaactccaatgctcaaactgaagagaacagatgtatagaaccttactctcttaagattggtatcaaacgaagatgctaggctagcagtgtagatgcacctgctcaaccgtccaagaccatccttcatgacccaatttagtgcagcagctgatggaagtgaactggagttccctatttcaattgcccgcaacatatcctgggtggcaaaaatttgtagagcagaactggaaacacgatgaacaaactttcacttcacgtgttcaaggtaatttctactaactttccttggaagaaaaaaattccttaccggcaaaatacaaatt

SEQ ID NO: 92036 - DNA, 499 bp, Zea mays
  Clone ID: MRT4577_183934C.1
gaccagcatatgaagctggaaccgatctgcacaggcatgctatgaatcacgatatacactgtgggtaggacttttgatctcaatctatcactcttaacagcgcaaaagggcatgctcaatccaatggagcaatcgtccatgactatggctatggaagcgacgaataccagcgcatcatccatgtgttagatgagatatgatcttgtttactacataaccaggctgaaccgacacatcaagttccctcgcttatagttttcatcaattatttttgttgaaagcgcctatttaaagctggccatgtttcctaatgcaaatacaaatagctttctttatgggaggtcatccttcttcatcatttacttgcacctgacaagggacattccaccattcatgccttagaccttgcatggaagtatgaacactggaaaactggtaacggctgcctattgctcgagaaggaaacataatactgaataggcattagaaagactactgc

SEQ ID NO: 92037 - DNA, 295 bp, Zea mays
  Clone ID: MRT4577_183935C.1
attccttattgcggagctgttagcgctctgatgggggacagacattgggcgcgctcctgaccaaaaagcgaagacactagaccaataagacaggctggacactgacactacctgtgcaggagccaggggatcacttgagaggtcacaacctttcttagaaaggctgcgcttcgaaggagtccacagcgcacaactgagaagagtgaccacgttggcgggcgtgcaactgctagagatgacttattgcacgaaaagctcgcatgtgtaagttgacgctctatccaactagtttagc

SEQ ID NO: 92038 - DNA, 160 bp, Zea mays
  unsure (1)..(160): unsure at all n locations
  Clone ID: MRT4577_183936C.1
gggtacctcgagggcggnncgggaaagatttcactcctccctccaaaggtgagggcgttagccaggaattncggnaacaatgacttccctctcctccgntgtggcantgccgtcctcgtggcgggnccggncggnggngggnagnnggagggggnggatg

SEQ ID NO: 92039 - DNA, 585 bp, Zea mays
  Clone ID: MRT4577_183937C.1
tcgaggccggccgggatctatctcctccatccagttacattcagtacccaagaccactctcttcttcacctcactagctaccctgagccagctcctccaccgatctgtgctgaaataaaggacgtatcactcctcactcccaccacctgctcgggcccggccgcacctagggatacccgctgatagctgctgtacccgccagccgggaacccgccggccgcgtaccaccccggcggaggagacgtacccacgcggaggccgtaccctcagatacgcgtagccgacggagtacgcgccctccgctccagcagctagcagcgagagcgagctcgcctctccttcctggaatgatgcttggctgacctctgctgctgctgcctctggctcaacagcatgatgacgcaacctcgcgggccgcgtccaactgggctgcgacggcaacatccacgttacggaagagctgtaactgggcgcggctatctctaccttcgtcctgcgttatcgcactctttgctttatgttatctcactctctctctctggtatgagactactgcaactctgtcgacgtcaattgcatgaaact

SEQ ID NO: 92040 - DNA, 276 bp, Zea mays
  unsure (1)..(276): unsure at all n locations
  Clone ID: MRT4577_183938C.1
cgatgttgtcctggcggccatcgttgcgatggcgggaggaaggcgcagtagaggacgtcgggtcggggaggggcgctgctgcgacggccggagacagggcaggcgaagacgggtcggggaggggcgctgctgcgactgggacgccggcggctggggcctgccctgcgcgcccggcgctccccagcgcccgacgtccggccctgcggtgcctgcaacagcatgttgttgtgccccagcgcccgtggnnccggtcctgtgcggctgtgtgccggggct

SEQ ID NO: 92041 - DNA, 834 bp, Zea mays
  Clone ID: MRT4577_183939C.1
ctccaccagttccaggacaagcagcagcggccgccacttcgtccagctccggccccgggaggatcacttcgctgtcaaatcgctcgtcgacggcgggatgggggaggcgtcatctccggcgatcgccaaggatgtcaccgagctgatcgggaacacgccgctggtgtacctcaacaaggtgaccgacgggtgcgtggggcgcgtcgccgccaagctcgagtccatggagccctgctccagcgtcaaggacaggattggatacagcatgatcaccgacgcggaggagaaggggttcatcgtcccaggcaagagtgtcctgattgagccaaccagtggcaacacaggcattgggctggccttcatggctgctgccaagggttacagacttgtactcacaatgcccgcatccatgagtatggagaggagaatcatcttgaaggcttttggtgctgagctggtcctcaccgacccactcttgggaatgaaaggagctgtccaaaaggcggaagagctggcagcaaagacacctaactcatacatccttcagcagttcgagaatgctgccaacccaaagattcactatgagacaactgggcctgaaatctggaaaggcacaggaggaaagatcgatggccttgtttctggcatcgggacaggtggtaccattactggatctggaaaatacctcaaagagcaaaatcctaacatcaagctctacggtgtggagcctaccgagagtgctgtcttaaatggtggaaagcctggaccacacagatccagggaattggagctggttttatcctggtggccttgcatgttgacatcattgatgaa

SEQ ID NO: 92042 - DNA, 268 bp, Zea mays
  Clone ID: MRT4577_18393C.1
agcgcctcgcggacgggtacggcgacggcgcgctcggcgactggaccaaggcgccccccggcgcctccatcttcgtggacccgagggagttttaggcagttttttttctccctccatggagggatgtacatacaggatccaaaaaagagggcgggtagcttaatttagaggaaatgagattaatttagagtttgagtgtgctgttacagtaacgcttttacatcacatcaatggacaagttgcaagcaaatcttgttttatttgcacc

SEQ ID NO: 92043 - DNA, 692 bp, Zea mays
  unsure (1)..(692): unsure at all n locations
  Clone ID: MRT4577_183940C.1
gcccatcagaagctgaacttcaggtactttggaccttacngcgtcctatccaaagtgggagctgtcgcatatcgcctggaccttccgacgtccagcggtattcatcccgtcatacatgtttctcaactcaagctagctaccgggttcaaaggcactgtttcacctaccctgccatcgtctgttcctgagctcagtgttccattaaacatcctgcagactcgaggtgtcaccaagggcaatagattggttcaccaggtccttgtggagtggtctggtctaccgtcggagctggctacctgggaagatcgcgaagctctcaaacaatgtttccctggtgcgcctgcttgggggcaagcatgcttcaaaggtgcagggaatgtcaacacagcagtattacccgaggtgtcaaaggaggatctacagccacaagatgctggccagcacctgctcgggcgtggtcgacgtactcgccgagctaatactcgtgtacacggacctgaatgggtgtaatgtggtgtgtgtgggtttccctgcgtggtaaccgggtcacatataaggagaatactgctctggtgacggtatggaaaaacggaactctgaatacactaccctaaattccccaaaaaaaaaaaaaaaaaaaaaaaaaaaaaaaaaaaaaaaaaaaagaaaaaaaaaaaaaaaaaaggccccta

SEQ ID NO: 92044 - DNA, 613 bp, Zea mays
  unsure (1)..(613): unsure at all n locations
  Clone ID: MRT4577_183941C.1
agttagattggtgctgcgagcgcgcgggcatgcccgatgcctctcgcatacatactcattccctaattctcttaattccaaaaatcaggatcccaaaaactcccaattacacgacgttgtggcgggcggtggccacggccgttgtggcgctgtggctcctcccagcggccctcgcgctggcggtcctctggctgccgctactctgctacgccgtggcgccgcccgcttcctgatgaccaggaggaagctggtggccagcagaaggtcgcgtggctgctgctgcgacagcggcgacaacgacggtgggccggctccggctactgtatacttcgacgaccaggtagatctcgccgtcggaggccacgaggacagcatgcaggaacagggatagctagctctcctggccagctgcttcctgtcgatccgacgacggtgaatcccgtgtgccttcgattgggagcttgggcgctagatacgtactcgctggaggcgtttttttttctttttctctaaaataaggatcgtgatgaccaaggttttaaggagatgctcttnatcatctaaacacattagctaacattgtcttatatagaatttaccaaaaaacaacaaa

SEQ ID NO: 92045 - DNA, 985 bp, Zea mays
  Clone ID: MRT4577_183942C.1
aagctgcagatgcaaggcagtggtgtaccgagtttggagcttgtgctgcttccagggcaaacgaggtatcagcacaagtgaagggaagcgtatctgcttttggtgcaacccttggagacaagtcgaagagggcaatggaagagtgcaaggacggcctggagaggatttcacacagattcaagacagactagataccaattttgttggttgcttgttttttggggatgttgttgttgcagagttgtttactatagcatgctggaacgaacagtaagtagttcccgaccgtggccttgtggaataagtaagtgcaacgaagcacttgtggccttctggaataagtgtaattaataccaacagtaattaataatagttcccgtttattatattatatcacaagatcgatctgtctgtcttggtgtctgtctgtcgcttattctgcctttggtcgtcagagctttgatgctgttttgagctttgtgctcggctcaaaagccttgctgctgctgctgccttgcaccatccgtgccttcttcacttggaaaaggagctcgtgggcttcctcaaaatgagggctcgtggctttcttcaccttgtccatccagacaaggatcttctcatgagctcccaggaatcggtcacggacctcatcgccaaggatctccaactgcattatctcacagacaaggctcagatctgcaatcgatggctgggggctacctagcaagaacttggcatcgcctttcagccataccgattcgatcacccccagtgactgcatcacaagcttctctcgtgcttgtttcacagcctcatgacttgtcgtaagaccaaggaagggagccaatgcagtgtgcattacaagggttgctgcaccacgccgcaaatttgagtgatgccaatccaagattgactcaattttggctctggtgaacaagtcagaaggataccagtggtcagcaactccagggaaaaccgatgcaag

SEQ ID NO: 92046 - DNA, 290 bp, Zea mays
  Clone ID: MRT4577_183943C.1
gcagatgcaaagtggtgaagttgcttaatcgaataggttgtaccttttcctctctgctccagaacccaggcttcagggctctgcccaggctgccactcctcagctgccctcctccaggccggcaggcacagtcttacagattttcgaagacaaagacagccagggaacagtttctagtttctgacccacggtagagtcacacagacataggtggagatccactctgaagacctgacatttattgtattggggaatcgtcatcgaaaacaaaaagaggtgagtagaaagct

SEQ ID NO: 92047 - DNA, 348 bp, Zea mays
  Clone ID: MRT4577_183944C.1
gttatgttaacctcgacggccgcacccctgcatctctgatcgcccgcccattctcattcattcattcccctcgcgtcgcgtgattcgattggattccgctcccccgccccgatccgttccttcagcgccgctgccgctgcggctgcgccgaggcccgaccccaaaggctgcggactgtggccgttgcagacccatagattccttccgcttggcttttccacccctcgaagccgaatcctatggatccacccgttgaccgcctgcgccatcggaggacgtgccgcctcctcctcggcttattcctcggtccccgcgcccgcctgcttctatagatataccgcccgcgca

SEQ ID NO: 92048 - DNA, 4068 bp, Zea mays
  Clone ID: MRT4577_183945C.1
acgctcagctcagctcaccctatctttctcttatcttacgccgtcgtcgtcctgctccggcgacggccaggcagccgagcagataaaaagagccgaagcagcaccaccaccaccacgtgcctctcttctcagcttgcctgcctcactgcacccggccacaagggcaagatgcccgcctctgtcgctgtctacccggccaagatggcatgctgtctccagctccaccatcttcgccggccgtcccctgctccactccctgctcgggtcctcttcctcctctcgaccccgcgcctgcgccccgtcagagcgtctcccggcccgtccccgcccaactccttcgctggctggtcctccgactccgacagcgcggatgacggcgccgacaaatctactctagggttcggccgagcaggagggcttcttggacctggacttgctgcctttttcttcctcgccggcattacctttgctgccgtctctatcagaagcagtggcacccacgcagctggaaaattgcaaaacttgcctacagagactgctgccacggaatcttaccctgattatcactcccacaaagaggatggtgctaccagggaagcttccttaccaacggattgggacgaagaagactatgacaacctcgataaaaaggaagatacagatgaatacctgacgcctttacagtcaaacgaggttcctggggtgccagctgaaggtgaagtggggcacctgttgcagaacactgagcctgttactaatggtgaccatgttgtcggtgaagaagcgaatcagtttgacaatctcattgcatccgatggtaatcaagatccaccaccaccacctttgcccatactcgatgctgcgggcccctcggaggaaattcctgatgtagaagaaacatcagatcccaaaatggatttgccagaaaaccagcatttcgatgaaacattaacttcagatgcaatggtgctagattcagatgttgtgcccatccaggacatctctgaaggtgccattgctgctgcatttcacccagaagacaaaggtatcgagcagaacccacaaactcttgacaaagatgaactttctccatccggattgcctgattatatggaacatgtaagcgccgatgggatgcatccacttggatcaaacgagttatccatggctacaaggaccagtgagacaggagatggggaggaaactatagtagaggatctgtataaaggagaaagtgaattagaaaaccaaaacaaacaattggagtccacaccacctgaccaatatttttcttctcctggaattcctgctccctctgtagtatccactgctttacaggtgcccgcagggccgattgtggttccagcttctgttgatccaacccaggaaaatgctatagctgcattgcagattctaaaggtgatcgaacccagtgctcaagctggtgaattgtgtacccggcgtgagtatgctcgatggttggtagctgcgagcaattgcctttcaaggaacacttcctcaaaagtgtatccagcaatgtatattgataatgtcactgaacttgcatttgacgatgtcacacctgaagatcctgattttccattcatacaaggcctagcagaagctggattgatttctagcaagctttcaagatctgatatgaatatcccagaagatgttcatgacaatcatatcttgttttcccctgagagtcctttgtcacgtcaagaccttgtgagttggaaaatggccctggataagagacaactgcctgaagttgacagaaattgtttgttcaaactatctggctacatagacatcgataagataaacacagctgcctggccagctttggctgcagacttggatgctggagaccagagcattacagctcttgccttcggtttcacaagacttttccaaccgaacaaacctgtgacaaagggacaagctgccctagcattttcagctggtgattctggcgaagtggttctggaggagcttacccgtatcgaggcagagaaaatagctgaagcagctgtaaatgcacatgctgcattggttgctcaggtcgagaaagatcttaatgcaagttttgaaagggagcttaaggaggaaagagaaagggtagagacccttgaaaaagtagctgaagaagctagggtggagctagataggttgagggcagaaagagaggaagagaagaacattctggtcaggggcagagctgctgttgagtctgaaatggaagttctgttgaagttgaggagtgaggtagaggaacagctgcagaacgtactgagcaagaaggtggaggtgtcgttcgagaagagtaggattgagaaactccaaaaggaaattgagagtgataactcggctgttgtgcaacttcagtatgagcttgaagtggagaggaaggcgttatctatggcaagggcttgggcagaggaggaagccaaaaaggcccgggagcatgcacgcgcccttgaggaggcccggaaccaatgggagcgtcaaggaatcagagttgttgtcgaaggagaactgaaggatgacgcctcagctggggtgacatgggctaacgctggcaaagaacacgcagtcgacgagtctatcaaccgtgcggaagctctgctggagaagctcaagacaatgtctggtgagatggaggtgcagtctcggggtgcggtggagagagtgatgcagcatgtgaggtccttcatcgcaatcctaaagcagcaagctgcagatgcaaggcagtggtgtaccgagtttggggcttgtgctgcttccagggcaaacgaggtatcagcacaagtgaagggaagcgtatctgcgtttggtgcaacccttggagacaagtcgaagagggcaatggaagagtgcaaggacggcctggagaggatttcacacagattcaagacagactagataccaattttgttgtttgcttgttttttggggatgatgttgttgcagagttgtttactactatagcatgctggaacgaacagtaagtagttcccgaccgtggccttctggaataagtaagtgcaacgaagcacttgtggccttctggaataagtgtaattaataccaacagtaattaataatagttcccgtttattatattatatcacaagatggatctgtctgtctgtctgtcgcttattctgcctttggtcgtcagagctttgatgctgttttgagctttgtgctcgactcaaaagccttgctgctgctgctgccttgcaccatgcgtgccttcttcacttggaaaaggagctcgtgggcttcctcaaaatgagggctcgtggctttcttcaccttgtccatccagacaaggatcctctcatgagctcccaggaatcggtcacggacctcatcgccaaggatctccaactgcattatctcacagacaaggctcagatctgcaatcgatggctgggggctacctagcaagaacttggcatcgcctttcagccatacggattcgatcacccccagtgactgcatcacaagcttctctgcttgtttcacagcctcatgacttgtcgtaagaccaaggaagggagccaatgcagtgtgcattacaagggttgctgcaccacgccgcaaatttgagtgatgccaatccaagattgactcaattttggctctggtgaacaagtcagaaggataccagtggtcagctactccagggaaaaccgatgcaagatacctcaaaatcgcatgactttcaaatagtttgaatcttccatcaacaattgcaggtacctgtcccattgggtttatttttttgaattcgggtgtgaggtgctgagacttgaacagatccaccgtgacctcctcgaaatcgatctggttcaccctgcagaagatgatgacagctcgggagggttgcgaccgccggtcggcgtacaccttgacgggctgcatagcgattcgaagcttggggaggcttctccgaccctcgctgctctgctaaaatctgctcttttccactgctgcacggaacctcggataagtgaagacagacagaaccccggccggcctcgagggtcccaa

SEQ ID NO: 92049 - DNA, 363 bp, Zea mays
  Clone ID: MRT4577_183946C.1
ctagaggttctatgggtggtttctccactttaactaaaaaaaacacagccggataaagtaaaacccacgccccaagaacagaccacccaaaccgcccgggtcatgtcccccggccaaaggccaaaggcaagaaaaaacccggcccccccccaaaaagaggggaaaccacgtcaagaaccggcgaaacacccccccccgccgggagacccagggaacaagggggagaaccacccgaaggggggggagaccggggcggagacggccgccaccggaaacctcaaaaaaaggggaaaacctggcccccacccaggaaaaaaccggggcccggaggaaccaccccaagcccccccatgggcggcgacc

SEQ ID NO: 92050 - DNA, 145 bp, Zea mays
  Clone ID: MRT4577_183947C.1
aatcatttagggctagtctaggagccacaaaacctgagtggattgaagggattaaaatcccctcatttaattttaaataagaagggaaaatatcatatgcttgcaccaaaatgagtgattgcacaggatatgtcctcaagaaggg

SEQ ID NO: 92051 - DNA, 307 bp, Zea mays
  Clone ID: MRT4577_183948C.1
ttcgttggtcgagtctcgcgtacgtgagcgtcgtcattagcgtcgagattatctgccattctatctgtcaggacgtcgatgatcgatctgataggactcgctgctgtgtaacaggagatcaatcacatccaattcagactgccaatgtagctcactcgctaatgatagcctctactctgtggtatatatgtgcatgtccaagatgaatgtcttttagattctcggatacccacataacttctgtgtcactattccaccagaggctgcacctcagactgtaagagggtacatggcacatgttcgctag

SEQ ID NO: 92052 - DNA, 155 bp, Zea mays
  Clone ID: MRT4577_183949C.1
gacgaggaggagaacgcaaccatcccagttctcttggtacggactggggtcaagaacggggtgcaatcggccagggcatccaggaacaacttcatggtggttccaacgggccacccatcgctcaaagagcatgcagaatctctgaaacttgacaa

SEQ ID NO: 92053 - DNA, 707 bp, Zea mays
  Clone ID: MRT4577_18394C.1
gttcaaaaccattctccactgttgctcctgtcctgttcctccgcttcctctgtctctgtctcgtcgtctcccccatctggccatctccggctagggtttgccctcccaccacgtccgaggtctagctcgtctccgccactgccggaccaaggatgtcgcaagagcaaggtatggaggagccgccgccgcaggcggtaggcgaggcacaatcggccgccgatgtccccatgagcgaggccgcagcggtggaggatgaggatgaggaacccgtcatgggggaggggcagggcggtgaaagcggggccgccgatgccgttgattccgtcaaggcttcagtgaagcccgaagcagagggcgcggaggaaggggacagagaggagcttaatggtggcccgacggcggatttgactgacgaggttgtgaaattggagaacggggatggccccgtgccggtgggtggctccgcggatgagtgcggagctggagatggcggtgttgataagggcctggttggtcagaatgagcctgttgtgaaccagcttgtgctggtgcaggctgaggaggagctggcattgtctaagatctcaaacagttccttcatgttcgattacaccactgggggtgatgactcagggactgaggaggagcaggctgccttcatgaaggagctggagcgtttccacagggagaaaaagttggagttcaag

SEQ ID NO: 92054 - DNA, 329 bp, Zea mays
  Clone ID: MRT4577_183950C.1
ataacttgttacttcattgttcactatgatcgtttggttttttttcaggcaacagggggaaaccacagcccccatgcaaaaaaatgaagtccacggcttttaagcaccgggctttaccctttaaaaagaaaaactcggcctccccgaaccttcagctggggggagctctcccagggggacaggggcccccctcatgcgccttgggcatgtttcactaaagagacaccctgggtctttgaaaggcaccccccggactagtttgacgcaggcccccgaggggaagccagggaagacccagggcccgattttggccccagacacaccttttt

SEQ ID NO: 92055 - DNA, 369 bp, Zea mays
  Clone ID: MRT4577_183951C.1
gtgtttttttttttttttggagggggcggcggaaccaaactaactatacgcggagcctgatcctgaacaatacttgctgaggatccaaggcaagatgctcgctgttactgtcgcatatccgtggcacaaacagctttgatcctgaccactcgcacgcatcctctacgatccgtggacggggggcgggggtcggcagtatataacgacctataacgaccacagcccgtactaccagctaagaagctgttctacttcagcgacggccatgctcctgagccctgtcacgaacatacgccccatggcgcgcagaccagcttagttcccccactcccgggggatcccgaagtcgggccaacctcgctccacacc

SEQ ID NO: 92056 - DNA, 559 bp, Zea mays
  Clone ID: MRT4577_183952C.1
cccaattcttcaaccctacgggatctcaactggcaagagacagatgagatgttacctttatcacccttgttcctgcaacaatgctcaggcctatgacaacagatgcctttggagcggtaatgtggtagcagcacattcaaaggagcaatcgccactacaacaagcttcgtgcgtaccagaaaccttcgctgccctacttgtcgagcagcaggcaaggatacgttaccattgacaccacactaggctacacttgaacgtatggttcttatttgtcgctgctgcaactaccattcagacagctacctgctgcctacccgcaggaattacttccattcagccaagtagcagaattgaactctactggttattgacagtggcgacaactacaaccatacagccatgctagctagatgtgagccctgataactttgtgacacaaccacagttgctgcacggtctaccagcacgatgcgcctaacgctggcaccctcttacatctgcagcaattgatgccatacaaccaactggctttgacaaactcatcattgttctaccaaca

SEQ ID NO: 92057 - DNA, 200 bp, Zea mays
  Clone ID: MRT4577_183953C.1
ctaccgaagcggcaggcctctttgtaactttatcaagagcatgactgtccggctcggcggcggggtcagcatggccaacgccgccaacatcccccgcaagtgcggtgtgtccgtcggcgggcccatgagccccaccgtcgactgcaccaagattaactgatcgatggaaccataatggaaggagctcgtttggatggcag

SEQ ID NO: 92058 - DNA, 448 bp, Zea mays
  Clone ID: MRT4577_183954C.1
aaagctctctagtatttaaatgcaagccagcaaggcaaacccaaggacataagagggcacatcctgttcgggtacgagcaaaggcaagtcacgaaccagggacacaacgacgacgatgaggaccacaacaacaacagcaaaaagcggaacgaaaccacgcgaaaactaggggccgcgaagagcaatgggcgataacgccccaaggggggagggtgacaacacaaacgaacccgggacatcggaaaggacgacgaaaacgaccggaaggggttgaagggcacgctggaggacaacgaggatgcgggggcggagatacccccactacaggacctagaacacgtggtcgtggagcaaccagggggggggctgatgggcaccccgccgggagacccaggaccgccggcaatggtggcaggcgtggaccatactgacgccgtcgccgagccgg

SEQ ID NO: 92059 - DNA, 452 bp, Zea mays
  Clone ID: MRT4577_183955C.1
tgcttggacctttgggctgatttatgtgcttgggtggttttgttactggtttggttaaggatatgtcgggttggtggcgggagattgatgttgtgcatgcgtagcttaaggaggtggcgaaggatgcgctggcgtttattagtattactaggccttttgatgggatgctttggtcggcggtgttggtgtcggcgcatgttagtgtcgttaggacggtggatgttgatgcggggagttttaatcctaattcgatgcggaaggcggatgcggatttgcttcctagtcattcggcttgttctcctcctgttgatactgcgagtaaggttattaatgattctcatcctgatgcgcatactggtgggtgtaaggttgcgcttgggtcggattcgctgatggcggttggtggtgagtcggtggtgtttcatcataaggatcctgcggcgaatctgctg

SEQ ID NO: 92060 - DNA, 193 bp, Zea mays
  unsure (1)..(193): unsure at all n locations
  Clone ID: MRT4577_183956C.1
catcgatccgccattgctcaccgcacaggtgcgcgctcacgtgttttgttagacacgcanctaantngctaacgccggaggcgagaacaagaaaaagctcgacatggccgaggagaagaagcagggcctgcagctgctggacttcaggaggagcccattcgggcagcgctgccgcatcgcgatggacaagaag

SEQ ID NO: 92061 - DNA, 220 bp, Zea mays
  Clone ID: MRT4577_183957C.1
ttggtcacacatcccgaagctataggtgcggacagcatgcttcacggagtgcaggttttacggatgcaagacaaccatacggcgatcaccgcaggctcttgatacgctatataatatgacgcctatttgacagatgtgcacatgcagccaactattgaagtatggagaaggactacctgatcgaaacgtaacgttctgagcatggtgccattccggcggc

SEQ ID NO: 92062 - DNA, 397 bp, Zea mays
  Clone ID: MRT4577_183958C.1
ctcaagactagagaagaggctcacatgcttctattcatgtgctagcaagtccattctggagagccaacttttcatctgcccaactgtgtagccgctgcatcgccctgtcgtccacatgtgccaagtttgatgtagcattaattctttcccacagtcacttccaagagacctaaagagttgctgtgtctctgtcacacacctccattcaaagttctgttatgatagggtgcgacgcttttaccgaacttatttatcctagcacctgcttcaattgtttgaggaactggaaagatactttttcttcttcctttccctcactccatccctgtctttactacccacacttactgtaaaacattagtaagataagaattaaaagtcacacgatcccaccaac

SEQ ID NO: 92063 - DNA, 527 bp, Zea mays
  Clone ID: MRT4577_183959C.1
attcggctcgagcttcagccaggaacagtagaagtgaagctccttctggttcacagaaagagaatggtgccagtacaagcaatatagaaaagccaccacctgtggagaaaacattactttgtactcttgaagagttgtataatggaacaaaaaggaaaatgaagatcactaggaatgttgcaaagccagatggaagaatagaagttgaaacagaggtcttggcagttgaagtgttacctggctggaaaaagggaaccaagattacattccccaacaaaggcgataagctacatggccagttagcacaagacctgacctttgtcctcgattcgaagccccatgatgtgtacaatcttgaagggaacaacccttcttgtaaagcaggtgatccctctggtagatgccctcgctggggcagagataaacctgacaacccttgatggtcagaatctgcctgtgagggtggaagaagtgtttcgccctggatacgaagttgtgcttggagaaccgaagggggccgatcatga

SEQ ID NO: 92064 - DNA, 541 bp, Zea mays
  Clone ID: MRT4577_18395C.1
gccacgcttccggccgacatggtgatgatagaaggccatagatgagggctaacatgtctgtggctggctctggtgccgccttccacatggcgggccaaattgatcggcgtacctatgggcatgccgatggtgcacctgaacatgggtatcatgcaccagggcggaggcggcggcggcggcgggcgcggcctcgtgccctacctggggatttaccacggaaatgccaacggcgtgcgttgtggcatgcatactctcgcggagatgcttgaggccggggagcgcgatcgggaaccccatggaccaggactagttcatggacttgctgcagcatcagcaacagctgcagatcatgctccaacacgggaacgggggaggagcaatggacctcggattgggctacggctatgggctgcctccgataatgcattacccaatgcacccggagtcataccccgtgccatacaacatgttcagcgacaagaactgcaacatcatgtgctcactcatgtgagcagcgtatcccttcttgctggcctggtcc

SEQ ID NO: 92065 - DNA, 1488 bp, Zea mays
  Clone ID: MRT4577_183960C.1
gctctatctcctgttgccgtgtggagaggcctcagcgccctcccgagcgggtcacgagggctccggccgtgaagggcgcgcgggacctgctggctcaaagagagcaagcagagaaacatgtaagacatttacacacaaagaacattctctctatacctgcatttaatcatagcattggtgtttatgtatttcagaggctgtctgaattcctggatccagagaaaaagaacatgccaaatggaaaggaagaaaatattagggccaagaaaaagaaattgcaatatagacttagagacaatagtggaagaaagagagagaacttgctgaagagaaggaaagaagaagattagaagaggcggaaagggagagggagcgtaaaaaggatagacttgctgttgaaagagcgacaagagaagcacatgagagagcatttgccgaagctcgtgaaaaggcagaaaaaatggctttggaaagaattaatgctgcacggcagcgggcatctgcagaggcccgagagaaagaagatagagcaagtgtcgaaccagctgctgaaagggcttctagagaagctaggataaaagcagaacgtgcggcagtcgagcgagcaactgctgaagctcgggagcgggcaatagaaaaggcaaaggctgagaaggctcttgcagaggcaagagaacggagggaacgatacaaatcctctttcaaggagagttttaagtccaccaatcaggatattcgacaggagtcacagtttcatagggcaacttctagtaatttcatccgaaacccagattccagcaacagagcaatggttgaggttgagtccgctttaagacataaagcaagattagagaggcatcaacgcacagctgagcgtgtgacaaaagctcttgccgagaagaacacgcgggacctgctggctcaaagagagcaagcagagaaacataggctgtctgaattcctggatcctgagatcaagagatggtcaaatggaaaggaaggaaatctgagggccctgctatccacattgcaatatattcttggtgccgatagtggctggcaaccggtgccactaacagatctcattacagcggttgctgtgaagaaagcttacaggaaggcaaccctatgtgtccatccagataaactacagcagaggggcgctacgatcagacagaaatacatatgtgagaaggtttttgatcttcttaaggatgcttggaacaaattcacttcggaggagcgctagggtggcgggggtgctagagcggccgtttattttgaggcaggcgattcgtatattttctatagcgacgtcgttagtttcttgattcaaaactgattgtaaatatgcagttgtagccctagatatccgtgtcagaaacacagcgcagatgatgctggttagtaccttatctcagaatcagttcagcaaaaagaaatccattgctcgtaagtttccaagcctaaaaaaaaacgtacgcgtgc

SEQ ID NO: 92066 - DNA, 1770 bp, Zea mays
  unsure (1)..(1770): unsure at all n locations
  Clone ID: MRT4577_183961C.1
cattggtacctcgagccggcggggcacgtcttcctccgcggcggccttgtgctagtacccacctcgcgatcgacctccctctcgaactcaaagatggccggcaccacaaggtgtagtatcagaggcagcaacgctcccggcttggccctgccatgcttgctgctgctgctcgcgggcgcaggcgtctccaacggccagctccaggtggggttctactccaagtcctgcccggacgccgagtccaccgtggcgtccgtcgtccggcagtccgggtccgccgaccccaccatcctcccggcgctcatccggctccagttccacgactgcttcgtccgcggctgcgacgggtcggtgctcatcaagggcggcggcaacaacaacaacaacgccgaggtggacaacggcaagcaccagggcctccgcggcctggagatcatcgagggcgccaagacgcagctcgaggcgcagtgccccggcgtcgtctcctgcgccgacatcgtcgtgctcgctgcccgagacgccgtcgccttcaccggcgggccgtcgttcgacgtgcccacggggcggctcgacgggaaggtgtccaacctgcgggacgccgacgcgctgccggacgtgcacgacggcatcgacgcgctccgctccaagttccgcgccaacggccttgacgagaaggacctcgtcctcctcaccgctgcgcacacggtgggcacgacggcgtgcttcttcctccaggaccggctctacaacttcccgctgccgggcggcgggcggggctcggacccgaccatcccgccgggcttcctgtcggagctcaaggcccggtgcgcgccgggggacttcaacacgcgcctggccctggaccgcggcagcgagaacgtcttcgacacctccatcctccgcaacatccgcaacggcttcgccgtcatcggcaccgacgccgcgctctacaacgacacggccacggtcgacgtcgtcgactcctactccggcctgctcagcaacttcttcgggccctacttccggcaggacttcgcggacgccatggtccgcatgggcagcatcggcgtggtcaccggcagcaagcagggcgaggtccggaaggtctgctccaagttcaactgactgattccgctcccgccaatgcaatgcaagcgcgtaccgtccatagatcgtcccttcattcattgcacacagctagctggctggccggccccatccatataagcatgaagagcacgtacgtacggtggggtttggttgcctgctttcatggcagtgtttctctcttcttcatccattcgttccattcatgagtacagagtacacacatcgcgtagatctctcgtctcactgtgcaaattaaagggaggttcaagcagtgcttcactagctgtgtatgtatagtatcgacgaaacggaaactgcacaaggttttgaaaaagcaatttgcttagctttaagatctgtgcagctctccttctgatgcggtacacatatatatagctacactgtggcgtatatatagggtataacatgaattactcggccttgtgtttacatagaaattactacatgagtcttgttgttcggttttggaaattcatttgctgttgtgtctactgtaactgtaaaaagtgttgatttttatattgcaatatatattcatctgcttaattataaaaaaaaaaaaaaaaaaaaacggccaaaaaaaaaaaaaaaaaaaaaaaaaaaaaaaaanaaaaaaaaaaaaaaaannnngggccctta

SEQ ID NO: 92067 - DNA, 819 bp, Zea mays
  unsure (1)..(819): unsure at all n locations
  Clone ID: MRT4577_183962C.1
cgcgcgcgccggctccacccgctcctcgtcgtctgcggctgcttcagcgtcgtcacggccgccactgcgtcaccgccaacgtcgtctccgctgtccattgcttccgcgctggctccgacattttcggggccatattccggtgctatgcggtcgtcttctcactcttcgtcgccgtcctcgagaccaagtgggggttcatcatccggttctagacgttcctggcagtgttgctgtcatgacgaaggcatacccaataagtattgaaaggaatgatctgattttgctccaggagattgccagctacatgatttttgctcgtggagctatctatgcgatctcgatgctatttcctaaacgtctcctcaaaccagcgttgttttgtggaatctcccccacgacgggtcctcctgggggattattacccactgtcagcactgacagcgtgaagctcctagctttatctggtgtcaagctctccttgcaagcgctgattgacatggtcaactgcgttcccaacctggagaagctgtacatcgaggtggaagaagagtgttccagctactagatagataaatcattctatagtactactacatggcagactcttagcttggaaggcaatagcgcaaaaggcgtaaagcgggagaaaaaaagaagaggaggaggaggaggggcttcagtattggaccacgactccacgaacgatgaacaagtaatcaggcaccttttttttgttctttgttttttcttcgnaattaaataagagggcacggataaactattcaagcacaaagattcgagcgctgaaagtagtttgac

SEQ ID NO: 92068 - DNA, 317 bp, Zea mays
  Clone ID: MRT4577_183963C.1
gggacggagaacaagagcatagacagggtccatatcccaaatcaaaacaaaacatttggaccccatggctttggtattcatataaacacattttctttgggctagcccctagcatggagttggtttacaggggtatgtatgctggccccattagaggacctggtcgttgctggggaagaagagctttcaggagaggagtttattccacgtgtccggaacgccggggaggcaccatggcgtgcagtcgggggagtttctgggggtggggcgctgtttggcccaaaggtccacccactgttttttgtaggtgtgggggg

SEQ ID NO: 92069 - DNA, 242 bp, Zea mays
  Clone ID: MRT4577_183964C.1
gacgggagcacacagctagctagccagccagccagcagccagcttgctcgccgcgcccggggttcttcctcgcctccgtgggggtccgttccgtcccgaccgccgccgccgtcgcattcagggatggagatgaagaacatcgcctgcgccagcctcgtcgccgactcggcggtcaccgtggcactcgccgcggaagcttctcatccagaaccgaccaggggatcctcaaccgtcgcgcccaa

SEQ ID NO: 92070 - DNA, 298 bp, Zea mays
  Clone ID: MRT4577_183965C.1
gcccacaaaacggaaggcgaaacagtaaagaaaaataagtgtactttgtttctggcaatacaatgttctcaacgctcaacgctactagaaacagacaactgagccggctgagctgcgaatcaaactaccatcgactgtccttgtggagttacaacagagtacgatgacagccataatcaagaaccaagatgtccacgtttcgtacaaggattgtctattaccgactgatggcgtgagctcggaagcacttcacagcctcgcgataacagcttcgcccacgcgtccgcccacgcgtccg

SEQ ID NO: 92071 - DNA, 284 bp, Zea mays
  unsure (1)..(284): unsure at all n locations
  Clone ID: MRT4577_183966C.1
cccacgcgtccgaagtaaccacagaaaatggcgtcacttctccgccctctcgtcctcgtgctcctgatcgcctcctgcgcagcgcagcagtcaccgccggcgcagcccccgccaacgccgaacgcgccaccggccaactctgccgcccaggcgcctncagccggaaacccggcgccggcgccccaggcgccgtcgggaggcaagaccgcacctgcgcccaccggcacttcaccttcgggcccgaccacttcggcccccgccccgaccacaacctccccgggttc

SEQ ID NO: 92072 - DNA, 274 bp, Zea mays
  Clone ID: MRT4577_183967C.1
tagatttcgtgggcgcaccaggcgcccgggggatactataagcggagggcacgcctgatcaagcgcgccgagaacacggcccggtggacgagcggtatctcaatctctggcacacggctagaatcaccaacagccggcctcatctcgtgcggggcaaagattgagcaggcgcgtctgaacactgcagcaaagtcaatccctgtgagcggcgatgcggatactggatacggaaactggatgaaagctaagcggacagtgaaaggggatataaatg

SEQ ID NO: 92073 - DNA, 482 bp, Zea mays
  Clone ID: MRT4577_183968C.1
ctcttctcgggtttcacggaggagctgctttttctctctatggtgagaaggacaagatgaagtgagcatctttccctgcttctccctctcttctagggtttcagggagagtctggtttcttcttttccactctctgtctagggtttcaaggagaagcaagcatctttctctctaagaatggggtgttgagaagaacaaggtaaaggttttcgtatctttccagggtggtgatggtgacaagttcaaggtgacatggcgttgtgcctggctccctgtatgccacacatatatagactgatctgaactgagattggctactgtgggtggcgtgcgaggagccaagcataccctctctctctctctctctctctctctctctctctctctctctctctctctctctctttctctctctctgatacttatcatttgtgtagatcttttattttgcagagatttcaagcatagtcacacaactcatc

SEQ ID NO: 92074 - DNA, 162 bp, Zea mays
  Clone ID: MRT4577_183969C.1
gttccagatcagcaaatcttcattgcgtatttatgatcgtctaacagtgcagcattaagatggtcattcttctcgtcgtgtgcctgtctctgtcagctgccatcgcctcttcaatgcacatgccctgccccttcgcggggttgcatggcttgtactgcgctg

SEQ ID NO: 92075 - DNA, 234 bp, Zea mays
  unsure (1)..(234): unsure at all n locations
  Clone ID: MRT4577_18396C.1
ggacccgtgagcggacccctnncgactacatcttttatcgttatcgcctccctttcttttatttttgggggagcgtagtccttctagtgtgcactcgttgcaatctccaaatacatggccttctatctctccaactatcttcctcacgcctgatcaccacatccaacatcaaccctttcaggaccctcaccaaacttaattctctctccactacgaacaactagaccttcaatc

SEQ ID NO: 92076 - DNA, 433 bp, Zea mays
  Clone ID: MRT4577_183970C.1
accttaggggccccacttggaacgggaaagggatcaaaaaaaggggggggcgaggaaggaataaattattgggggaaaaaggaaacacggtgggacagacatttaaatccaaaaaggtaaacccacttcacaaagaaaaaaggtttggaaaaaccccgggaggcttggattggggggattccaagaaatatggggaaaaaagaaatttttgacatttttggggaaaaaaaaaaactttaaagggggggagggaaatccccaaaccaataggttggggggaaaaattggaagaaaagagggccttaaattttccctaaaaaaaaatcccccggaaaaaaagaaagaattccttggattggtaaaaggggtggggctaaagggggatacaaaaataaaccgggtgtgggatgggtcaaagaagggaatttaaaaa

SEQ ID NO: 92077 - DNA, 256 bp, Zea mays
  Clone ID: MRT4577_183971C.1
aacacctgttgaaaaacaataatttttatacaaaatttcctaacacacacgggggacccccttatacaaacacacccttcctcccggggggcccaccttaaaagggttgaaaccagaccacacactgcccataaaggggaaaccctggcaccggccaaaacaggaaggccccacgacaagcccccccaataaattgccactgggaactacacaaaatggagagggggaacaaatgcaacgtcacattcccatttgg

SEQ ID NO: 92078 - DNA, 356 bp, Zea mays
  Clone ID: MRT4577_183972C.1
cccacgcgtacactctctctacaatcatctctaccttctactccctcatgcacccttgtcaaattttacctttttccatccctcccactacatcttgttttttcaacaaccctccatcttttctgtatgcagaccacattaagatctgcatcaaccttttcataaggatccccattctcattaccagtgtctcccctcataccaagaatttctacctctttcccatcatcaacacctttcattaccacgtgactacatatacctcaatatacatactacatatactattccatttaccacttttaatactcaatcaaactttcacaactataatttacatccctagtacacccttt

SEQ ID NO: 92079 - DNA, 470 bp, Zea mays
  Clone ID: MRT4577_183973C.1
agcagtggtaacaacgcaaaggacttcgtttttttttttttttttttttattggcaggacgccacgcgataaacattcatggcgggtcaaaaggcgccacagggcacaggaacaccgcagaggccgacagatgcgacggtgataggcatacacaatcaagccagaatgccttattgatagcgaagaaggctacggtgcaacaacactggagaccatcgattctcctaagcaatggcggtcttcactccgtgccgtggcatcagatttaaagctaattagggacaggggtgcgccctgctggactgcccactgaggtgggctttgaaaagattaccaatgctccccattgcacactgcaggccatatcaaaccttctaacattgaggtactttggagttcctaagacaaacaggtggtcccggcctaagaacatccactaagagcgctttttgctacacatgacactgatg

SEQ ID NO: 92080 - DNA, 505 bp, Zea mays
  unsure (1)..(505): unsure at all n locations
  Clone ID: MRT4577_183974C.1
attcggaagggttctggatttgggagccaagcgactggcgcagcggcagagcccggcggacacgctcccccctgtcgcccattctcttcctccccgagcggcacccccgcgtgttgccgcttgtagcatcggggagaaaaatacagaggaaggacatgagggatccatttgatgcaccggttgatctcattaatgtggaccataatggtggctatcaactatccaggactggtgcggtttctgctggggaccatggtttacaaaatggtggacccaaatcccttgctccaaactccgacactgtagtcaggcatcaactccagggtgcatccttgcacaaagacttagctcttgaagatcctaatactcgtatcatggatcccgagaccaaggaactttactttagatcacaatcacaagaggacgagatcttgttgcttcgcaagaaaattgctgangcgtctctcaaggagctgagtttgctgagtgaaaacacattctggag

SEQ ID NO: 92081 - DNA, 158 bp, Zea mays
  unsure (1)..(158): unsure at all n locations
  Clone ID: MRT4577_183975C.1
cccaccgggtggacaccccgggcacccagacgcattgcnccatctacacgactggatggtgtgctttctcacaggccaaaggcccgccccacacacgtnnttgttcacgagcgctaccgccccgtctaggacaccttctccatggcgttcctgtgcga

SEQ ID NO: 92082 - DNA, 895 bp, Zea mays
  Clone ID: MRT4577_183976C.1
acgcgcgttgggactctcgaggggggcctggggaacccggcggccggccggggttccacccccgccggccacactcgtctctctcacgagccacagcccacaggtaagcgtcgtcttttcacgccgcgttcccatactctgcgctacagttacagtcacggcgcgtccgtcctgacgctcgccggccttgcatttaccggttctcaccgcctgtccgcgctgcccgtcgccagcaggctagctctctagcggtctagccagtccacgcagcgcagggatggcgtcgttcgccgtggcaacggccccgtcgctagcggccccggcagccaagaggaggcccgccgccggcgtcacgtacgtggagggcatgaacgcctacagcggcctcaaggggctcaacaaggtgaccatgctcggggtgcgcaagaccgccgactactccttcgccaaggtcgtggcgtcgctcagccccgcgggcaggaagcggcgcggcggggcgttcggcgcccagatgaacgccgccgccgagatcttcaggatcgccgccaccatgagcggcctcgtgctcgtcggcgtcgccgtcggcttcgtgctgctccgggtggaggccgccgtcgaggaggccgagtagggcgctcgcgcctgcttcataagccgtcatatatatataacgtgatagccgaggtctgacattgatcttcaggcgttcatatgaagagcgagaggaacgcaagcaaacttctttttattcacgcgttctgtggggtacctcaattatctgatctttacgctggaatggatgatgcgaccaaagatagcatctgtctgaaatgcacaccgtaataacgataaaacaaagatgtttcagactaaaaaaaaaaaaaaaaaagcggcc

SEQ ID NO: 92083 - DNA, 395 bp, Zea mays
  Clone ID: MRT4577_183977C.1
accggaaaaaaaaatttctagggcccccaattttgaaccacggcaaatttcccaattttccaaaccggggataatgcggaataattccgggggggagactttcttgggggcatccgggaaccttcccttaaaaaaaaaaagttccaagaccttcaaaaaaaagggttttttttttttcaaaaagattttgcctaatggaaaaaaaaggtttgtaaaacttttcccttttttaaaagctccgggaatatttggctttttgccccccaaggggtttttttttttccagaggcccccaaaaaaaggggccccccttgggtccacaaatgggggcccaaaaattctaatgtttgtggaagttttctcccctttttttttaaaagggggccccaattttt

SEQ ID NO: 92084 - DNA, 827 bp, Zea mays
  unsure (1)..(827): unsure at all n locations
  Clone ID: MRT4577_183978C.1
cattgggtacctcgaggccggccgggagttcacccccgccggccacactcgtctctctcacgagccacagcccacagcaggctagctctctagcggtctagccagtccacgcagcgcagggatggcgtcgttcgccgtggcaacggccccgtcgctagcggccccggcagccaagaggaggcccgccgccggcgtcacgtacgtggagggcatgaacgcctacagcggcctcaaggggctcaacaaggtgaccatgctcggggtgcgcaagaccgccgactactccttcgccaaggtcgtggcgtcgctcagccccgcgggcaggaagcggcgcggcggggcgttcggcgcccagatgaacgccgccgccgagatcttcaggatcgccgccaccatgagcggcctcgtgctcgtcggcgtcgccgtcggcttcgtgctgctccgggtggaggccgccgtcgaggaggccgagtagggcgctcgcgcctgcttcataagccatgatatatatataacgtgatgtatgctttcgattcaatctttggtatgtactgtatcaacgatgacaattgatgaatactgtggaaaacatgttttcagagccgaggtctgacattgatcttcaggcgttcatatgaagagcaagaaaaacgcaagcaaacttctttttattcacgcgttctgtggggtacctcaattatctgatctttacgctggatgatgcgaccnaagatagcatctgtctgaaatgcacaccgtaataacgataaacaaagatgtttcagataaaaaaaaaaaaaaaagcggccctcgagnctcagcttttg

SEQ ID NO: 92085 - DNA, 208 bp, Zea mays
  Clone ID: MRT4577_183979C.1
gttgaaggaacagtcgttctcactgtaagcaggacgagcgccctagttgcccccaactaggaaccacgatggacttgctcaaaaactctcaaacaaggaaaaaaggcgggcaggaaacaaacctgttggaagccgagtacatacaacggctgccaccactcacaaagaggaagggggcgaaacagatggaaatgcaggcgctacatct

SEQ ID NO: 92086 - DNA, 717 bp, Zea mays
  Clone ID: MRT4577_18397C.1
tggtaccctatagagtaaccccacgcgcccgttctcggttggcgccgattacgtccttcttattactcgttaaaccatcttatgtatctcgctgtgcgtgcgtgcgttcatgcacccgtgcaggagactgccgggatctgtggagggacgaagagcagggtcgcgtcaaactcaaaccaaaactgaaactggggaggatttggcaaacgcagggagtcaagaacgcaccgcgtgctctccttgcaagctgttgcacatgccctcgatctgatgagcaacacaacttgcaagggggttggttcgggcattgactctcttgctctgtcctcccgtcgtcgacctgccactctctcctcggtccatggccgggctgtagtagaagctcgtccgtcagacagctagctaggagcttagaccatgcatgcatgcatatgtagcttgtaactgggattcttccattgtaacgtgcctgtacctctgcctctgtgcatgcacggagcgaggttgtacgtctatggagattgcagaagtctaaaaccggttaatttgattttttttttccaccgtcggagattcattgcttctgtgttttttttacgttcagcatttttttagtatcattgttgcaatattgaaatgcatgtttatactcgtatttacatatttcaatatttataagatcatttacaccaaaaaaaaaaaaaaaaaaaactggga

SEQ ID NO: 92087 - DNA, 682 bp, Zea mays
  unsure (1)..(682): unsure at all n locations
  Clone ID: MRT4577_183980C.1
actcctatgggcgattgggtacctcgaggccggccgggagttccacccccgccggccacactcgtctctctcacgagccacagcccacagcaggctagctctctagcggtctagccagtccacgcagcgcagggatggcgtcgttcgccgtggcaacggccccgtcgctagcggccccggcagccaagaggaggcccgccgccggcgtcacgtacgtggagggcatgaacgcctacagcggcctcaaggggctcaacaaggtgaccatgctcggggtgcgcaagaccgccgactactccttcgccaaggtcgtggcgtcgctcagccccgcgggcaggaagcggcgcggcggggcgttcggcgcccagatgaacgccgccgccgagatcttcaggatcgccgccaccatgagcggcctcgtgctcgtcggcgtcgccgtcggcttcgtgctgctccgggtggaggccgccgtcgaggaggccgagtagggcgctcgcgcctgcttcataagccgtgatatatatataacgtgatgtatgctttcgattcaatctttggtatgtactgtatcaacgatgacaattgatgaatactgtggaaaacatgttttcagagccgaggtcgtctgacattgaaaaaaaaaaaaaaaaaagcggccaaanaaaaaaaaaaggcggccctt

SEQ ID NO: 92088 - DNA, 316 bp, Zea mays
  unsure (1)..(316): unsure at all n locations
  Clone ID: MRT4577_183981C.1
cccactcgtccgggcaagggacgtaagaagtattttnagattatagagccgttggttttagaggatttcaaaagattgctgtgtcaagggatgacaaactctgatcagacacatgatagacaaagaattgaggacccacgtggctttgctatgttggcttggacatgtctagagcgtagtgttctcgctatcatttgctcattttgtgataaactcttgaagcaatatgtcgtcgctttccctgaaattaatgatgaggtggtctacagctcccttgaattcctcatccttgctcgttatggactctgggatgttt

SEQ ID NO: 92089 - DNA, 945 bp, Zea mays
  Clone ID: MRT4577_183982C.1
ctcgaggccggccgggccggccgccctcctccatgttctctctcacgagccaccgaggataaactccgtcttagcaaccgtccattccgcgccccgccttatcctcccctcatctcccgtacaagaaaatgggtcccgcggccgcggccgggagttccacccccgccggccacactcgtctctctcacgagccacagcccacaggctagctctctagcggtctagccagtccacgcagcgcagggatggcgtcgttcgccgtggcaacggccccgtcgctagcggccccggcagccaagaggaggcccgccgccggcgtcacgtacgtggagggcatgaacgcctacagcggcctcaaggggctcaacaaggtgaccatgctcggggtgcgcaagaccgccgactactccttcgccaaggtcgtggcgtcgctcagccccgcgggcaggaagcggcgcggcggggcgttcggcgcccagatgaacgccgccgccgagatcttcaggatcgccgccaccatgagcggcctcgtgctcgtcggcgtcgccgtcggcttcgtgctgctccgggtggaggccgccgtcgaggaggccgagtagggcgctcgcgcctgcttcataagccgtgatatatatataaaaacgtgatgtatgctttcgattcaatctttggtatgtactgtatcaacgatgacaattgatgaatactgtggaaaacatgttttcagaaaaaaaaaaaaaaaaaaggccccggccgatcaaaaaaaaagagtccggcgagggtgcgtgggcctgccactgtcggctgtcgccccgggccgcagtctgcttcagaaaccgtgatatatatataaccagatgtacgctttcgaatcaatttactttggtatgtatccatgacaattggtgaatactgtggaaatatgtttttggagtcgaggcctgc

SEQ ID NO: 92090 - DNA, 301 bp, Zea mays
  Clone ID: MRT4577_183983C.1
cttcagaccatgagctatatctactccagagcgcagaagaacccgatcgacaccatgagggtgttgctcgttgccctcgctctcctggctctaactgcgagcgctaccttcacgcatacaatcggctgctgtggctgccagccaccgacgccgattcatataccgacgcccgtgcatctgccaccatcggttcacctgccacttccggggcttattccaccgcccgtacacatgccttcttcagtccaatttcaaccgccggtcatttttcttccgccggttaatcttcctccttcacaat

SEQ ID NO: 92091 - DNA, 540 bp, Zea mays
  unsure (1)..(540): unsure at all n locations
  Clone ID: MRT4577_183984C.1
cacgccccgtccgccacacgcnnggccgccgccacgcgtcctcccacgcgtccgcccacgcgtccgcggacgcgtgggggccgctcgacccaccatcaccgtctggtccgccgagggagagtcctctggctcgctccccctgccccaggtcttcaccgctcccatccgattggatgttgttcagcaggtccacaagtcgatggccaagaacaagagacagccatacgccgtcgccgagaacgctggtcaccaaacctctgccgagtcttggggtactggacgagctgttgcccgtatcccccgtgtgtcgggtggtggtacacagcgatctggacaggctgccttcggtaacatgtgccgaggtggtcgaatgttcgccccaaccaagacttggagacgatggcacgtaaaggtcaaccagaaccagaagagatacgccgtcgcttccgccattgccgcttcgggccctcccatctttggttcttgcccgaggacaccgaatcgagcagatccaggaagttcccctcgtcctctcctcgt

SEQ ID NO: 92092 - DNA, 870 bp, Zea mays
  Clone ID: MRT4577_183985C.1
tcagtcgctttcgcttccgcttcgtctcgcctgctcctcctcatcctcctcctcctccagctgtagcctcatctcccggttgaacctggcgatgaactcctccacgcgccggttcagctcctcgtccgacagcctcgagtactcgctctccagcttctccttctcgtcggcagtagtctccggcggcggccgcctgtccgtcgtcgtcgtagtcgcggcgcgccggagctgccgcctcggcttctcctcgctgagcaccacgctcttgtcctgcacgactacggggacgagggcctgcgacgactgcgagtgcgacggccggtgcccggcgcgccggtggtgccgccgcctcgccgcccgccgctcctcgctcccggccaggctccggctccggctcgccgtcgtcgctgcgctgccgccgtcgttggtcgccgacgggcttacgacgacgacgatgtctctgctctcgaccaatgcgtacgcgcggtcgtcgtcgccgctgctctcggcgatggccgccgccacgccaaccaaagaagcctgctggtccttggtcggcggcggcgcgtggaggccgccgtcgccgtcaccgtcgtcgtccggcgaggaggaggaggaggagcggaagaagagcatgccggagtcggcggcgatgacgatgatgatggagttggacatgaggaaccagaaggtggtgtcgcgggcgagcgcggcgggcgggacgtggaggaaggagacgtagagcaccggcagcgacatcaccagcaccgagatggacaccgtcctcatcagctgcttgctgctctgctgctggccggggccgggaggaggtccttgcatgctgctgacggtgctgagcagagggaacat

SEQ ID NO: 92093 - DNA, 248 bp, Zea mays
  Clone ID: MRT4577_183986C.1
attgggaaagccggaaggcaaatttccaacggggaaccacccgtacagctcttcgcccaaaaatcccccccataactttgtttaaaaaaaaaaaaccccccgggtttaacccaccctggggtgcccaaaatggcactttttatatgggggaaaccggttttttacaggccgaccccctttggttttacccaccaaaaaaaaacaccccgggctaaaaaaaaaaaaaaaaaatttttttttcccccccc

SEQ ID NO: 92094 - DNA, 261 bp, Zea mays
  unsure (1)..(261): unsure at all n locations
  Clone ID: MRT4577_183987C.1
gttcgcctcgtcagttgtcntttcctcccttcccatcnaccactgtctncagcagtccantcaganctcncannccncacgcctaccgatccgccnaaggttccaactccaatgctancnatctcnaggaatccgcgnctgaggcgcaggnganaacggctcccatggtngaagnccgcataatgcgtcaggtnnnccagggcgcnangccaactccgcncccttctgaatccncntcacatngcctgntnctgnnattat

SEQ ID NO: 92095 - DNA, 121 bp, Zea mays
  Clone ID: MRT4577_183988C.1
ccttacagattatcatgcacaacttaattcattacatgatgtgtgaattgacattatttctatgacaataggaaacaaccaaccgatgactggatgaactagactgatgaacagactgatc

SEQ ID NO: 92096 - DNA, 235 bp, Zea mays
  unsure (1)..(235): unsure at all n locations
  Clone ID: MRT4577_183989C.1
aaccagctacggacccccnncttaaaaatgtagagaaaacatttcttggtgctcggcatccacaaaaccaaacctcacctctactacctacccacctacctgcctacaaaaaggaatcgggcatatcttctaatctcattctcaaagacctaaaacacctcctcacagactcacctacatcattcaacgcacgccctcctggacagacacaaatatcataaacacgcaacaaaaa

SEQ ID NO: 92097 - DNA, 226 bp, Zea mays
  Clone ID: MRT4577_18398C.1
aaaactcgtgacgacgcatgcgcacgcccacgagagttttgactccatagagggggccgcgccttttttttttttgggacacacatggttactatcattatttcagatgaatttattaagttgcatctttggtgaccttaacacgggataacaccgacagtcaaaagtggccgagccgagagaaaaaacaaccggtagcccaaccaggaaacaagcacgatacggt

SEQ ID NO: 92098 - DNA, 347 bp, Zea mays
  Clone ID: MRT4577_183990C.1
attttgtttgttttgtctgtttgttgttcctttcttatttttttttggcgctcaaaaaacacatcctttgttcttatagaaagtgcttactattatatatatgagtaacaaggcaaaaacaaaaggaatctctctaatcatttggatagaaggatacacaaacttgcaagtccccttggaattaacatttaactctacaccagtggctgcagagttcacatactggagccgttgttgttaccagccaaacacactgatttactaaaccttgggccaatgtgtggcccgaacacactgaagtaccatcctaacttgaaaccagcccaaaaacaagctgcccaaacccc

SEQ ID NO: 92099 - DNA, 243 bp, Zea mays
  Clone ID: MRT4577_183991C.1
cttggacaatcctgtactaacagacgacactcgtctgggtttttgcacatactggtaggtaactctggaacaagctataagtccatgcctgatactggctacggggctgactgttgtcgaaagcgctgcaaagacgatagaagatgctaaactggcgtatcaatgatattataatctttgaacaagtggtttaggaccactgtgctcccgtttgcagaaccatgtcagttgatgcactttgtt

SEQ ID NO: 92100 - DNA, 280 bp, Zea mays
  Clone ID: MRT4577_183992C.1
aggattttacacgccaaccgttgagaagggagcgggcggggatattgagaaatgatgtgtttgtccatccccatgaaactttaactcagggtaactttgagaaagcttcattatcccgaggttcccactgcctctctagtaccgcggagatgtgttcttgctagatatacgaactgttacctgatctatgtaacttatgaagggtaatactctattgagggattgaacttatcaccaaaatacattggacaaaataattaaattagttgacaaatttttt

SEQ ID NO: 92101 - DNA, 492 bp, Zea mays
  unsure (1)..(492): unsure at all n locations
  Clone ID: MRT4577_183993C.1
attattttgtcatatatgctcattaaacttagacaccaacatagaaggaatattaacacgttcgtacataaaccaaagcaggcacaccctgcattatatatgtatgtatagcaacccatccctgtccgtcatcgctgctcatatcaccgatgaatcaatcatatctcgtccacgagctcttggaaggcgtccatcgcggtggctggcaggccgagcagcacgttgatgctcttgctctatttgccgtgtgcgaggaagaggatgacctacttctccggcagcgagactgggcccgacatgacgggctcgccccacccgaagtcggcgccgcggaactcgaggcgcgaccacgtggtgatgagcagcgtggacgccagcgactgacgggcccgcgtcgtcttgaagtagtccaccgccgaccgcatgtagtcgtcagtgaccatccgcacggcctnctgcaccaacccagatgcgcgcgacacgggcgcggac

SEQ ID NO: 92102 - DNA, 155 bp, Zea mays
  Clone ID: MRT4577_183994C.1
cggacgcatgggcacttcagctaaactgttctaaaagcttgctagctgcaactatagggggcactcaaatgagtccaaccattatatcaaagaaaacatgctatataatgcgttcaaaaaactatttatacacacggcatgataatgcttatccc

SEQ ID NO: 92103 - DNA, 324 bp, Zea mays
  Clone ID: MRT4577_183995C.1
aaacaaaacttttgcatgtaaattccacacacccctctgggttttttttttgaacaaaacccggaccaataacaaaggtggttttcttttgaaatacctaaatttttttttgggaattttatcacccgctcatttttaattttttataaagaaaaaacaaaacccccccatttaattgccttttttttttaaaaaattatctccccattccctttgccacgtttaaaacaaaaacccttaaccccaacctttttttttgaaagggcttaaaataaaacttccccactttatgggggggtttataaggggtaaaaaacttttttt

SEQ ID NO: 92104 - DNA, 597 bp, Zea mays
  Clone ID: MRT4577_183996C.1
taccggtccggaattcccgggtcgacccacgcgtccgtgcaacagaatcggcatgtgaacacagatggcaggattgagttacctgctgaccaagtacagcataaccaggtaatgtcatctgcctcacttgcaagaagtacagattcaggcagcccaggaatctcatctataagccagcggaaacaagagtcatctcatgacccaagtgcaattacctcaacctcgcagctagctagctcacctcaagacacctttgttggaagtgatagggtgttgccatcatccagccaaagcatgccgcaaaggcaaatgtccggtggtgtgcctgtacatggatatggcattggtggccaggtgcagctacaacagtctcggcagcaactccagtctcagcagcagcagcagcagcagcagaggcctgttgtccaaggtggtgtatatgctcacccctcaaattcaggacaaggatgatgctgaaccatactgggcctgcatttctgaagagcctcccttccccttgtaaagttacctgtacaggcgtccgtgctgtggaagatgtgtgcggatgatagtgctctttattcccaactttgagct

SEQ ID NO: 92105 - DNA, 568 bp, Zea mays
  Clone ID: MRT4577_183997C.1
ctcgaggccggccgggaaactgtatcatgagaacgggacaaggtctccctcccttcttccctccctcaaatcaggtaaccagtcccacttgtcgatcggccttgcttgccttgctactcctgcttccgtcgtgcctcactatcaattacgtccgtgtcgccatggccatgtccatgaaagagtactagatagggttgagctacaccatcatgaatatggatgatcaaaacgccaacagaaaggaggtcgtgtaggtgctgctacttggcccctgtttccatccgaggcatgcctaagacttggcaaggcctcacttcacttcacaaagtttaccatctgcgaagcaagattccgtcatgtatgaaggattttgcaactgccagcgtcctcgcggcgaacgaagactcgtgatgtgcgctttacagagagtggaacaatgatcatgcgcctgctcttccgcaagagctcactcacgcattgacactggcaccagaaaccgacgactattgctctgaaaatgcacacggaatgtctggcgagcagccagaccatcgagaagattagatct

SEQ ID NO: 92106 - DNA, 790 bp, Zea mays
  Clone ID: MRT4577_183998C.1
agtccttcaaccagacaccgcccctcctcttcctctgctctcctctcctctcccacacgcgtcctaacgcaagcaaagctcggcggaaagcggctcggacgccatgggcaaggactgcggcaaccacggcgaggacgacatccggcgcacgtgccggcgcttcctggccttcctcttcttcctggccctcatcgtcgccgtcatcgccctcatcgtctacctcgtcctccaccccacgcacccgcgcttctacctccaggacgcctcgctccggcagctggacgtgctcaccgccaacgcctccgccgccgcgggtgtgctctccaccgtgctccaggtcaccgtcgcctcccgcaaccccaacgaccgcgtcggcgtctactacgaccgcctcgacgtctacgcctcctacaagtaccagcagatcacgctggcctccgcgctcccgccggtgtaccagggccacggcgacgtcgaggtgtggtcgccggtgctcccgggcccgaacgtccccttcgcgccctacctcgccgacgcgctcgccaaggacgtccaggccgggtacctcatcctccaggtaaagatcgacggccgcgtccggtggaaggtgggcagctggatctccggccactaccacatcttcgcgacctgccccgccttcctcgtcggcgccggcggcaacggcgcgccgggggccagcgggctcaggttccagaacgccacctactgccacgtcgaggtctagccgccgaaccgtacgcgctctgcttcttcttctcctcttcctcct

SEQ ID NO: 92107 - DNA, 1120 bp, Zea mays
  Clone ID: MRT4577_183999C.1
cgccttcacagttggcacagcagcagcagcagcaactacggttcatgaatccgtcacagaataatatgcaaaggttgataatgcaacagaatcggcatgtgaacacagatggcaggattgagttacctgctgaccaagtacagcataaccaggtaatgtcatctgcctcacttgcaagaagtacagattcaggcagcccaggaatctcatctataagccagcggaaacaagagtcatctcatgacccaagtgcaattacctcaacctcgcagctagctagctcacctcaagacacctttgttggaagtgatagggtgttgccatcatccagccaaagcatgccgcaaaggcaaatgtccggtggtgtgcctgtacatggatatggcattggtggccaggtgcagctacaacagtctcggcagcaactccagtctcagcagcagcagcagcagcagcagcagaggcctgttgtccaaggtggtgtatatgctcacccctcaaattcaggacaaggatgatgctgaaccatactgggcctgcatttctgaagagcctcccttccccttgtaaagttacctgtacaggtatctactatccagacatgctcacaggtctggggtgcagtggtgagagttgtctcactagagtcaccagggccttatttgctgctggagcatctatggaatggcagggcctctgttttcagttttctgataaccttcctatgcttttgtaggcgtccgtgctgtggaagatgtgtgcggatgatagtgctctttattcccaactttgagctaactgtagcctcctcggtgtcaggtagataattatttctcctcaccattttggtgccacactgctaccttccatgtagtttgaccctaggttgctggaggtggttcttgtgagggcaaactccttgagtcgtcaaattgtaaccacgacactgggcccagttgtatatttttgccgttgaggtccatgttagaggcaatctcttttgtataagcctgtatattcagctcacaagccagtcaatgaatgcaaagcctttctttgcgtcaaaccaggaatgtaaaaagcttgagcgttttgcgtcgaaaaaaagatataatataat

SEQ ID NO: 92108 - DNA, 289 bp, Zea mays
  Clone ID: MRT4577_18399C.1
gagcagagacctgagctgtccttcctttacggacggcattctgggtcgaccgcacgatgtcggggcgcacatgggacctgcgacttactggacccgacgcttacctgcaacacgggtctgacccagcagcgccacggccgtcagggcaccgcggaggtctggaagacgacaagctacagacaggactgtggccccggctggcatcgtctgccgacacaccgtttgacacaccggattaaccttaaatccccacgtgtcgctggccagtgacactcgactgtgagatgcc

SEQ ID NO: 92109 - DNA, 1061 bp, Zea mays
  Clone ID: MRT4577_1839C.1
ccccgaccccatcaccgcgggaaaggtgtactacatcccactcaactcagttcctggacaggcatatgttacactacctgctcctcctgccccagccccagcgccaacagactatacattgtcagggacaccagattaccattcaagcaaatttccttatggatgggttattggtagcatgggagttgcgcttgctttaattgttattgctgttcttgcacttgtcctatggaaattctttggatataaaccccaagatcgtaacggccagagaaagagcccagaccgacataagtttcaactccttaagagtggtagtttctgttatggttctggaagatatttgtgttgccaatttggaaatgcaaagccaacaagagcggatggtggtgagcatcatatcaatgtccccaaagcaggtgtagcagcagacgtatttgatagggagaagcctattgtgtttacgcacgaagaaatactcatatcaactgactcattttcggatgcaaatcttcttggtcatggtacatatgggttctgtctattacggtgttctccgagagcaggaggttgcgataaagagaatgatggccactaaaacaaaagaattcatagtggaaatgaaagttctttgcaaggttcatcatgctagtctgagaattgattggctatgcagcaggcaaggatgagcttttcctggtttatgagtactctcaaaatggttcactcaaaaatcatctacatgatcctgaaagaaaggggtgttcatcactttcatggatctttcgggtccaaattgcacttgatgctgccagaggactagaatacattcatgagcacaccaaagatcattatgttcatagagacattaaatcaagtaatatcttgcttgatggttccttcagagcgaagatttcagattttggccttgcaaaacttgtagtgaaatccaatgacgcagaggcttctgtcactaaggttgttggaacttttggttatttagcccctgaatacctgcgggatggcctggctgctacgaagagtgatgtctatgcttttgg

SEQ ID NO: 92110 - DNA, 604 bp, Zea mays
  Clone ID: MRT4577_183C.1
aatccgcatcgcagagataggcgtcttcgtactcgcctacctccgcgactcaaacctttcccccttctcccaattccttccgccggccgccgctccacccgtacgacgacaccatgagtggagtgcatcttcgatccacatcggccaggccggtatccaggtcggaaacgcgtgctgggagctgtactgccttgagcatggcattcatgctgacggccagatgcccggtgacaagaccattgggggaggtgatgatgctttcaacaccttcttcagggagactggtgctgggaagcacgtgccccgtgctgtgtttgttgaccttgaacccactgtcatcgatgatgtgagaactggcacctaccgccagctcttccaccctgagcagctcatcagtgcgaacgaggatgcagacaacaactttgcccgcggtcactacaccattgtcaaggagattgctgacctgatgccttgatcgcgtcatgaagcttgccgacaactgcactgatctccagggcttcctctgcttcgacgctgttggaggaggaacgacctccggacgtgggtccctcctgctacaaagtctgtctgttgactacggcaa

SEQ ID NO: 92111 - DNA, 890 bp, Zea mays
  Clone ID: MRT4577_184000C.1
ctatctattctttaaataactatactaaaaacgaaaaaaattttgcatgattcaaatgaaaaatctttgattcctcttctactaacacgagttatactaataagagtagacatgctatatttatgtttgttcctgaagggaaaaccgttcaagctgttcctgaatagcttccttcaaaagggtttctgcttgctcggtgaatgtcttactagaagatataatttcttggaattgaggtttagtatcttttaggtgtttacgtaactcatccagaaatttctttacctgttcaatttctaacgaatcaagatatcctctcgttccggtataaatagtagctacctgctcttccactgggagagggtttgattgggattgtttaagcaattcccgtaatcgtcgaccccttgccaattgattctgacttgttttatccagagcggaggcgaattgtgcaaaggcttgtaattctgcgaattgagctagttccaattttgatttgccagctacttgtttcatggctttaattcgagctgcggatcctactctggaaactgaaatacccacattaatagcaggtcgaattccggcattgaatagatccgcggataagaatatttgtccatctgtaattgaaattacattagtaggaatataggcggaaacgtctccagattgagtctccactattggtaaagcggtcatactcccttcgcctaaaagagaatttaattttgcggctctttctaaaaggcgtgaatgcaaataaaaaacatcccctggataagcttcgcggccgggaggtcttcttaatagaagggacatttggcgataagcttgtgcctgtttggagagatcatcataaattattaaggtatgccgttcgcggt

SEQ ID NO: 92112 - DNA, 179 bp, Zea mays
  Clone ID: MRT4577_184001C.1
aaaaaaaaaaaaaaaaaaaaaaaaaaaaaaataaaaaaataaaaaagggcggcccaataaaagggtaccaggttacttacacatgtatgcgattaaatattctcttatatagagataccaaaattcaattcattggtcctgtaattacaacgtattgactgggaaaaccttttctttac

SEQ ID NO: 92113 - DNA, 295 bp, Zea mays
  Clone ID: MRT4577_184002C.1
cacgatacgtctatttacaaccagactaggcataagaagctctctatgtctaccggggccttgtattattagtaactgaagtaaggtcatgtgaatgatttcgtgatcccgtagctttgactccacaacgtgggacctgcgccttcttgaataacggaaatggtgaaacctttgaaggcttattaacgtgctagctgctatgatgaaacaaatcattttgattttcaggagattacaatttttttgtgctggtgattcaacaaggcattgttacacgtcgacacgcgttgacttt

SEQ ID NO: 92114 - DNA, 623 bp, Zea mays
  Clone ID: MRT4577_184003C.1
cttttgcaactatagataaattggctttggttaatgtcgaagggactggaatggctggtgtcccaggtacagcaaatgccatatttggtgctgtgaaggatgttggagcaaatgttatcatgatatcacaggctagcagtgaacactctgtatgctttgctgttccagaaaaggaagttgcattgggtgctgcagccttgcatgctaggtttcgtgaagcattggcagcagggaggttatctaaggctgctgtcctcaaggaaaatatgaacattgatttgcgtgtcatgggaatagctggttctaggacaatgcttttaagtgatataggagtagatttgacccagtggaaagagaagctacaaactgaagcagaacctgccaatcttgataagtttgttcatcatttgtctgagaatcacttttttcctaacagagttttggtagattgcacagcagatacaagtgttgcatctcactattatgattggctaaagaaaggaatccatgtcatcactccaaacaagatagcaaattcagggccacttgacaggtatcttaaacttagaactcttcagcgtgcatcatatactcattacttctatgaagcaactgttggtgct

SEQ ID NO: 92115 - DNA, 3184 bp, Zea mays
  Clone ID: MRT4577_184004C.1
cgccgctacccctccgcttccgccctctcgctttcgttgtcatgaggagcctcaccgtggcaagccgccacccgggcgccgctttctctacccgccgccgcccccttcttcaccccgccgcagccggaagggactcgaccttccagcggtgctggcgatgggaaaaaactcaggacagctccttcgggagctcactaaggaccagccgccttccaagaactgtgcacggagatattttgaagaatttgctcgcaccaactgctggtgctgtttcagttgagcaagctgaagctattgctgacctcccaaaaggtgacatgtggtcggtgcacaagtttggtggcacatgcatggggacctctgagagaattcacaatgttgctgatatagtccttcgtgatccttctgagaggaaactggtagttgtatctgcaatgtctaaggttaccgacatgatgtataatcttgtaaacaaggctcaatcaagggatgattcttacattgctgtactggatgaagtttttgataagcatatgacaacagcaaaggatttgcttgctggagaagaccttgcaagattcctgtctcagttacatgcagacatcagtaacctaaaagcaatgcttcgggccatatatatagctgggcatgcaacagagtctttctctgattttgttgttggtcatggagagttatggtctgctcaaatgttatcatatgcaatacagaagtctggaacaccatgcagttggatggatacaagggaagttctagttgtgaatccgtcaggagccaaccaggtagatcctgactatttggaatctgaaaaacgacttgaaaaatggttttctcgatgtccggctgagacaataattgctactgggtttattgcgagtacacctgaaaacatcccaacaaccttaaaaagagatggaagtgatttctctgcagccataattggttcccttgttaaggctcgccaggtgaccatctggactgatgttgatggggtatttagtgcagatcccagaaaagttagtgaggctgtaatcttaagcacattgtcgtatcaggaggcctgggaaatgtcatattttggggcaaatgtcttgcatccacgtactattatacctgtgatgaaatataatatccctattgttataaggaacatattcaatacttctgcccctggaactatgatctgtcaacagcctgctaatgaaaacggtgatttggaggcttgtgtcaaagcttttgcaactatagataaattggctttggttaatgtcgaagggactggaatggctggtgtcccaggtacagcaaatgccatatttggtgctgtgaaggatgttggagcaaatgttatcatgatatcacaggctagcagtgaacactctgtatgctttgctgttccagaaaaggaagttgcattggtttctgcagccttgcatgctaggtttcgtgaagcattggcagcagggaggttatctaaggttgaagtcattcataattgtagcatccttgctactgtcggcctgaggatggcaagtacacctggagtcagcgcgaccctttttgatgcactagctaaggcaaatattaatgtaagggcgatagctcaaggttgcagtgagtacaacattactattgtactgaagcaagaagactgcgtgcgggctctgagagctgcccactcaaggttcttcctctccaaaaccacactggctgttggcatcattggacctgggttgattggtcgcacactacttaatcagctgaaggatcaggctgctgtcctcaaggaaaatatgaacattgatttgcgtgtcatgggaatagctggttctaggacaatgcttttaagtgatataggagtagatttgacccagtggaaagagaagctacaaactgaagcagaacctgccaatcttgataagtttgttcatcatttgtctgagaatcactttttccctaacagagttttggtagattgcacagcagatacaagtgttgcatctcactattatgattggctaaagaaaggaatccatgtcatcactccaaacaagaaagcaaattcagggccacttgacaggtatcttaaacttagaactcttcagcgtgcatcatatactcattacttctatgaagcaactgttggtgctggcctccctatcattagcactctgcgtggtctcctagagacaggtgacaagatattgcgcattgaagggattttcagtggaacgttaagttatatttttaacaacttcgaaggagcaagaacctttagtgatgttgttgctgaagcaaaaaaagcaggatacacagaaccagatccaagagatgatctgtctggtactgatgttgccaggaaggtcataattcttgcaagggaatctggtttggggcttgaactttctgatattcctgtacgaagtcttgtgccggaggcacttaagtcatgtacctcagccgacgaatacatgcagaagttaccatcttttgacgaggattgggcaagagagaggaaaaatgctgaagctgcgggagaagttctgcggtatgttggagtggtggatgtggtcagcaagaaggggcaggtggagctgcgagcctacaagagggaccacccgttcgcgcagctatctggttccgacaacatcatagccttcaccacctcgaggtacaaggatcagccactgatcgtgcgaggtccgggggctggtgcggaagtgactgcaggaggcgtcttctgcgacatactgcgcctgtcttcctaccttggtgccccctcgtagtctgtcaaggttttgcggtgccgtggtgttgtgttgctgctctactactggtttttttgttgttgttgttagtgcttggaatagctggagtaagtatggattaagtgagttctggggtgttaagggttgggtgtcttagttagaaggtcgtattggagggaatggaatccgttcaccgtgttcttgcgtgttgcaataatcttgtgtggagtctccaggtttgttcggttgctgacagtaagccaagccaatggcgagtctagtgaagaaccaaataaaaaaggctgggctgtaaggaatgtatatccacacgttacttcattggtgtcaccataaatatatatacctggatcatattggcttggtttggtttggttcgt

SEQ ID NO: 92116 - DNA, 890 bp, Zea mays
  Clone ID: MRT4577_184005C.1
aaccaagccaaatgatccaggtatatatttatggtgacaccaatgaagtaacgtgtggatacattccttacagcccagccttttttttatttggttcttcactagactcgccattttggcttggcttactgtcagcaaccgaacaaacctggagactccacacaagattattgcaacacgcaagaacggtgaacggattccattccctccaatacgaccttctaactaagacacccaacccttaacaccccagaactcacttaatccatacttactccagctattccaagcactaacaacaacaacaacaaaaaaaaccagtagtagagcagcaacacaacaccacggcaccgcaaaaccttgacagactacgagggggcaccaaggtaggaagacaggcgcagtatgtcgcagaagacgcctcctgcagtcacttctgcaccagcccccggacctcgcacgatcagtggctgatccttgtacctcgaggtggtgaaggctatgatgttgtcggaaccagatagctgcgcgaacgggtggtccctcttgtaggctcgcagctccacctgcccccttcttgttgaccacatccaccactccaacataccgcaggacttctcccgcagcttcagcatttttcctctctcttgcccaatcctcgtcaaaagatggtaacttctgcatgtattcatcggctgaggtacatgacttaagtgcctctggcacaagacttcgtacaggaatatcagaaagctcaagccccaaaccagattcccttgcaagaattatgaccttcctggcaacatcagtaccagacagatcatctcttggatctggttctgtgtatcctgctttttttgcttcagcaacaacatcactaaaggttcttg

SEQ ID NO: 92117 - DNA, 836 bp, Zea mays
  unsure (1)..(836): unsure at all n locations
  Clone ID: MRT4577_184006C.1
gtaggcgaaattgtgagattgagcttcttgaagagaaaactgttctccagcttagtatggcagaagatcgcatgtgacgcctacattctctccaatctagggtttgcagaaccgagcatcttctttggctttgctttcctcctgcatggctcattacagaagagggagttgggcactttgacccagagatggaacttgaagaccattggctacatgttggttttctgtgttccggtgttcttcgttcaggcccttctcgtgtttgttgggcctacatttgttaaggatgagaacagtgcacagggaaggagagtgtttgctaaatacttcattcagacgtccatgccagttggggacaccaatgtttgcacctatccgttgtttggcaccatttttctgggacttatcgatgctgtcctgatgagctatgtctcctatgttggatctcgggtgttatccttggtcatcaacaaggcgctgcggaagagggttacgtggctgataatgtcggtgcttttcttccttcctataagggtgcttcttctagggttctcagtgatgcccaacccaggagataaagcatttgaggtcatcgtcttcttgtcatttgtgatgatgctatccggcacaactgttgggatactcttgctggtatactggcctgtccatgattcattggcactcaaagatgcaggcaacagggagatagcagagatggtgccttatgacgattactactatgagggctcatcgcttgtggncaccagagcttccgagaatcgagcggaactctgacacgtcacaaagcgtggcttcatatcgttccgcacaatgat

SEQ ID NO: 92118 - DNA, 245 bp, Zea mays
  Clone ID: MRT4577_184007C.1
atcagggcacagcagctgctttaatttttgctacctgtgaccaaccaagtggcgggggcaaacttttatccctactcgcagcaacaacattatctatcattcaaccaactgactacattgaaccgagctgcttattcgcattatacaactatttcctttcacccacctagctactgcctactattagcaacatcaacatcctaccagtaaccaattggctcgtacttcaccccgctgcttatctg

SEQ ID NO: 92119 - DNA, 258 bp, Zea mays
  unsure (1)..(258): unsure at all n locations
  Clone ID: MRT4577_184008C.1
cacaggtcctaattgcacatattgctgtttgttgtgtggtgtaagagcccaagttgtgttcatggcttaactaatgcaacaaggtagcttgcaatccatttaatccttaaattgaaatcttatgctttcttccatctttgaactaacgcttcatatgcttatttctatgttgttggttcttatccattatcaaattgctccacaantctgcatctcttgggtcagttgctcgcactggtggttgatttacagcttttg

SEQ ID NO: 92120 - DNA, 341 bp, Zea mays
  unsure (1)..(341): unsure at all n locations
  Clone ID: MRT4577_184009C.1
tttctctccagactgtgccgtgggantgggagtaggattatacaaaggtgctgggcactcaccagctgcnaccgccggtgtcggatatgaatgatagaagcggctccagggctgctgtgtacgagcgctactcgcattttttgtctctcatccccgtcctatacaactggtttgccaaccacaacctcgtctggccatccctcttatgccggtggggcccacatttttagaaatcttcctacaaaaatcatcaacctcctttacctatctcaaccaaacagattggatttttcccaaatactcctgcttatcccataattttttaattttcttaaaaccct

SEQ ID NO: 92121 - DNA, 171 bp, Zea mays
  Clone ID: MRT4577_18400C.1
aaggaaccttttggagatgctcttaaagcgacacacttcaattgcaaatgcaaatactgacctgctcgcatgaatctgccaggctggccagccacgatgtggggttgaaaaacctttgtttgtggcctggccccctgggtggatgaaagggtgtttcctttcaccatcact

SEQ ID NO: 92122 - DNA, 933 bp, Zea mays
  Clone ID: MRT4577_184010C.1
tcccccggtcctcactcacacagtcacactccttttcgggcatcggcccgcgcagtcgtgagttcgtgactgcggaggaagtagcgcaggcgaaaaggcggcagcagtggacggtggcgaaccctagcctagctccgcgagtgcgttggcggtttgattcgatggccgtggcgtcgcggctcgcggtcacgcgtgtgtcgccggcggacggggggcgccccgcggcggcggcggggaggaggagtgggctcgcggtggttcggctcccgccgaccgacagcagggggagaaggaggaggcgctgcggggccgtcgcggccagccccccgacggaggaggtcgtgcagatgacggagccgctcaccaaggaggacctcgtcgcctacctcgtctgcgggtgcaagcccaaggagaactggagaattggcacggagcatgaaaagtttggttttgaagtcgacacattacgccctataaaatatgatcagattcgtgacatactgaacgggctcgctgagagatttgattgggagaagataatggaaggaaacattgttatcggcctcaagcagggaaagcaaagcatctcactagaacctggaggccaatttgaacttagtggcgctcctctcgaaacgttacatcaaacttgtgctgaggtcaactcacatctatatcaggtcaaagcagttggagaagaaatgggaataggatttcttgggcttggctttcatccaaaatgggcactgagtgatataccaataatcccacagggaagatatttaatatggaggaattacatgcctaaaggtccaccctgcctcttgatatgatgttccggacatgtttcccgtggtcgaatccggaccgctgttcagcacagtatatgcttgggtgattgggggtcttcgccctgcgtggttctccgcgggc

SEQ ID NO: 92123 - DNA, 684 bp, Zea mays
  Clone ID: MRT4577_184011C.1
ccggccgggccgggactcccccagaacgtttaccactgacgaacattctccctcacatctcatctgcgatactcatggcggtgccactccatcgcctcacctacttcttcgaccggcgaggtctaacacaccatggcgcccgcacctatgccctctggcagcgcaggccctctcccctcaggcatacaccgacgcccggcgactcactatctccctacgcccggtgatcgtccgaaaccacaggaacgagcaccatccccgatctcatcatatgacgataaggagacagaactccttattgaacatgtcgcgaaagaaaggaaaggtgaagtgggaaggatgatacaaacgttgttattgactgaaacgggcaatgtgtggaagataactatcaagcactatctcgatacgaattagtactacttaaataatcgttttaaaaagatacgatcaacaccctcttccgtgtggaggatgctctcagactgtatgaaccggtctatacaacttaatactgattagtaactatgtgaagctatatgtccagattcactattatacaatgaaggctgataacacgtgaaaatatgcagctccgaaccgctatatatgatatagacatgaccgtatgcagttacagagtgcatatgtaatcagcgtttccagtcaatggctatgaatgaa

SEQ ID NO: 92124 - DNA, 304 bp, Zea mays
  unsure (1)..(304): unsure at all n locations
  Clone ID: MRT4577_184012C.1
tattcatacatcaggattcatgaacgtgcatctctgaggataactcaattcattttctcgcaccctcggctctcttgtttatagaataaacttttataaaggataaaaaaaagtcactctagttatggccatagctgagttataggtgaaatattcattggatcaggagttgaattaaagtacgtctctcnccagcagccaagccccctcttctctccaacccgccctggctcagctcccgcggccccgcccgtcccccctcccaggactggtctgtgantctttcatctgttcaagaggagat

SEQ ID NO: 92125 - DNA, 540 bp, Zea mays
  Clone ID: MRT4577_184013C.1
gccggccgggctgggactttcacaccaccacacattccaattcaagattccgactgactcttgtctctaactcatacaccgaactaaaagagagagatgcgccactcaccttctcaacgaggcggggaggagagccatccctcatcgagcgaaatctgcctggccacagatgtatccgacaagtggtgaacatctgctgcatcctcgttgtatacttcgtcgctgccaccatggccgccattggctttatatacacacaaattgagggcctgggctctgtgatctccaagcaccaaattgaggccaggaacagctcaccatgacaatctaaagcctcgatgcatgattgtgagagtacgagaagctgatgaacctctgcatacgcactgatgtgtgaatagacaatgcctgatgctgaacttatactttgctgcatgagcacacccaccaagacacatggcttttgatgtaggacgggtacctacttcacgtactggaacagtgcatcaacaatgactacatcatcgtcccaagtctgat

SEQ ID NO: 92126 - DNA, 256 bp, Zea mays
  Clone ID: MRT4577_184014C.1
aaaaaggatcacatatctctctctcccttccccctctctctctctggcgccttttcccggccagagtcgctcatggccacttctaaaacaaccgccatcgcatcacctgtccaatgacatacacatcccttctccgtgcaacctgtgcgcttctcgaatgctgaagctccctgtccctaagacaagcttgcacacgccatgaaggcttcttcaagacacttcctgcacggcattgacaagggatacacaccgccac

SEQ ID NO: 92127 - DNA, 388 bp, Zea mays
  Clone ID: MRT4577_184015C.1
aaaactactgtgaccgatgaaatcaccaccgttctggttaagacctaccgagacactacgcgggcattttaacagatcgacagcgcgccagaaaaaaaagctatgggaatcaccatctacacttattacgttccatacgactccactaccggtcactacacacacatacactaacagaagcacgcagactatcttaaaaacataatcaccgctgatgactcaaatggactagccacatcatgctactagctgtgactgacggataaacgacgtaaactgttgagcaaatccagctgagtcgtaactcttgccgtcctaacatcatctggatcctaaacaaatgctacatggctgatgacgaataactgatcgaactgattgaaatata

SEQ ID NO: 92128 - DNA, 248 bp, Zea mays
  Clone ID: MRT4577_184016C.1
aacatcttatctatgttgcacaataaatgatggttcttaacttgtcaacacccaagttggcactgcttaacatcacatcttctaagaaaacggactgtacacgggaaaaaagaatgcaagctcttcttgcaaacgaattcattgacaagaaactcatgactacctacggggccacggtttatttttctgacgcacatccgttcaagtgtagagaccactgaggcctgcaaagtgccaaaactgctata

SEQ ID NO: 92129 - DNA, 595 bp, Zea mays
  Clone ID: MRT4577_184017C.1
gcaccggtagcccccctgctctcttgggggtcgacacgtatggtcttcaaagttctctggttgctttctctgtgtactctatgtttgtctagtgcagtaatgtgttctattttctttggccatgcccatctgaataatggtactagctgtgctcgagtctgagctgtagtgtttagtcactgagaggcaacatgaagaggccttgtaatctgaagctatctgatgttgatacatacattcattgtcttcaaagttctctgattgctttctttgtgtaccttgtacctgcatatccgattgacgtttgtctagtgcactagtgttctattttctttgactgtgctatctgaatattggtactagttgtgcttgagtctgaactgtagtgtttagtcaccgagaagcaaaatgaagaggtcttgtaatctgaagctatctgatgttcatacatacaatcatggtcttcaaagttctctgattgctttctgtgtaccctgtatctgccatacgcgattgatgtttgtctagtgcagtagtgttctattttctttggctatgccatctgaatattggtagtacatgtgcttgagtctga

SEQ ID NO: 92130 - DNA, 579 bp, Zea mays
  Clone ID: MRT4577_184018C.1
ccgttatagaggacattcctttgaagcaatcaacattttctgacattgagaagttctgcccaccacattgcatacttgcaacaaacacatctaccatcagtttgaatgttattggcaagaggacaaattctcaagatagaattgtaggggcacattttttcagtcctgcccatattatgcccttacttgaaattgtccggaccgagaatacatcagcacaagctatccttgatcttattacagttgggaagatagtaaagaaagtccctgttgtggttggcaactgcacaggatttgcagttgagcgtgcattttttccttaccggcaaggctctatgtttctagttggccttggcgttgatgttttcagaattgatcgagtaataagaaactttggcatgccaattggacctttccaattacaagatgtgtctggatatggagtgggcttgacagtaaaggacatctgcgcagctgcctttggagaacgaaatttcagctctgagttgatggatttgatggtacagaatgggcggcttggaaagagtaatggcaaaggcctttacatttatattgagg

SEQ ID NO: 92131 - DNA, 765 bp, Zea mays
  Clone ID: MRT4577_184019C.1
attgggaccctcgaggccggccggattaagacatataactaattgctgctaatatttgtcttgctgttgatttgttggttttgctgtaaggaactagatactgtacaaccgtttaggcaaagggccctaaacctgtttccttgtatacagtttttgcaagcctgttttctttttgtgtcattctgaagcatgaatgctttattacccctcacggatataatgtggcgtgggatattttcggtgaatgtttgataatgtggcgttggatttagcttagtatcatagtatgtttctatagattatccctgacaggatctgtctttcctgacagacatagagctacttgctgctaatattacgagtttatgaccattcttcgaatgttgtgttaaattcaaatttgcatgtgcaggtttgtagtagcccccatatctctcttatgcccaggaactgggttattttgtggaactgtctcatgatagttccttcggtgttaattattggtcaacttagagcagctccaaaagagtcccatatctggtccctaagccctttttttaggaacaaactcgtggaaaaccatctccaacaggtgcccaaaactttcggaattgcgaatccaatcctctccaccacgcatatttttgtggaatgctagcgcccccaatctctgtcaaaatctgttcccgcgtgtatttttctaaactgcaggtgctgtttcttccgcgcgtgcgagacatgataggggcgcatctgtgttggggc

SEQ ID NO: 92132 - DNA, 271 bp, Zea mays
  Clone ID: MRT4577_18401C.1
cttagttcgtctttgacttatttttacaaaaaaagtcgagctacaggcatgaacagggcaagacagtaacttttaaaagaaaggagggaaacccctaggaggttctttatataccccacacctgatgctgaaaaaaaaacaaaatggggcccacaaagggggacactggggaacagttttgggggttgaaacctgtttcatcaaaagaatgtccccacaaaaaacagacccccccataaacctgcaaatgggggcggggaagaaatattga

SEQ ID NO: 92133 - DNA, 453 bp, Zea mays
  unsure (1)..(453): unsure at all n locations
  Clone ID: MRT4577_184020C.1
tcgagccggccgggcttgcgctccgcgccgccgcctccgacatcgtcccnttctgtcccacgagcgaccgataatccgccggcgttgagatgttggtttatcaggatctcctatctggcgacgagctcctgtcggattcattcacctacaaggagctcgagaacggcgtcctgtgggaggtcgagggaaagcgttccacccaaggtcctgttggcgtggagatcgctggttgtctatcaggacagcgctcactatctgacaccttaccctgctgaggatcagacacttgcattcgagagtgccgggtgcaagcgttggatcgtacacgaggcgtccagaccgcaacgttgtggcttcggaggtgagatatggggcatttcgtgacctctcgccgttctcctacttacctgtgattgtgcgttttgagaacgactatctctttttgagtatgca

SEQ ID NO: 92134 - DNA, 227 bp, Zea mays
  Clone ID: MRT4577_184021C.1
tcatacgactcgctctagggacttgattatagactcgagggctgactgcgccctataatataaatataagcttcgatgggctcattatctctacgcggatgggagagtcgagataagaatgaagaattccgatccccttctataatgatggaacgttcctgatggaattaatcctactttattaggttatgctctaggtcttgcgcataccttactatgaagactgc

SEQ ID NO: 92135 - DNA, 355 bp, Zea mays
  unsure (1)..(355): unsure at all n locations
  Clone ID: MRT4577_184022C.1
tntttttttttttttttttcatttttctttttttttttttttttttggtgcatgctcttatttgtttgttttcatttttttcattgcccctcaagggaaaaatcctgagagaacatgcccctattttttttttaagggaccacaaccggggcaattttttttcatttttacccaattttccaaaggagccccgcagggtttccccccactttagttttcaaaaaacaaaaaggaaaccgaaacccacggggtcttttccatatgggtaataaaaacaaaaacctgaaaggccgcccacaaaattgtggtttacccaccaggactggaaaaaccctgaaccaaaccctggacaccc

SEQ ID NO: 92136 - DNA, 391 bp, Zea mays
  unsure (1)..(391): unsure at all n locations
  Clone ID: MRT4577_184023C.1
gaaaggggggcaaacctgagacgaatagactctaaggatggaggaagagctcacaacccacacactggctaacagcagcagcaagacaaccccaggagccggcagagactttctcccacacgagccacngcggcaaaaacggcaaccagcactctttttacaatagaagagcgaacacgagaacctgctacgaaagggcggcaccaaacagcccaggaggccacccacaaagaacgacctgacacagctgcaaaacaaaaccaaccgcaccactgaaggcatgagacgaaagggtcgccaagcaatacctgcaaagccaagaagcggaaaccactatataaagatcgacgcgcagactctcaactgcaaaagacacatccagagaggcaag

SEQ ID NO: 92137 - DNA, 191 bp, Zea mays
  Clone ID: MRT4577_184024C.1
gggatgaccagggcaactccttgtttccaaccactccacaatggggaatcaccgctaggcccttttttcacttcaacaaaaaacgaggggggaaattgtaccggagcactgaaaaggatacttctcgggaagaaagagatcaaccctactgcttttcacaagagaagagaatgccattcccaaagggccct

SEQ ID NO: 92138 - DNA, 497 bp, Zea mays
  Clone ID: MRT4577_184025C.1
gctcgattggtgctgttcggtgtgctcaatcggtcaatcgaccacggacaccaccctccctccgcatcgaagtcgatgagcctcgggtggggccgcccgatccctctcgctcgccagcgctaccctgccgacccggctgccgtgactcagcggtgctgtgggtgatgcgctggaggcagccgcagcgcgacgctgatgttgacgcgcgccaagatccgggagatcttcatgccggcgctgagctccaccatgacggagggcaacatcgtctcctgctccgatgcagagggcgatcacgtctccaagggggacgccgtggaggtcgtcgagtctgacaagcccgacaaggacgctgagaccttccacgacagactcatgctggcggacctcgcccagactgcacagccggagacgaagagcgcagccatcacgctgctcgcccagccggacgagacggactcgctagctctcgccaaggttcacaagctctccaacag

SEQ ID NO: 92139 - DNA, 255 bp, Zea mays
  unsure (1)..(255): unsure at all n locations
  Clone ID: MRT4577_184026C.1
gggagacccactcttcctaatcaactacaactactnagagcttttatataccttgcagactactcttagcaacgggggatttttttattcaaccaacctgcttgcattgaactttgctgcttatttgcaacaacaactaccattcattcagctagctgttgactacctccaactatttctttcattcaaccaattggaagtcatatacctattcatattattcacatcagctacagcttccaccattcagtcaga

SEQ ID NO: 92140 - DNA, 395 bp, Zea mays
  Clone ID: MRT4577_184027C.1
gacgcgcagaagggaacagagaacggcctcttcagcaggagctactaccgagccatgacctggtgccattaacgaagcacatgtatcacaagccgattacacacgggacggccacggaacactgttgatcgatgctgcattctcactgaaatacgtagtggatcttggatgagtaagaaagtcatgtgacgctcagaatgaggattacacggaccttgctaccggagataccaacgacatcgtgtgcctgtgcttcacatgcctgcacagcgaagcaatgataggcatcaacagggcccatgctgtatgacagaaccaacaggtgacagtacttgagctggtaagtagggactgcatgcacaagcacatgggctgtcaagcacatcgatgtactc

SEQ ID NO: 92141 - DNA, 425 bp, Zea mays
  unsure (1)..(425): unsure at all n locations
  Clone ID: MRT4577_184028C.1
ttaacattcntnangtctctccataatggtctttttcctatcacatcaccganntcgtcattacttaacatggtctgggtcatccatcnaatttntnttantctttnatttttnataacaattacttacccnttaaaatanttgggctcattttttttttttttcacacaccactacacaaacaattgaatctcacaatcttcattacttcgaaaaacatagaaatttatattgaattcaaatactttgacttccactcaaaaccaacctcttctattttcacagacattgcaccatcttctacacatctgaaatccagttaatatttattacttcttgcaaaattttctataatccttttgtctcgcaatcttatccttcaatttccaaattttcatcctcaatctttacattttccaaaactt

SEQ ID NO: 92142 - DNA, 237 bp, Zea mays
  Clone ID: MRT4577_184029C.1
gggaagacgactcacatctcgccactcgattacagctagatcgagggagtaagtgagagtgagagccatgacagagctgctcgacacggccgtgaccagcctactacacctgccggaggtgctggaccggctcgccgacgcatacggcgaccggcggtcggccggccaccacgcggcgcacggtcacggtcacggacgcgttcacgggctcggcggcagctgcggatcgccggtgga

SEQ ID NO: 92143 - DNA, 312 bp, Zea mays
  Clone ID: MRT4577_18402C.1
accctcactgcccgctcccttatcgatccacgacccaacacctctacctcacggatccagaagcgtcccaccgtccctctgctcgatccatacgctgcgaatcgctgctcctccagtgcgagctgccagatctgtgcgcagactgtgacattgatctgggaccatcactctgttgactcaagagtgtgctagtcgatagtctccccctagcgtgtcaagctgataaaggaatgctacagccaggctttgctggagacgtagcgcccacaccacaggttcatagaacagtatttttgttcttcatcaaaccca

SEQ ID NO: 92144 - DNA, 381 bp, Zea mays
  Clone ID: MRT4577_184030C.1
gtgaggatcattatcttaattatttatgtaccatgttcaaaatgctcttgttttggggaatctgctccggagagagcccttgaagcttgttgatgggggtcagtctcagagaacctttgtctacatcaaggatgccatcgaagctgtagtgctgatgattgaaaatcctgctcgagccaacggccacatcttcaatgttgggaatccgaacaatgaagttaccgttagggagttggcccaaatgatgacagaggtatgccatatattgttgaccctgactggtgtacttgttacttgtttctattgtaagtcatctattgtgatcttgtcacgaggttctagtattttcgcaacggacaaaagagtttgagagtactacct

SEQ ID NO: 92145 - DNA, 310 bp, Zea mays
  Clone ID: MRT4577_184031C.1
cccaagtgtcagtcgacgaatctggaatgctaagattgcaagaaaggcctatgtcgcgctagccagagaggcatcgagcgcacaagtgtgtacaggcagatgtatgcatatggctaccaacaggtgcatccataagcgccccaagacgagccacgagcagcgcacgcgtgccgaccagcagcagccgacgcttcgcaggttcccgaagcagatgcggggcccctacacgaaggcgatcctgtagctcgtgaggtatagaaccctctagctcgccacttttgactagcacgaacacgcgcgtagggtctac

SEQ ID NO: 92146 - DNA, 291 bp, Zea mays
  Clone ID: MRT4577_184032C.1
tgtgctgcgctgccaatgcggagcccatcgagccacgcaccgaggaggcgcgtgctctgctccactacagcttcccctccacacctctgcgccactgacgccattcgtgcgcgcagtgtgagactgttgtccagtacgacaggcggggaacccccagcagcaaggctcgcgagcaagcgatcggatgcatgatgaggatgatacccgccatgactgactctgacctgactagcctgtcggcatcctcgacacctgtgtcgccaaatcgatgagtgaacgcggccaccaccg

SEQ ID NO: 92147 - DNA, 407 bp, Zea mays
  unsure (1)..(407): unsure at all n locations
  Clone ID: MRT4577_184033C.1
atgggggtcagtctcagagaaccttggtctacttcaaggatgccttctaacctgtagggctgatgattgaatgttgctgcgtttatctctggctcnnctgttntatgcactaatccaatgaggctgaactcttgttgtcaattgcaaaaggaaaatcctgctcgagccaacggccacatcttcaatgttgggaatccgaacaatgaagttaccgttagggagttggcccaaatgatgacagaggtatgccatatattgttgaccctgactggtgtacttgttacttgtttctattgtaagtcatctattgtgatcttgtcacgaggttctagtattttcgcaacggacaaaagagttggagagtactacctatattcgaaaggtctngatgtttgccaaattgatgg

SEQ ID NO: 92148 - DNA, 608 bp, Zea mays
  Clone ID: MRT4577_184034C.1
gcgatgaatacctccagaaggcggggagaatttcaatgctccaagaaacagccgccgagattttcccgcacaagcgtcgcgaggcaggagagatagagaggttgcctcgcaaaacaatgttttgggaaagaggcaggatgtgcgcctgtggcgtcaacaagttctcggagctccagcccatcgtgactgcggcgaaaggcgccgttagacacaaggactacaaggagcccctgccgaggacggtgttctagcccggtgagctcaagtcctggtccttctaccgcgcgggcatcgccgaggtagtctccaccttcctcttcctctacatcatcatcctcaccgccatgagcgtctccaacttctcctccatttgcgccaccgtacccatccagggcatcgcctggcccttcggaggaatgatcttctcgttcgtctactgcaccgccttcatctccggaggacacatccacccagctgtgactttcgggatggtcttagccagaaagctgtccctgactatggccctcttctacatcatcatgcgatgcctgggggccatctgtggagctctactggagaaggccttccattacggactttacatgggc

SEQ ID NO: 92149 - DNA, 376 bp, Zea mays
  Clone ID: MRT4577_184035C.1
cggccgccctttttttttttttttaaagcgaaacgagcatttttacccaattcgtacgtatccccgacaaaaatctcgggatacaacccggatcatcaccgcgctaaggcagcaagaacgcacaccggctctccctacctccgcagccgaccgaccagaccgcgtcatcgccgtccagaggcgaggcgtcttcgtcttccgcctgcaggtcctccgcgctcagcagacgatcgaagccgcgcgaaacctacggccagcaccgcaacgcatcacaccctgcggttcagccacgccacgatgtcgtccatcaccctgtccttctcgggctcgatcaggaggtcgtgcagcagcccgtggtagagcctgagggacttgt

SEQ ID NO: 92150 - DNA, 688 bp, Zea mays
  Clone ID: MRT4577_184036C.1
gccgtgccggggttcacatcgccctacccgccgtacccatgccagacgctggccaccggctccgccgccgcagcgactacatcgggggtgtgcagcctcccatcagactcccgccagcgccaaacccttcgactcggcgatggccacaccggagaagaagtcatacccacctgccatggtcgcggaggaggtgagggtgtgaggctgactggcgattggacccgtccccccattccacccgccgtcgccgacgtgtctgtccaagtaatgacagagggaaaacaatactaggattagagatcctaagctactaactgatcttataaaatcagtccgtgtacatttgtctcagtgttgctgaattttgcttagcttggcatctggaaactggttcgtcccttcttatatgaggccagctattttcaactcaactctgaatgaagtttcagaggcaggaacacaagcacaaactactgtccagattgacgaggagccaggttctgatgaagacgacgatcttccaccacttgaagcaaacaccaacatgaatagaccatatgaactaatttctcaacggaacaactaattgaattttttgtccagtgcaaggtattagttgtgtaacaaattgttaaattctcacatgtcagatagtggtgcattcgaaaaaaaaaaaaaaaaagcggcc

SEQ ID NO: 92151 - DNA, 1087 bp, Zea mays
  Clone ID: MRT4577_184037C.1
gcgcgccaccagcaatctgacgtgtgtccggacctgacctactttttcttcaatccaacatagccatgcgcgacgtccgtcgcgtactcccacgcgtccgggactgctcgcgcctctcgcctccgtgttcacatcgccctacccgccgtaccacatgccagacgctggccaccggctccgccgccgcagcgactacatcgggggtgtgcagcctcccatcagactcccgccagcgccaaacccttcgactcggcgatggccacaccggagaagaagtcatacccacctgccatggtcgcggaggaggtgagggtgtgaggctgactggcgattggacccgtccccccattccacccgccgtcgccgacgtgtctgtccaaggtgagtccgccaacgagtacatataaaattcatcagggaaggttgttcgcccaaagccttaccagactcgtgactatccacaaaagaattatttttatataactgaattttgtgttgtattttgtactttgtagtaatgacagagggaaaacaatactaggattagagatcctaagctactaactgatcttataaaatcagtccgtgtacatttgtctcagtgttgctgaattttgcttagcttggcatctggaaactggttcgtcccttcttatatgaggccagctattttcaactcaactctgaatgaagtttcagaggcaggaacacaagcacaaactactgtccagattgacgaggagccaggttctgatgaagacgacgatcttccaccacttgaagcaaacaccaacatgaatagaccatatgaactaatttctcaacggaacaactaattgaattttttgtccagtgcaaggtattagttgtgtaacaaattgttaaattctcacatgtcagatagtggtgcattccatggcttgaagggaaatgtgcccttgggccatttctaagtattttggtgattgagtgccaacacaagtgcttaaatgtgaatttatgctcatggatgaacaaagtgcaaatcaagagtaaaggtatgtttctacgccttagtaccttgagattagtgcaacatatacttgtc

SEQ ID NO: 92152 - DNA, 339 bp, Zea mays
  Clone ID: MRT4577_184038C.1
gctaacttgaatcaccgacctgacactggtgagatgcttggggttcacattgctggtttgcatgctgctgagctcattcacgaaggatcaaatgccatcgccctaggaactcgtgtgcaacacgtcagagtttggtgcttcacgcacaggctacattgactgaggtcatggatggactcttcaaagcagccaaggttaattcaggtgattctcattctgtacatgaaccagttgcagcttagagaaaggcctgatagcatacctaggtagacactgcaaccactcctggaagtcctcagcgtcgtcatgatcctgaattcttacccatgacgagttgac

SEQ ID NO: 92153 - DNA, 319 bp, Zea mays
  Clone ID: MRT4577_184039C.1
cttgtaactcaccaaaagaaaacaaccaggggctgattcgcgtaatgaaacatgcctgaaatcgtcttaatacatccccatcccacccacgcctcattgattgaaacagcgaacctaaacagctggaccaccatccaccgtacatcgcgtatccctgcccatcccaaaataacatttatgggtgggagcctcggcctattatgtacatacatcttctgagccgcacgtaggtatgaacgggatacacatagcggtgcggatacacccggaagtacatgggtagcggcccagattgagattccagcttccaataacctac

SEQ ID NO: 92154 - DNA, 215 bp, Zea mays
  Clone ID: MRT4577_18403C.1
agttggaaaaagcacattctcagcccaactctcgtttgccctagctgaaatggaccatcatgttggccttcttgacatagatatatgtggccctaacaatcctaaaatggcaagcctttaaagaacaaaaaattatcaaaagaaaccttggtggtcacccgtttaagttgaattcaaacctggtgtgaaggtcaatggtttcaagctgcccaaat

SEQ ID NO: 92155 - DNA, 385 bp, Zea mays
  Clone ID: MRT4577_184040C.1
cggacgcgtgggcggacgcgtgggctgcagaactagcatgcgtcacggtgggggacgagactccccccacctgattggattgcactggagggcaataacaaatgttttactcaacagcgtttacagcaacatgagggattgtgataggcatgcagcagtgagtaagcaatatctggtgcctaggtatgagctcttttaccatccttgagagcacccaagaggtatcacaaactatattgacattcttatacggacacatggcatttagggaagaaaacacgacaaagtaaatagatggtaaccacctctgaaacaactagctcagacaggtctggaatgaacaataacctatggctaagtgaggatctggtatctgatttcacct

SEQ ID NO: 92156 - DNA, 281 bp, Zea mays
  Clone ID: MRT4577_184041C.1
attcggctcgagcggtggtcgacgatgtgttcacccgcagctggtagttcgtcaggaacttcatcctcaccatgatggactgaggctggttcctgctcggcaactgcgtcgccatcctcgctttgtttaacacggaccaccagaaggggggcttaatggacctaactacggaggcacacatggacgcagcgggggatatgccattgaagacaggacaccggctgatcctggggaacacgtgccagagagaacagggctgaaaccgcgagaacacaggatgg

SEQ ID NO: 92157 - DNA, 154 bp, Zea mays
  Clone ID: MRT4577_184042C.1
gactttggaagttatgctatgtcagtggattgatcagtgagtgccgtaggtagaatgataagcctctacgatttgttcaccagtggggcggataatgtaggagtcacgtgctagcatttctggtcggagctatgcgtgcatgaagaattgcgca

SEQ ID NO: 92158 - DNA, 380 bp, Zea mays
  unsure (1)..(380): unsure at all n locations
  Clone ID: MRT4577_184043C.1
ccggcggctccggcgacggtgagtcgccggcttccatgacaccggccggggtttgtttcnctcagaaccatctccatatgctgctaccgcccctttttctttcacccttccatttgttccttatgtacaccgacttcctattcttcttttatttgccttatctgcttctgtgtgctatcttttttaatcccctttttatttatgttaccattcatctatctttaaattagtcttcttctattattttttttatttatttctaaaataacttcttactttattatcggccttattttcatttttctttctttatatatatatttttattttacctaattttttatatttcttttctactttattaatagatattcttattt

SEQ ID NO: 92159 - DNA, 119 bp, Zea mays
  Clone ID: MRT4577_184044C.1
tatggtacatttgcttggtatgcactgacagcggactcacaaatttgggcagtgtatgtcttcccaacgaactttcggaaaggacctcttaatggtgggtaaaacacttggttccaagg

SEQ ID NO: 92160 - DNA, 689 bp, Zea mays
  Clone ID: MRT4577_184045C.1
tcggggagaagctcctataaccgcgccgtcttcctctatgaggctgcctctgagtctctgcctgtgtgtctcgaacgttctcatgtcaatggcgtgatcgtgcgcagtctcccaggatcgctaaccgacagacgtcaggtaatagccagcgtccgcagcactcaacatggggagcctctaatcgtccgcgtaatcaacaaggtcttctcgtagcagtagctgctgctactgcgggggggtgttcaagtgttacatatgattcgatttggcttactagccaatattgtggctgtgcgcatacctcgtctgttgaccgtgcctctactagaggctacctatccgctcgcactctgcccactgcccgtggtcgaaggcctgggcctaggaggagaacctcgtgatccctgcactgccgcgcaatgactcgagcgacccgagatcaataacgtcctcgaggtcgatcgatatccccagctcctccgacgtgtctgagaggagcgaccacggtgtccgcaggtgataccccaacaaggcccactttctcatggccgccatactgcgacgaacccgcgcttcatgggcggctcacgcggagacatcccactggacaacactcgctgttggaactacaccttctcagcggacgttcagtgggctgttcccactgctcagtttccaagtgcacgggt

SEQ ID NO: 92161 - DNA, 405 bp, Zea mays
  Clone ID: MRT4577_184046C.1
atcgggataaatcccaatcaattttttggttttttctgggaaacccatggcgggttgggggcccccttggcggggccctctcatttggaatctaaaaggggggccccccaacgatgggttgctgcaagggagggttcatcaaagagaaccgggtgtttgggaacaattgttgttgctgctgccggaagggagccaccaatgggttagcccctgccaatgggttaagtaactggtggcgctgttggggggcccccccaaagtttgacccaacccgttggttgaatggaaacaactgttgtaagtaggcaacagggtttgccccaacttgctgggtcagagctgggacaatttggtgcaacaaccggtggtggaggtccctaggggcattgcccaccgggagggggc

SEQ ID NO: 92162 - DNA, 280 bp, Zea mays
  Clone ID: MRT4577_184047C.1
cccatgacgtccgcggccgcgtcagaaaacccgaagcgtcagatgagggataaatatgacaaacaggacgatatcgaagacgacgagaaggccaaccacgtggtcccttcttccgccaccaagaacccgcctccgccgccgcacactggcgaagattcggaggcttccgacgaataagaggatatggacgcggacgacgagatgccgcagactaagcccgctccaaatcaataggtggaagctaacggtgcttaacggccgagcgcgccgttccaccgca

SEQ ID NO: 92163 - DNA, 116 bp, Zea mays
  Clone ID: MRT4577_184048C.1
ccgggcgcggacctttctactacgtctctccctgactcggcttctcttttccggcgacgacggactggacgagtagtggcgctctgactcactgttacattgtgccacttcgcacc

SEQ ID NO: 92164 - DNA, 167 bp, Zea mays
  Clone ID: MRT4577_184049C.1
caacgcaacgtaaacgagaaaccggactagctcaatgaaccggtacaaagggaaggtatgagcttagagcaccaagtacctgcttacatatgagcaatttcctaagatctcattcggtcactccatacctgcaaaaaaatttttatttttttaagaaacaacaaaaa

SEQ ID NO: 92165 - DNA, 226 bp, Zea mays
  Clone ID: MRT4577_18404C.1
ctggattattaaagaagcggacgacaaagctaccaaaggctaaacggcatacccgggtaatcctgacaaactcgtgcctgggaacgaacatagacttacgtctggggattagacgactggtgccccaaggtggcacatactactatcaataaaagccgacataacacggatatcgaaggaaatgaccgggccaaggtgccacctgaacagccgggagcccccaatt

SEQ ID NO: 92166 - DNA, 546 bp, Zea mays
  Clone ID: MRT4577_184050C.1
gcggttgttgggggtttttttttttttttttttttttttttttttttttttttttttttttttttttttttttttttttttttttttttttagcattaaaaaaatgggggcctttattaaacggggcgatggctaaaggaacctccgtctcagaggggggggggggtccatggccccaaaacggacaccaacaccggcactaggccttgatcccccgcgagcggagcgacggggggtgcacaacccggggcaccccgggcaactcgaccagccactttccaagcgggtcccggggggacccccccacccggtccacagggagcaggggggagttccaggccaggacttccgggggggaggcccccaacaaggaaacccccatggaccacctggggttgaacacgtacctcgggccccgggacacgtggggcaccacgggcctggggaaatcccccacaggctcggccggggtcggccccaagaagggggtttttttggcctgggccaccttaatttcgcctcccttggggagcaacttccccttgg

SEQ ID NO: 92167 - DNA, 936 bp, Zea mays
  Clone ID: MRT4577_184051C.1
ggtacctcgccgggcggtccgttgaaatccggacaaagaaaagaccagaaaatcgccgcgtggtcggtccatccggggcgacttgacttccctctgcaacctcagaacccagccaatccgctgatctcaactgccgggcactccgatccggcgacgatggaggggagcgccgactccttcgggtccttgacggcgccgcttgcctggcacgacttcctcgagcgcatgcgccagccttccgccgccgagttcgtcaagtccattaaaagctttattgtgacattctcaaacagagctcctgatccagagaaggatagtactgctatccaggagttcctggaaaacatggaaggggctttcagagcccacaccccttgggctggcagttcagaggaagaactagagagtgctggtgagggacttgagaaatatgttatgacaaagctgtttaatcgggtattcgcatcagtcccagaagatgtgaagagtgatgaagaactttttgagaaaatgtctttgctacagcaatttgtaaggcctgaaaacttggatataaaaccagagtaccagaatgaaacatcctggctgctcgcacagaaggagctgcagaaaataaacatgtataaagctccaagggataagcttgcctgcattctgaactgctgtaaagttataaataacttacttctaaatgcttcaattgtgtccaatgaaaccccccctggagctgacgaatttcttccagtccttatctacgtcaccataaaggctaatcctccgcagctccactcaaatctgttgtacatacaaagatatagacggcaaaggaaggagatgcttttgcatttttgtggcgacgtggcacaaggggagaggaggcgacaggtgacaggcaacaaagaccctagagggatgactgccctggagaggcgacag

SEQ ID NO: 92168 - DNA, 193 bp, Zea mays
  Clone ID: MRT4577_184052C.1
ctaatcgtgagctgaccccttttttttttttttttatcacataaaagaataacactagcgggtaggtgcacttacacagtccaaacttcctctacaactcatcattctgtaataacatcggatgtaacatggcaccactttcaaagtcaaaaatattgaaatgtcactcaagcgatagcttaaagaatgtata

SEQ ID NO: 92169 - DNA, 1468 bp, Zea mays
  Clone ID: MRT4577_184053C.1
gttttttttttttttcttgtttttttttcctggagaatctaatcttactcagaaaatgtaaaatttgaagcattaccaaaaacaacgccttcagttggtccaaaaattagcccgacaccattcgttgtaacattttaagagaactaagggtaaaaggcatgtttctcattctgaactcctcgaccttttctttcgtgacctcaactttggtttcttctcaccaccagctctccctgttgccatgtgcttccgctttgctgttgtcgcatctgcatccccaaccattaggtgctcataatcatccaggcttgcaaatggagacaacccactcttcttccctgccctccttttctttgtgtaagagacaccgctcttaccagcatcaaccatctcgtcatcacttaagttgccatctgaatcacccgcgagaataggaatgtcatcgtcattttctgatccttcatccccagatgcagtatcatctgaaacgtcatcaaattccacatcactgtcatctctaagtaaatctttttcctcttcaaatgcatttgagtcaaggtcgtcatagtcatattctccatcatctgccaacccatctcccagatccagtatctcatctccactctcgtcactagcctcatcagcgtcattatcagctaagagttcccccgcatcttcatcaagaactgagtccttctgctttgtcttacgcttaacagtgccggtcttgttcaaatagaaacggtggaaaacaatatcttcaggaggcacttcattttctgccaattctagaagctcctctccgatgagatgatgattcagattaagctttttagccggagcaatttgtgatccaccatgccatcttccttcagctatgcggttcccttttggtttcttttccatgaatttgtcaaggaaagcaggaagtgataggtctgtcagcggatcaccactgtaaacaatattgttgccagatagcaatgttctagccatagtagaaactgaagggtgcacatgtgaagccaatactgttaactcccaccaactgacacgatctgcattgcagtaagaaggctctctgtgtcgtggatcatataatgcatgttgtctggacgagtcaattgatacattgttctcatctaccaattttacttgttttacactatcaattccatcagcagcaccaaggttgtgtttctcatgtgcagctactttttcattatgtttatgtagcactgctgaggcaacagaagagtcctcgggaatctctaaaatgtcttcaaagtgttcataaccatcatcaacagattcattctggagcacaatcccccataatggtggctttgccttaaggacttctgacagaatgaaaaggcatccgcaagcatattgaggaggccgttgaagagccacctgaagcagccgctttgagaaagcagcaactctcttcaacattacatcattc

SEQ ID NO: 92170 - DNA, 261 bp, Zea mays
  Clone ID: MRT4577_184054C.1
cttacacgatggccaaatgcgacacacgcgatggctagtacatggactggtgcctcatgttccggggtgatggatcccccaaggatgtgaatgctgatgtggccaccatcgacaccatactcaccatgcacgtcgtgtattgctgcgctactagcttcaagtacggcatcatctaccagcctgcttacgttacgcctgatggcaacctggtcaaggtgcaccgtgccaggcgcatgatgtacaactccaccaatgatgcgg

SEQ ID NO: 92171 - DNA, 844 bp, Zea mays
  unsure (1)..(844): unsure at all n locations
  Clone ID: MRT4577_184055C.1
ggaaccggagcccccacggtcgtcgccacccgccgttccccctctccgaatcgcccagaatcaccctcactccactgaccggaagctcggtttcgtgcagcggaagagagatacgcagacgcacctggagtccagtgcccaacgccgacgaacggcggaggtaccggtgaagcccctcggcgcgagcccgtcctcacccccgaaaacgctctcccgaacccaggacctcgacgggcgagacccgcgcctcgctggtgtggtgactggtgacgacgagcggcgaactcaggagggaagaggcctaggcaggcggcgggggcgtccgcgtcatcgagtccaacattcctcttcaaccgcgccatcgagtccctcgctgcctgcggcagtctcgccgacgtgcgggagatgttcgacgcaatgccacgccgggacggcggttcctggaacgccatcatctccacctcgtcccgcgcggggcaccctgcagaggcgttctccctcttcgctgacatgaactctcttggcattcgccccaaggacgtcatgctggcatcagtgcttgcctgctgtgctgctgagtgccttgacctgcgtggtgcacagcagctacaagtgattctaggcacggcactggtcgacgtgtacgggaagtgcctctcccttacggacgcaacgcaaggcgggcatttgatgacatcctacaaccccaatgacgtttcatggaacataatcatcncggaggtatcgtcttgctggtatgggcgacatggcacttcaaatgtttntcatgatggtacgggctggcgttaggccggtggtatatactgtcgcacatgcaatgctt

SEQ ID NO: 92172 - DNA, 691 bp, Zea mays
  Clone ID: MRT4577_184056C.1
gcagctcttgccaagggattataagatccaaaacccaatcaccattagctccagcttgaaccagaagtttcaaacaaggcacagaagagtgttttaatgccatgcttaatggtgtaactttatcattcaaacgctcgttgggatctgcaccgtgctccaataaaatcttcacgatactaggatatcctctaaaggtagcaataatcagtggggtcaagacacttgattccacatcaacacgaactcctttagaaagcaagaatttggctatttcaggacgcccgctctctgcagctgaatgcaaaagactcattcctttatgctgatgatgaagatcagcgccgtgatcaacaagaaaccgcagggctggaaggttcccatatagcacggcatgcatgacgggagtgaagcctcgcatggtgtcagccttgttgacgtcgattttgagatcctcgaccagatactggagagcaggcatgcagccactgtcacaagtggcgtggagggcgtacatgccgaggaagtgggtgttggccaaggtgtcctgaagcccttttccctcaatgtcaatgatctttgcgatctccttgaggcggcggatgtcgccgtagtaggcggccacgaggaggcccgctgcgggaggccagttgtcccgagctttccgaggacgagattcccggccggctcgagg

SEQ ID NO: 92173 - DNA, 262 bp, Zea mays
  Clone ID: MRT4577_184057C.1
aaaaaacaaacaaacaaaaaaatagattaaaaaaaaaaaaaaaaaaaagacaaggagggctttaaaatccaagtacgagagcacagactagccaactattagatgattatttagcgctacctaacttcatttcaccggcctgtgaatcacaacttcatgcactggtaaaacattctcgacactgatctctatcggttcacatactatattcatgtcgatagtttgcgatctaacgacaaggcccgcaatattcatccttcct

SEQ ID NO: 92174 - DNA, 471 bp, Zea mays
  Clone ID: MRT4577_184058C.1
aagttgacatgattagaaagaacttgagggacatggggccttggcaatggttgcttgatagccgtcctggcaggacataaatgtttttttggagaagtactacctgtgctagaccctcatgacaaatcaatcgggctatatagaaccagatcatgtagaaaaccatgcgccatctcgcacttgtacagaaacagagtgacctttctactatggaccaaaccaacacaattttaaaagattggaaccttagtgattttcattatataatacttacagcaggggcaagctagtcaaacttgcaacataaacacgaaattgcccactgaaattatagtttgatgcccacaaaattgacaggttctttaactgggacaccgatgcatggaagacgacctctggaacatatactatcaatggatatttgaccaagtttaacaagttctcccaggtcatcaagaagcgaaccaatga

SEQ ID NO: 92175 - DNA, 564 bp, Zea mays
  unsure (1)..(564): unsure at all n locations
  Clone ID: MRT4577_184059C.1
ctgtgcggcgctcgaggcggccgggctcggtgtgggctgtgtgtatggtgtctatacctttgctatatattttgatttcaggattanaaaaaaaaaaaaaaaaaaaaaaaaaaaaaaaaggaaaaaaaaaaaaaaaaaaaggaaccaaggaacgaaagaacgaatctaaaaaaagcgaaatgcaccgcgctagaaggcaattaaataaaaagaattatcaatggcgacgaactcgaagggggggcccggaagcccactggccctataaagatagggattacccggggtcgctggccgtcgttttaaagcttatcgagtgggagaaccctggggggggccaacggtaaccaacttgcaacaaatgccgcttctttcagccggcggaatgggggggaggtccgcacggatcggccggccaaaccgctgggggacccgaatggaagacgcaagaagaaagcgccctttccccgttgggtttaaccaagaagagggcttgatcaactcccctttttaaccaaggggccggccgcggggggatcggttatttatccccctaatatttcg

SEQ ID NO: 92176 - DNA, 148 bp, Zea mays
  Clone ID: MRT4577_18405C.1
ccggagtccggcacgaagcggcgcccgccgtccccccgacggccgtcgctcatctgcgtggcgctggatgcgcagccgccggtcgcgaggacggtgttcaccccctcctcgtcgcactagatcagatgaaggatatgtacctaggacc

SEQ ID NO: 92177 - DNA, 120 bp, Zea mays
  Clone ID: MRT4577_184061C.1
gcctatatacattacctccacccttggccttgcttggacatttgttaaactgttacaaacaaacctttacatggggggaaacaattttttacccgactaacattattttaccgagaccaa

SEQ ID NO: 92178 - DNA, 383 bp, Zea mays
  Clone ID: MRT4577_184062C.1
accaggcgtcctgcatgcatcaggagggggatgaatactgagaacgcacgcccgtgacatatcagtggatgtgagttacagagatatggctcgtaattcctgggcaccggcatgtggtgttgtgactgtcctgccactctagtgtttttggctggcaaacaccgctatgtgctactgctttgcttgcgaggatctatcacctgccaacattatcgatctcgacgagcttacaccgggggctgtatttcgactatccattgagaggataataagcccattttatgaatggtatgcggatcttgatatgtgagctggatttgtgctgtgcgaccattttctgaagacatgttattttatacatgcctgtcttgatgttatgaagc

SEQ ID NO: 92179 - DNA, 436 bp, Zea mays
  Clone ID: MRT4577_184063C.1
ctctgatgatcctggtagtccttatcacctgcctttaatgcctcacaacacagcaccggactggaatatcatggaagaattagatgattggcctgtgctcgcaaagaaagaatacgatgactggcttagttcaaaggcttcatcctcttataaccctgttgatgatatattaaccactgagatgaacagttagctgccacaatctttcacctacggaggcttcattcctcaatcatgtgcacccggtcattcaagtttaagtgacaacacgaccaaggaagagccctctatgacatttactggttttcaaggatgcactgtcagtggaaacggaatgccttcatctacagtgccaatagatgatatctatggatatcgaggtccacgttcacatcggatcttacgtacgccaatgccatcttatggtaatgatata

SEQ ID NO: 92180 - DNA, 833 bp, Zea mays
  unsure (1)..(833): unsure at all n locations
  Clone ID: MRT4577_184064C.1
gggtacctcgaggccggccgggtccgctcctctctctgctctctccagccgtagcaaacgccgccgtccgccctccacagcttcactgctcgtctgctccagcgaccagcgggcagctaggcgcctgcgccattctcctgctctctctcagccgcgcgtgagccgtagcaaagtagcaaacgccgccgtcctcctgctctctggtctcccagccgtgagccgtagcaaacgccgccgtcctctcctactctctgctcaactgctctctccagcgggtagcggtgccggtccagcctccagagtccagaggccacggctcggcggctccctcccagacggccagcctccacacgccgccgtccgagaccagcccgagaagaagcttgctgcgttgaacactgctgaccacgccgcagtccgagaagaagcttgccgagaaaagcttgctccctctgctctccagtctccattgctggccacggctacagctctgctgtccacggctctgctctccactgctgaccacagaccacctgctgtccacggaatgaagatacaacgagttgctcctctccatgagcaatgtgtcttatgtttgttgagagatgtgagcaaatgagccttgattgtaatagtctatgcgtgctaagtgatccaaatgtgagcaagtgattatgaatatgtgttttaaactttgtattgtgtcatgtgtgctagtagacttatatgacttcttatgttagccaagagcccaagacttatgtgctacattaaactttgtgtgctccggatttacatgggcttttatagntttatttgtgtttaattaagac

SEQ ID NO: 92181 - DNA, 727 bp, Zea mays
  unsure (1)..(727): unsure at all n locations
  Clone ID: MRT4577_184065C.1
aattcggcacgagggccgatgcaggctcggtgctatcagcaacagtggacgcagggccccattgaccacatgcgactcaccgactcaggaaagattttttcgaaacgcgtaggagaattgtgcccctttatatattaagaagatagagaaacaaaggcctaaagtagaccatacagcagaaagcctccttacggaggccagtagatagcaaaaaacgctaaagaggcagcctagggaacaaaaaccgacaaaccaccctagggaacagctaaagaggcagccagagaacatatgccctttgccccagctgtttcccaacgacttctctcctcatcagccaaggcaaggattgaggtgaggcttggagacattccatcgaagacacatctattccgatggatccatataatccaagcacccatgatgataagggagtcaaggcctttttttggtaagacctgaaacaacatctaagacttcctcccaccaactcaggaagggaggtggcagccgcctaaggggcaagagagcccaaatttctgtagaaactgataccagaagattcttgagaaggaacaaaccacaagaagatggtcccanagtttctggcagcttggtcacataaaagacatttctcaaaagtagtttagacctcttttagctaaatgatcagcccgccagcatctattatgggcaacaagacaaatgaaaaagctgatgatactct

SEQ ID NO: 92182 - DNA, 683 bp, Zea mays
  Clone ID: MRT4577_184066C.1
gatgtattgcaagctatagtcgaattatcagtagcacaacataaccctctgatatgttcgtggtttatccgtggtttctgaattgtagacttctgcgttgaagctaaaaaaaaaaaaaaaaaaaaaaaaaaaaaaaaaaaaaaaaaaaaaaaaaaaaaaaaaaaaaaaaaaaaaaaaaaaaaaaaaaaaaaaaaaaaaaaaaaaaaaaaaaaaaaaaaaaaaaaaaaaaaaaaaaaaaaaaaaaaaaaaaaaaaaaaaaaaaaaaaaaaaaaaaaaaaaaaaaaaaaaaaaaaattctggggggccaaaaaggatccccccgggccccccccccttgggggaaaaaaaacccctttgggggggagcaaaaaggggtggagaggaaggagaacccccccccccccccccccccgggggaaaagggaaaaaacgggcccccgggggcccccccccggggggggggggggggacccccccccccccgggagggaggaaagaggcccccccccccaaaaaggggggaaatttccctctttcccaaaaaggggaaaacaagggaaaaagggggcaccgggttttttaatttttttaaaaaaaaaaaaaacgggggagggcccccttatgggggcccggttaaaaatcttaaaagtttggggaaaaccccgcggggccctcccccaaaa

SEQ ID NO: 92183 - DNA, 560 bp, Zea mays
  Clone ID: MRT4577_184067C.1
acaatgatgtctattttattattccagatgttcattgtctttaccaagggcttgtgatctgcagagttcagacatgtgataagatacttgcccagctaaagaaaagtgaacgccaggtggagagcctaggggtgaaaggtggggcaaaagtagggaaggatttattaattctggtgccatggctaggttggattggctgacagaattttgggagtcttagcgatagctgagtcccgagcatgggataccacaatttaggcttttggaatactcctgtaagctgaactggaacagacagggtgccataatgccagagtgctttgaacattgtattcttctttcctcaggtattgccagggaacagacgaggaggacaaggctacaggccacaaggccaaaagtccaatgacccgatgaaccaagggcgacatgacagtgtgggccgttacagaaatagctcatggtattcatctggttccaggtatcagagcgctccaacccaggcatcaggaaacattagtgagcggggccaggcccactctgcagggaccaatggaact

SEQ ID NO: 92184 - DNA, 320 bp, Zea mays
  Clone ID: MRT4577_184068C.1
atatcttaaacagggtttaacacctatcaattggtattaccggattactattaacaagcatgggcacaagcaacccctacagggaacagtattggttctttgcttatgtaagggagagggagcatttgtttgacaaaattttttatgtttcactcttctaaatcctatcggcatatacaatccaaacaaatcatgtactgggactaatacttaaaaattctagagaatgctctgttgcttcgacagagttgaccctaccaagtaaaaattctattccatcaacccatttttgcttgtggagtttgttctggcacttaaat

SEQ ID NO: 92185 - DNA, 424 bp, Zea mays
  Clone ID: MRT4577_184069C.1
tcccagcacctccaaccccagcgcgctgctggccatccccccatccctcacccccacgccccagatccgtcgccccgatgcgcaataggagcagttactagcccggatgtgtcgccgggagcctaccaccccggcatccccctccggtgagctcgccacgggatccgggcctcccccgacccgcctcgtgacctacctcccccgcgctggcccgcaccacctccgtccagccgtcgtcccccagcacacgcgccgccgccgcagaccttcggatcttggccgccgcccagcccaccgcgccacaccggcacctccccggtcatctacttcctcgcgggccgcatggcgggtcgctcgatctggaccgcaccacttctgcgtccctccggtgccgcctctcccggatggaggtctacctgcgccg

SEQ ID NO: 92186 - DNA, 625 bp, Zea mays
  Clone ID: MRT4577_18406C.1
atctactgtccgactccagagagatgacaagtgcgttccaaagcctagtgcgtactagcagtgtagcaaccagttatctctgggcggcagcatggcagtcatcatgtcacgaggataagcaccaccacttctgtcaccaccactagaaggacgaggagcagcccgccggcgagtacgcgtactccgagaccgaggtggtcaccgccaccggcgagggcgagtacgagagggaccagaaggaggagaaggagcacaaggacaagcagcacctcggcgaggacggcgccgtcgccgccggcgacttcgcactctacgagaagcgcgaggcgaggtgtgtccccgagcgcgcgcatcgggacaagatcacggaggatgacgctggcgcgtgagacgattgcgacgttgtctgacgtttacaccagcaccacctgaagacaaaggaccatcaggacggcgaggatggtagagtagagaacagagatcaccatctcttacgatgaccgtaataccggccggcgcgcgatcgaggtagctagctccgtcggagacattcacactgctgtgtatatgctgtactgcttgcgagtgtcatttgatggttcacgatgatgagtccctctccgga

SEQ ID NO: 92187 - DNA, 493 bp, Zea mays
  Clone ID: MRT4577_184070C.1
ctcggacttgtctcccccgagtgtcgtgtcgcacacctgcgcctcctcctcgtcggactcggctcccccctagagccgtgtcgcacgcctcaggtacttctgttctccgaggttcctttggtttggttctgctcaaggtttacgagggttgcctatctctttctctgtgctccgtgatgtctagaaggtcatgtctagtaggtccacgaacgatccaagcaaactggtcatggggtagctgaaagcactctgcgtggttgggatatagctaccatgggttcagtaggggtgggtttggatatggattgtattggcagtcaggcaaaggcgactagctcatggatctgctcatcggctgatcagataggcagcgtgaaggtttgtcgcggctggtatggtagatagatagtgatggccgggtaattgttttcaaggctgcaagccattggcttgagcttgagggtgtccggttaaacaagatgagggtgttcga

SEQ ID NO: 92188 - DNA, 514 bp, Zea mays
  Clone ID: MRT4577_184071C.1
caaaccaaagaagacggaacaggctggataaccccgcccccaaacggccaaacggggggggggggggccgggaaacaggaagcaccccagagccccagggggggggggcacaaagggggccccggcccccattcccccccccggaccggaggacccacactttattaaccccaggtaactggaagcccccccggggcccggttttggctccaacacacacccgggcacaccgggggggggggggagaaaccggggggtccgggtggcccgaaacagaaggccccggggcgggcgacgggacgggaaccccacgcgcccccgctgaaacataaatcccccgacccggtgccccccccccaagggggcgtacggggcagggcctaactggggggccttttgggccccctaagggggggggtgggccttttggggctccaaaggggccgggtaagccggggggggctcctaaaaagaaaaagaagccttgggccaagggggggggggtttggttttt

SEQ ID NO: 92189 - DNA, 324 bp, Zea mays
  Clone ID: MRT4577_184072C.1
tacgttcttgcacacataatatttttgctgtccgttttgatgttaatgctaatcaccagagggctattttaacacttggttgaataaaaaaaaaaataaatacactcacatatttccacaatttcaacatcctagctactcctactaattcgttccaccaataatacacatttcaacggaatgcacacaagtacattgagctatcttttatcgcatgcatgatcacattcaactacaccaaattcttgccattttacaaactttttaacctacaagacaacacctttctatacgctatatattcactattcattgctaaacaat

SEQ ID NO: 92190 - DNA, 926 bp, Zea mays
  Clone ID: MRT4577_184073C.1
cgcgcggcacgctgcacgcgcggcaggggcagagcccccagcgacccaccacttctccccgtgcgcgcgcgcgtgaggcgctgctctctttctttgcatgtgaaggagtgagaatgagagagtggggacagcgtgggagaaggggagcaatgccgttcgtgtccgagtgcgagcggcggggcggcggcagtggcagctccagcgggtcgtcgttgtcagcgcggcggggaagtgacagcagggctggggtgctgcaatgggatgaggtagaggagatcgatggagaggtgcagagctcgtacaggggacccttcgacaccatggacgcgctccaggacgcgctaccaaacaaaaggaaaggagcatccaaattctacaatggcaaaacgaattctgtagcagatgctgcccaaccggcaaaaggcactgctgatcctgtgaacccatcccctaagaagcgcaagggcttcctttcattcggcttcagctggaccaagtcttggagcagacgtggtgcaaccagcagctcagagaacttcgggaagacgctgtctgcagcccttacaggcatgtacagcaggggcggtggcaatgagcaccggggctgtcaagaccctgctgcccactgcctgcatctgcacaggaggtccaacacgcctggcgtctctgcttccccgtctggacctggtgcccatcggcctcagctgatctcagtgcagtcggtgtctgtggtcggtgcctgcatctgcacacaagcgtaatgttttgtgtagctgatctcagtgcagatgcagtcacttgactccattttatttttatgtccctctcggctttgtttcctatcatttctaatgacttgctatgcatttgcactgtatttgacatgtctaaaaactgctacacaaaacttgctatatattttatct

SEQ ID NO: 92191 - DNA, 144 bp, Zea mays
  Clone ID: MRT4577_184074C.1
ggtgtttttttaatgcaagggccgtgattctacccaaatcaagatctgttcatccaacactttggcttatttttaatcacacaagaagcatttcctgttgtaccaactcatatacatattcatacacacatactcaccacttct

SEQ ID NO: 92192 - DNA, 471 bp, Zea mays
  Clone ID: MRT4577_184075C.1
gggacccaaggcaaaggggggggccggggaaaaaaaaacgggttggggggggaaatggacaacgggggcggggggaaaattttacgggaaaagggggggggcaaaaaccccttaggggaatacaacccagggggggggccggacctttttttggggacaagtttttcccatttggggaacttcaaattggacctaaataaaaaatttggtttggggtacggggctcaaaaaataaaccggttgttttaaatggtgggttaaaaaaaaaaaaagggggggggccaaagggaatttcaaatttagtttccaaacgccagggctttttccggggtgttaaaaaaaaaaaccatttgggccttttaagggttaacgttttcctcggggggttttcaattgttaaccccgttccaattttttttaaaaaggggggtttccattgggaatttgatcgcattaaaaagaagttggggg

SEQ ID NO: 92193 - DNA, 116 bp, Zea mays
  unsure (1)..(116): unsure at all n locations
  Clone ID: MRT4577_184076C.1
tcatgngtggacgggcgagacaacacgccggcgggggctgtcctcgggaaagagggctcgtgcccactgcagaccaaggcggcaggggaggatggcgagcaggcactccggtggga

SEQ ID NO: 92194 - DNA, 700 bp, Zea mays
  Clone ID: MRT4577_184077C.1
gtggacttttttttttttttttttacacgacaaaagaaaaataaggtatggttgagaaaaagagaaaaaatacaacaatgtgaactgagctcacaacctaaaaagcttaaaacacaacagcctaatcaacacgccacatcttcttttacgattataatggaagatataatctctttaaaatctaaggatggcttaggctacactaaaccataatggctcctcgtcactgacagcatatgcaccgacgactgtagtatgtaccgaattgtttgtcatgcgaaaacctttagatcgaggctgcatatacgctagaagttctccttgtggaactcgaacttggtgttggttttccgcgagaaatccttggcgagttcgcgcagcgtctttagcggctccgggccaccgccacagtagaacactccaacacgttggttttggtggttctccgcaatgtgcttgtagacgtttggccaatcgggcctggcgaagtgggtcttgacgcgggtgccggaaataacgtcgatgttgtgcttggcctggttgagcatttgaagctgggcgatgaccctggagcggaggtccccgtccttgtacacgctggtgcagtggttgtggagctcgatgatgcccttcttgtcggtctcggccacctcgtccatgatgccatggaaccactcgaaggagccctgctcccgggtca

SEQ ID NO: 92195 - DNA, 1038 bp, Zea mays
  Clone ID: MRT4577_184078C.1
gggtacctcgaggccggccgggcccaccccgccaggagctctgcccaggcctaccacggtgccagcaactccaccaccccctccctcgccattggcggttcccccaccccgctaggagcaccgcccaggcggatgacttcaccttcgaagcccctgccacgcagccagtgtcaagattacccccacctacacccctcgccagaggaccgtccccttgatgtcggacggccaacggattcacctcccacgccctccacgagcctgataaatcaagaatttactagaatttctacacgcccatgaatgattttattgttgctactgaatgatgtaatagattgagtatactgttgtgtttgcagggatgctaaaggtcgcggcaagtggctctactgccactccactctgaggcggtgccagcgttgatgaccacctctcggcctactactacttcttctccagcatgggtctagtccatgtcgcgatacggggtttggacattttgggctaggttgttcagcatgggtctggtgaatgaaggcatcgacatgaaggagggaaacctagagatcggcatagcaattcttttgcatgacgattagttttattttattaatctgtgttagatcttcaaatacacgcaatccaatcttgaagatctggttaaataagtatgctgcttgtaccataaaccgtgtgcgacgcaaatttcagtaagtgcattttgctgaaaaaaaaaaaaaaaaaagcgaccttccttctgcagagtggaaccaaaggtatttgatgagttctttggcatgccacatagcagatttgaccgggaagcttgcaggtctactatatgtcctgatttttgtatctgtgtgtcttccttcatgttcaaaatggtgattcagtttatatagagtattgtcttagtgtttgtgtggataacatcaatatggtgtacgacgatgagtttcctgaacttagtactttcaagtgtgtacaagaaaggaaagtagcaagctggaaagcgaaaaaaaaaaaaaaaaa

SEQ ID NO: 92196 - DNA, 734 bp, Zea mays
  unsure (1)..(734): unsure at all n locations
  Clone ID: MRT4577_184079C.1
attgggaccctcgaggccggccgggaagcactgcagcaggccctcactgcgcagaagagcagaagtctgcggcccctccgttcctccagctccagtcccagtcccagtcccaggtatggctcgtgtgatcagtttctagcttccctgcgtgatctgctccaagtaacgagcgcatatgctcttggcgagtcaaggttagtatatttctgtgggaaatgtaccaccagtcgaagctcgtccagcgggtgaatgctgcagatttgctgtccgaatctggattgttctatgccatttctcccaactttttttgctcctctctcccctgtctctcggtgttgccgattactgagccttccgtgcctgagggactgaactaacaaagtactgaatggttgtaagtgcattctcgtagttctatgcatcttgctgtgcctgatggaggacctcaactaatctgtctcagatcagagccctgcccttgtattctcctccaatcttccttctgagttttggcttgcgatcttattatggtggagacggaaacggaaacactgcaggccggaacggaagcctgttccaaatccatgttccagcgcttgcttgtttcatcccagtttacatacatatctataggatagaggagtgaagccgcagnttttggtttacccattagattactcccccctcaggaagaaccccaggggctggaattaaaaaagcgagcaagaatccaa

SEQ ID NO: 92197 - DNA, 337 bp, Zea mays
  Clone ID: MRT4577_18407C.1
ttgtctttctgtagacattctgccgctccagcctttggctagggtttaaccaccggcggtgcgcgcgacggcggtaagatggtgctgcgtctgacctaccgcaagcgggacaggtgtgccacgaagtccaaccagacgcgggtcgtgtagacccctggtggcgagttcgtgtaccaggacaccaataagagagccgtctgttccaagtgagctatgtccggtgagaagatccatggtatgggtagtatggggtgaactggatgcaaaaggaggagggtggttagataccggttgactgtgaaccgagccctgtgggaaggtgctgttgctatctgtg

SEQ ID NO: 92198 - DNA, 114 bp, Zea mays
  Clone ID: MRT4577_184080C.1
acggtccggacggcacggccaagacttcgggtgcccgtgcctttgccaaggagctaaatggcttttcttttaacaccccaaggcctcttacctaatgcacttcgtgcatggtta

SEQ ID NO: 92199 - DNA, 477 bp, Zea mays
  Clone ID: MRT4577_184081C.1
aaaaaaaaaaaaaaaaaaaaaaaaaaaaaaaaaaaaaaaaaaaaaaaaaaagaaaagaaaaaaaaaggggagtgcatgtcttaggtactccgtgtatgcagaacgcatatcatgcattattagggtcttcttattttggggccacttaaccgacagttaaactagcccgggtgtctgacaacgtccgtggggggaaaacaccttgaatgccctgggggggggtcgccttgcagaaagcccccgtgccggcagggggggtcgcactgatggggcctcccatgatgttcgtccccattatgggggctgggacgcggcctgtgggggcgccttatgcgcggcctttttggcggcggcggttgtggtgtctcctccctttgtcagtgctctagtggccggtctcttagctcccgttctttctgttttccccctgttcttcggcgttgcgtgtgtggtttttcctcggggggttcttttggg

SEQ ID NO: 92200 - DNA, 259 bp, Zea mays
  Clone ID: MRT4577_184082C.1
cttgccacacacataagaccaaccaacccacttctcgactgaccactgtgccgcgccgtgcccaccggacggacacacagaacgactatggtcgcgtcggcgctgcaccagaccaccagcttcctcggacaggccctggtctcccgcgccgccggcgtctatgccggtgctcgtctcgccgtgcgccgccccgtcacgagcgttccccagagtacatggcacgaaccttgatcgacctcagaatcttggcccgcacccc

SEQ ID NO: 92201 - DNA, 879 bp, Zea mays
  Clone ID: MRT4577_184083C.1
tataattacaaaataactaaacattaacagagacaagtctaacatccatgtccaaaggttccaacgcttacgactttttggctaaagtcctcatcattggtgattcaggtgtcggtaaaacttgtctcctccttcgtttctgtgagaataactttactacctcccacttagccactattggtattgatttcaaaatgaagacaatcgaagttgatggaaagaaggtcaaggttcaaatctgggatactgctggccaagagagattcaagaccattactcagacttactataaaggcgctatgggaataatcttgagttacgccgtcaacgatagagaatccttccaaaacattgaaaactggatgaagcaaatcagacaacatgccagtgacgatgtctgcaaaatccttgttggaaataagagcgatatgcctgatagagttgttgatactgaagaaggcagaagattggctgattcctatggaataaaattcttcgaaacctctgctaaggaagacttgaacgttaatgatgctttccacactattgcaagagaaataaaggagaagattgtccacagagaaagcgataaagcgactgctggtggttctggcttcactggaggaaatggtaccaagttagattccaagggaaagactgacggcaaaaaagctggctgctgccctaattaagcacagaatctagaaggaaaacccgtttataattacctaatgacgttattatcccgttcgaattttttattataatatgctttgctcttttgtaatcccctccaatgaatttgaaagagagagatatcaagctttttattcatgtttgccatctgtatacatatagtcagaagtcaagtttttaact

SEQ ID NO: 92202 - DNA, 176 bp, Zea mays
  Clone ID: MRT4577_184084C.1
tcgttttcccctaccaggtgctgcccaggtatgtcgtgtgctgctatgacaacgcgcttcatgaagtaccgtatgaagcgcggtctcgtgttcgacgggcacggtcgcatctgctagcacaggaagcacccgggaggtcgaggtatcgccgttggcttgcaccaccaccgtatttt

SEQ ID NO: 92203 - DNA, 454 bp, Zea mays
  Clone ID: MRT4577_184085C.1
ctcgatcatgtcatgtattcagggtggggagaaaaagtgtatgtaaatgtaatcgcaccccatcgctaagaaagcgttcttcacaatccatgtctgggaagtgtcgtacttccccctttaaaactttgctggtcgctcacattccatcatgcccttgcactcgtcgttatgcgcttacaatccaccgggtcctgcggctgaatgtgcgctggcaccggcgccggggcccatagtcgcgtgtgttgcatcacggtgggcagcttcacgcgcctctccctccttggtctcttgggcaatctggtcttcggtcttcttgtttcctcgggcaatgagcttctcgaggaggccgcccttctttggcgcgtcgtgcttgtctgagtcttcgacatcttcaggtaggcgacgcgctcttgagggggcatcgcggcgagttcagagtccatcgagtcacggt

SEQ ID NO: 92204 - DNA, 379 bp, Zea mays
  Clone ID: MRT4577_184086C.1
ggcccttaaaaaaacggaaccaggtgggttttaaaaaggccccaaaagggaccatcaggggggcaaaccctggacaatggccctttttttcatgggccctttggccccccggttttccccccccccttttgtggggggcgggaaatcttccatccactttttttctctccacacaaacttttcccccgaaaaaaaaaaaacgggctccaaattttatttcttaaaaccgaaaaaaccaaggaaaggccaaggggctaaacaatctaaacgatcccccccccacagaatcagttcagcccacccctaaaacgattaccctgaggccctggaggaccaaaaaccggatacccccactccctcactgactcagcccctgggc

SEQ ID NO: 92205 - DNA, 215 bp, Zea mays
  Clone ID: MRT4577_184087C.1
acaaggaaccgccaaactttaattacactacttgattattggggagtcggaaaacagggtataaaaaaaaaaaaccctgacccaaacctgccatattgaccacttgaccacgggactgataaaactaggaaacccttttggaagcatacatgaacacacacacctccctgggtacccacctatgtataaacccctacatgcatgctgttaactac

SEQ ID NO: 92206 - DNA, 451 bp, Zea mays
  Clone ID: MRT4577_184088C.1
tttgggctgatttatgtgcttgtttatgtgcttggtggcggtcgcttatccgtactacaggagtactcatgaggagggtgatgtgactaagtgatggaagtgtcatgtttgtttcccggccgactcctagacgaagacgcatcaccatgaggggacggagttccggagtttgaagaaaaagacgttcggtgacgcgttggagggagttgcgtcgacttgggaatatatagtgatgattaattcgcctagtcgttctcggcctaatgaggcgaattctcctattttatgtgattagactagtcctggtcatgcggtgtgtaggtctggtgatgtctctgagtctcctacgccttttaatcgtgagcataatctgtcgcctgcttcgtataggtatatgagggagtatctgctcaaggctgagcgggttaaaatggctgatgagactgcggag

SEQ ID NO: 92207 - DNA, 572 bp, Zea mays
  Clone ID: MRT4577_184089C.1
cgcgagcacggtgtcctgcataaagatactctcgccgcaggaggtgcagcagatgggcaagcagggcctggagctcctgagctcggcccccgcggcgcggaggctaggtagcagctgcgacggctacgttagcaggcaggagtcgaggagcctaagcaccgggatcgcgtccgtgggttcggtcgagttctgaaacagaaggcaggagctcgttacgcgccccgagcttagtttagggctggcctgtgacggacccgctagctcggctcgcgcttccgatgttttttgcagtccatggcgtcgaggtggaagcagcaccagacccagcattagctctccttccaggttatgtactaccatctaataattctgtccagtcgtatatgacacccaactcccaagtagaagaaactaccagcagccgctgttggtacacatgctgaaacttcgctcttgtatggagaaacactaatccttgtgaatgtagccagctaggctctgtaatgatccatgagttaatagcccttttgttgcctagcacacggcaagcaaaaaaaaaaaaaaaaaaaaaa

SEQ ID NO: 92208 - DNA, 160 bp, Zea mays
  Clone ID: MRT4577_18408C.1
tccacgcggtcgatcttacatttttcaggcccggtacgcaatgcgccgggccgacttctaagcgggaggccaatgctacgatggtggggactgggcggaacttctgttgcacagtgcatctgcacccacagatgacgtgctggtatgaactcgcttcctt

SEQ ID NO: 92209 - DNA, 668 bp, Zea mays
  Clone ID: MRT4577_184090C.1
ccggccggaacaccccactagaaagaactgcgcatcctctcctttcaacaccgtctctgctcgagcggactctcaaatgaagatgcgtcccagcatcgggtgatcttgttcgtcctcagcgaagctgcccacacgactgcctaagcccaatgaaaaccagcgaacgataatcctgggtgccctataaccagaagatgcgaagagaaccgttgcccccaatctttcacccacaggcatctccacccactccctccactgtgcgccataatcactgcttatcaattgtcagccgattaccggcatgttcacacacatctacacaccgcttgtgccattctcgactatgcaaagaccctacccaccaggatcaagaggctgctagtcatatgagactgagggaccggctgcatctgactcaggcactcctgcaacatataaatatcgatcttgccatcttcgacgtcacctgtgctgtagatgctactatcaccgtctacttcactcactcgatcgacgcactatgtcctaaccttaagctcttaaggtgtctgataccatatattgaccgtgccgaaagctctctcacctcggtcatgcacactggagacgcaacagatgctatatacgccttactcacatatttgcgctctctatgtacagcactatga

SEQ ID NO: 92210 - DNA, 333 bp, Zea mays
  Clone ID: MRT4577_184091C.1
ggggaagaaaaccggggccccctggggccactttttttttggggggcgagggctggtttttaatgtcccccaaccaggggatgctgggcccccgagcttggcccaggggatttcccttgaacaagcttttttacggggcaacaaaatttggtgttttttttagcccttcccccgggcctgggggttgcccacaaaaaaattgcccccccccgcttggcctgttcccggaaacaggtacgaacccccaactggaacccccccggcttaaaaaattttggtttcccgcccttttggcccaaaaaaaaacccgttcagctccggcccattttattg

SEQ ID NO: 92211 - DNA, 280 bp, Zea mays
  Clone ID: MRT4577_184092C.1
accaatcttcatttactatacaaatttatttttaaaacttcacccttcactcaagggtaggttcttattatctctaggctataactcaacactccactcttattacataccatcaaacttatcatctacaccaaagaccactttcatagtccagacatcaaccttcacgacgaccgcttaatcacccattgtgcagacatcaacgactggcgcattgcccgagcagtctactcccaccaacgcccaagcccataccaacgctgctactactgctcatccc

SEQ ID NO: 92212 - DNA, 340 bp, Zea mays
  Clone ID: MRT4577_184093C.1
cattcacctacacccacgcccaaagcatcccattttttattcataaccatccccacataggtgatttctctctacgtcgacgactgacattttgcccgcaacaacatccattcacacaacatcttgtcactaaactacctgcagaatgatcactgtttcatccaccaatcattaacatagcttgcatgtatatttcaaccccatgcatttctcgttaaatatatactctatattccataacacaattccaccacataaaaacctttggaatcattatgattgctatctctccacttatgaagataccacctatgatgataacaacacatgtataccacct

SEQ ID NO: 92213 - DNA, 196 bp, Zea mays
  unsure (1)..(196): unsure at all n locations
  Clone ID: MRT4577_184094C.1
ntagcagtggtaacaacgcagagtactttttttttgtttttttttttttttttttttttaagaaacaaacatggtcctgttttgtttttcaaaacggccttgttgacatgtaatggtcgcctgcttatgccaggttcaccaccaaatttacgatatctcgtggccacttcaggtttggggggcgtttctagcgcgc

SEQ ID NO: 92214 - DNA, 1127 bp, Zea mays
  Clone ID: MRT4577_184095C.1
ttttgccaagttactcatattcccttggggatacatactcacttgatctggagagctccgttgggtacttctctgcctaggggcaatggtaggataattgatggaagtaaaattcagactggagaaagcaatacagttgattgtattcaagcaaaagatcactcagctgggagaacggaaatagcagcatgtctacgagttgctcaggttgcacaagtgcgggtagctgctgcagaatcatcaatccagattgtctatctatctgtaaacgataaagttgaattggatataaaatatgctgatgaattaggttatattttcaacgaagctcatggagtagtccctgtaaagattgagacaaattatccagatgttgtttcggttctcatgccaagagattttaatggtacatatgacacacgtgaacgttttgttcttcaggcgagaagtcatggaacagctcttgtaaggctccacacaaacaatgtccctaacaaagtggatttcataatggtatccgtaggagcacaaatatatcctagggatgtgatccttcattctggccagcacctgaacttcactgttatcggagacagtatggacatgtgtggacatggtcactggttaagtagcaatgggaagatcgtccacatcaatcgggtaactggtgaagcacaagcacgtagtgaaggtgtagcggaagtaatcttcaaaggttcaaattttaagctgcaaacaactatcactgttctcaaggtgaaccagatagttgttgatgctcctgcggagacactgactaatgcagctggcctgccggatggatacatgttttctgtgagatttagtgattcaattgagcacagtattggatcctctgcgagcccaattaatgtcccctttgaatgcaaggttgacccttcttttgttgggtttgttgagccatggactgagcatgccacaaagaaatcctactgcctgtttcatccatattcacctgcacaactgttgcccgtgaagttggaccctaatgaaggaactttacacattttagttcgtgcaaatctaaaggaagacccaaaggtgaccggatctgcacatgctctttttgtcaaagggttttacataaa

SEQ ID NO: 92215 - DNA, 128 bp, Zea mays
  Clone ID: MRT4577_184096C.1
atggggcgccaagaaataccatacagtaagtaggaccgatggggcacacacatgacacggcagcttttaacgagtccaagggtcagagggcatgttcgcggggggctttataagtcggttagcaaaac

SEQ ID NO: 92216 - DNA, 484 bp, Zea mays
  Clone ID: MRT4577_184097C.1
ggctgagctagctacttagctagtcgtccatctgttttatctggcaccttttgatttctgttctttttttgttactatgccagctgtgagatgacgtattaggccagtctcaatggaagatttcatctcccagtttccaagactatgaaactaaatatgaaataggtgtctctctcagtgtatagtttcattgcacggtttcataagttgttttagctttcgtgggtccactagtgtctctctcatgtgtttcaagatgtactacctgcacacatcgccgtgagtgtgcgcagcatgacgcccggcgaagctcgcacccgcggccagcggacccgcgccggatggagctcacgtgtaggggagctcgccagcgagtcgaagggaatcgggctggcgccgacgtccaagtgctaaaccaattcctccagtgtattgaatcaatttggcatgagcttctagatcaattcgaatttcctttttctca

SEQ ID NO: 92217 - DNA, 325 bp, Zea mays
  Clone ID: MRT4577_184098C.1
agtcagatatgtaaatcgtttaaagctttgtgctagtctaatcttgatctgtggttccttttagtcatgatgtttatgccgatacaattatatataaagcagtttttggttaataaacagtaaacttcctgaattaataattaaagtttattttgtattattcaggatggcctcctgatttgataatggaagtcattttgtattattcagtatagccttggtacctggtagatagccatgcttattatgcatattgttttgcagatgagctcatcaagaatgctgcctacattggcacccccggcaagggtatccttgctgctga

SEQ ID NO: 92218 - DNA, 160 bp, Zea mays
  unsure (1)..(160): unsure at all n locations
  Clone ID: MRT4577_184099C.1
gtgatccccacgctgttgaaccgnccctaggggcgatttggccgattttaggacctttgggtgcaatctgacctgcactctgtcagactgtttatcagcctacccatgcggatgaaccagttttagggtcagttcaaccgttcatggttaacttgaccag

SEQ ID NO: 92219 - DNA, 211 bp, Zea mays
  Clone ID: MRT4577_18409C.1
ctcttgggtaggcataaccattccactcatggaagggaagattaaacctccgtgtatacatattgacaacaaagggctgcacattttatggggtaactactgaaggcacttttcaagcgaaagctgctggtgagcattctaagagagggcccctgggtagcctggcgcttttttcccttctttatagatacttgacgagaggcccaactat

SEQ ID NO: 92220 - DNA, 619 bp, Zea mays
  Clone ID: MRT4577_1840C.1
cccacgcgtccgcccacgcgtccggcagtgtctgaagttagaaaaagaatggggttaggtagccttgaaccaacatttgaaacattggtcgagtcttttgtcttcttggacaagaacaaagatggatatgtcagcaagagcgagatgatacaagcaataaatgagactattggaggagagcgctcttctgggcgcataggcatgaaaagattcgaggagatggactgggacaagaatggaacggtgaccttcaaggaattccttttcgctttcactcactgggtggggatcaataatgaagaagacgaggacgaagaagaatgagcgtgtcggctgaaggagattaggcgttccgaatcgaccgagccagccagccagccagccagcccccctcaggggaggcctccagcagctccctcctgccgtggatcagaagcggtagagctcatgtgttctctgtgtgtgccgagctgatggtagatgttcatgttcgtataaatagaatgaaacactagccgtgtcaagggatttgctgataaaaaaaaaggttacgctggtcagacgctgctcagttaattaggttaccttgtcattaataaagtatttgcagtgtgtttgg

SEQ ID NO: 92221 - DNA, 232 bp, Zea mays
  Clone ID: MRT4577_184100C.1
gctgctcaacgaccccgagctccgaaggccgtatcaaaaggcgaggccctcttttatagtgaccgacatggcgctgacaaatcatgggaccgtcgattacctccacctataagatctgttatcgatgggaatggtggaactggcaaaacctacatcagtgaagaggcatctaactggagagatcgagagcgaaatacgatccaaccaccggtgtggtatttcattccgtgga

SEQ ID NO: 92222 - DNA, 240 bp, Zea mays
  Clone ID: MRT4577_184101C.1
ctcctcgcctcctcttcccagcctccacgacgcaagggagagtgacggaaaacgacacggcacgagcgattagggccaaggggaagaggggaaacaccacaccaaaacccttgatcgacaccaccgcctctgatctccgcaaggatgaaaggattcaatatgaacaaccaacacattaaatacttcctgaaaaatgatgaacaatgataaaacaacgaaagactcacacacagcggagaa

SEQ ID NO: 92223 - DNA, 470 bp, Zea mays
  Clone ID: MRT4577_184102C.1
gaacccccgtggctcggtgcaacgttcttctccctctcctcccgtcgccgccacatctggaccggcgaatcatccgccgctaacctgtaacaccctatacggcgacagacctcccctcccctcccacggcggcatcaccctagccagacgcctcacctagtcacctccacctccgggggatcgcgaggccgacgccccaccgcgcctgcagcggccccacctccgcagcggcggcccccaaaccccagccaaggtcacagaaagccagacctatggacttccacaacatcgatgattattttcatgaaaacagcccggcacaaaggggcgaaagagctgcagaagctatcgccgaggcaattctggaaagggtgtaccgagacaccgcgtgtggatccgagaagctgctcaatctacacctgctggtcatggagatcgctcgccgaacctctggtatcgagcctcttatg

SEQ ID NO: 92224 - DNA, 539 bp, Zea mays
  Clone ID: MRT4577_184103C.1
cacatcattcctctcattcgatttacttcctggcagaacggagcaaacaggaaggcttgagttcaaaactgcatgctcatcaatttctagtaattctggaaccaaacacgttgctgcctccatagcaataatgtcctgatactcctgctgaaccaccaactccaagtccatagccacatcattagacttcgtatgatcacattgcttaaaagtatcctacatgactgggtcttctgctgcctcctccgtcggggctaaatcaaaatcatgcttctcagaataatctttgttctcaccttcagtcttatcatccccatcttgatttcccgtaatatcattatcaatccacctcccatctttgagaaccttatcaactttgaaaaaatctcataaagcccttcaccaacaactatttctgcagactccgaaatgtgattcacatccgtcacatcaactaaaatacgaaccacccccattttccgagtgtacctcatatctactttttgagttgcacccagaatagagcctactgcccataa

SEQ ID NO: 92225 - DNA, 462 bp, Zea mays
  Clone ID: MRT4577_184104C.1
aaagcggggggggggggccccacaaacccccttaaaaggggggccagggggggggagaacaaactttttggggttctggaaggcccaaaaaaggggcccacggggatataaagcaccccctacttttttccaagccaggggtgactttgggctttgggattcgaaaatccccccccattacattacgatgggggggaaaagtttcatcaaaggggggaagcccacccataattggcgccttaaaaaggggggacccccccacccccataaatccattcactttttatataaaaagggccagggggggcataaacaggggggccgaaattttcctgacaaattctaaaaaaagcttcgccaaaaaaattttttatgtaaattcggcaccaaaaactacccccggggttgcaaaatgggcaaaaaaaaaaaggtcaaacttgtccatcccctttttaggagggg

SEQ ID NO: 92226 - DNA, 385 bp, Zea mays
  unsure (1)..(385): unsure at all n locations
  Clone ID: MRT4577_184105C.1
agatcccgtgttcgtcctcttctccacctccacctccacccatggnggactccaccttcagcggtgacgaganggcgnccttcttcggnttcctcggcgccgccgccgcgctcgtcttctcctgtatgggcgacgcctacgggacggacaagagcggtgtcggtgtcgtctccatgggtgtcatgcgtcccgagctcgtcatgaagtccatcgcaccccgnagtcatggtgggagtactcggtatctacggcctcatcatcgncgatcatcatctccaccgnttatcaancncaaggtcaangtctctactncctctttcganngttacgancaactctcctcntggantcgtctgaggactcgntggcntcgttgtcgntattn

SEQ ID NO: 92227 - DNA, 1827 bp, Zea mays
  unsure (1)..(1827): unsure at all n locations
  Clone ID: MRT4577_184106C.1
ggggacgcctccgctcggtttactataaatacgccttcacaaccagctgatctttttttcccctctttccgcgttcccaccctgccgtcgttgctactcgcatcgagatttgcgcggccgtgtcttgctcgcgcctgctgctctgttgccccccttccttccaaggtcgcgtcagcgcccagatctctcgctcgctcgccggcgccccggctagatctgggcggagctcggaggcggagccgtgcgccagtgtccaagtttggtaagacccaaagcggtgaggaggcgagggaagacgcgcggacgccatggagctggctgtcggcggcgggatgcggcggtcggcgtcgcacacctcgctgtcggagtcggatgacttcgagctcacgcggctgctcagcaagccgcggatcaacgtcgagcgccagcgctccttcgacgaccgctcgctcagcgacgtctcgcactcgggcgggtacagcaggggaggcttcgacggcatgtactcgcctgggggcggcctgcgctccctcgtcggcacgccggcctcctccgggctgcactccttcgagccccaccccatcgtcggcgacgcctgggaggcgctccgccgctccctcgtcttgttccgcggtcagccccttggcaccgttgccgccgtcgaccacgcgtccgaggaagtcctcaactacgaccaagtgtttgtgagggatttcgtgccgagcgcgctggcgtttctgatgaatggcgagccagatatcgtcaagaacttccttctgaagaccctgctgctgcagggctgggagaggaaagtcgatcggttcaagctcggggagggagccatgccggctagcttcaaggttatgcatgacgccaagaagggggtcgagaccctacatgctgattttggggagagcgccatttgggaggggtgcacctgtgggattctggggttctggtggattatactccctccggggcctacacaaaaaccaccggtgatttgacgctggcagagacgccggagtgccagaaagggatgaggctcatactcagcctgtgcttatctgaggggttcgataccttcccgacattgttatgtgctgatggttgctgtatgatagatcgcagaatgggtgtatatggctaccctattgagattcaggcccttttctttatggcactaaggtgtgctcttcaaatgcttaagcatgataatgaagggaaggagtttgtagagaagattgctactcgccttcacgctttaagttatcacatgncggagttatttttggctcgatttccaacagctaaatgacatctatcgttacaagacagaagaatattcccacactgctgtcaacaaattcaatgtcattcctgattcaattccggactggttatttgactttatgccttgtcagggtggttttttcgttggtaatgttagtcctgccaggatggacttccgatggtttgcacttggaaacatgatcgctatactttcttctctcgcaacacctgagcaatctaacgctataatggatcttattgaggagcgctgggaagagcttatcggtgaaatgcctctgaagatatgttatcctgctattgagaaccatgaatggcgaattgtgactggctgtgatccanaaaatactagatggagttatcacaatggaggatcgtggccagtgcttctgtggctgctgactgcagcctgcatcaaaactggacggncgcagattgcaagaagagcaatcgacctagcagagaggaggctgttgaaggatggctgcccggagtactatgatgggaagcttggtc

SEQ ID NO: 92228 - DNA, 2550 bp, Zea mays
  unsure (1)..(2550): unsure at all n locations
  Clone ID: MRT4577_184107C.1
aaatcccgcacccccaggaacgaagctgtcgggcaaccaccttcatccaccggcacgaggccttgacccaccaatccaccaaattcggcacgaggactccgtggtgccgcacggctccgccgccggcgaggcctcatctcggtttactataagagtataagtacgtctccgcaacaagctaatcttttttttgccccctccttccacgtccccaccctgccgtcgtcgctactcgcatagagattcgcgcggccgtgtcttgctcgcgcctgcccccttccttccttgtcgtgccagcgcccagatctctcgctcgccggcgctcgggccagatctgggtgggggctcggaggcggagccgggcgcaggtttggtttgacccaaggggcgaggaggagagggaagaagaccccggacgccatggagctggcggttggcggcgggatgcggcggtcggcgtcgcacacctcgctgtcggagtcggatgactttgagctcacgcggctgctcagtaagccgcggatcaacgtcgagcgccagcgctccttcgacgaccactctctcagcgacgtctcgcactccggcggatacggcaggggtggcttcgacggcatgtactcgcctgggggcggcctgcgctccctcgtcggcacgccggcctcctccgcgctgcactccttcgagccccaccctatcgtcggcgacgcctgggaggcgctccgccgctccctcgtcttctttcgcggccagccccttggcaccgttgccgccgtcgaccacgcggttgaggaagtgctcggcaacgatgccggctagcttcagggttttgcatgacgccaggaagggggtcgagaccctacatgctgattttggggagagcgccattgggagggttgcgcctgtctgctcggctgtgtggtggatcatacccggttcaagcttggggagggagcctgccggtagcttcaaggtgatgcatgacgccagaagggggtcgagaccctcatgctgatttggagagagcgccttgggagggtgcacctgtggatttctgttctggtggatcatactcctccgggcctacacaaaaaccaccggtgatttgacgctggcagagacgccggagtgccagaaagggatgaggctcatactcagcctgtgcttatccgaggggttcgataccttcccgacattgttatgtgctgatggttgctgtatgatagatcgcagaatgggtgtatatggctaccctattgagattcaagcccttttctttatggcactaaggtgtgctcttcaaatgcttaagcatgataatgaagggaaggagtttgtagagaagattgctactcgccttcacgctttaagttatcacatgcggagttatttttggctcgatttccaacagctaaatgacatctatcgttacaagacagaagaatattcccacactgctgtcaacaaattcaatgtcattcctgattcaattccggattggctatttgactttatgccttgtcagggtggttttttcattggtaatgtcagtcctgccaggatggacttccgatggtttgcacttggaaacatgattgctatactttcttcccttgcaacacctgagcaatctgttgctataatggatcttattgaggagcgttgggaagagctcatcggtgaaatgcctctgaagatatgttatcctgctattgagaaccatgaatggcgaattgtgacgggctgtgatccaaaaaatactagatggagttatcataatggaggatcgtggccagtacttctgtggctgctgactgcagcctgcatcaaaactggacggccacaaatcgcaagaagggcaattgacctagcagaaaggaggctgttgaaggatggctggcctgagtactatgatgggaagcttggtcggtatgttggcaagcaggcgaggaaattccagacctggtccatcgcggggtatttggtcgccaagatgatgttggaagatccttcacatctcggcatgatctccctggaagaggatagggcaatgttgaagcctgttttgaagcggtctgcgtcatggacaaactgagatggccacgaaaatttttagggaagcaaagtctgctgaaaacacgagttcttgggggtagcatctccttgtctgctgatccgtttcctttgacttccaaacatggatggtttgtgtcttctggattttccttggttgtacaatatctcagctcgttttctgagttgaaagaaaaagaagcaactgcagaaatgggcattttgtttttttcttctttcgcaatctctgtaagaagatactctgattcttgcttgggtcatcctataagttgtggatccttttggttagagtcaactttgttgtgccagtggattatacggatgagtaagctgattccagcttccctgtgaagcataagtgctctttctaacgaatgaataaagctcctttctctgtgttgctggaaaaaaaaaaaaaaaaaaaaaaaaaaaaaaacccacgcgnccgccacgcggccg

SEQ ID NO: 92229 - DNA, 341 bp, Zea mays
  Clone ID: MRT4577_184108C.1
ctcgaggccggccgggagagactctttctctaaggaggcctctaccgattagcatctgatcgctcactcttgtcatgtcgggagttctttctgctgatctagatctagccctagctaggagctagacactcgtgcgggtagtcatcagccttctctctcttcacgccatggagcacgtggacgaggtccactaccccgcactgcctgtgatgacagaggaaagtgggtgctgcagactctcctccgcccggctactgggccgagtagtctgctcccccctccgaagacaagggggtctacccctctgcccctgcggacaccgaggcagctgccgcttctga

SEQ ID NO: 92230 - DNA, 289 bp, Zea mays
  Clone ID: MRT4577_184109C.1
ggtgccggtgtcttctgtgctattataaaacaaccggctgacaaccttgtgtctttcctgaacaatgccaagggagctacattgggagatcctgttaacaagcgggggctctggggtctcttcactagaagacggcgggggcgtatcgtcatcattggtacccttactggtgctcactggggaatttaccatgcattcaaactcatcgtttgactcccaacaactggaggtgttacacctgccccatcagcatacgctgaattcaaagccactccttgatttttttttc

SEQ ID NO: 92231 - DNA, 364 bp, Zea mays
  Clone ID: MRT4577_18410C.1
aaagaaaaaaaaattttataaaaaaaaaaatttaaaaaaaaaaaaaaggagaaaccaatcaaaggaaaaacaaaataccaaaaacagaaaatcaacaacatacaacataatatccactcaacacactcacatcacaactgtacaaaaaatcacaacaaagggcactcccctaaacctccctccttccttccaactcccctccccatgaatcacctttttacatgatcccctaaatccaaatatctctccctctttctaacaaccctaacacgggaaaacccccgtatgcccacccttacacacccttgagacccactatcaatttccccctttcacgaggatacttacaccccccccctatctc

SEQ ID NO: 92232 - DNA, 769 bp, Zea mays
  Clone ID: MRT4577_184110C.1
aaacgaggccggccgggactgtagaccacgcgtccgcaatcttttggtgcacggttctgcccatccgccatcaacgcggacgcgcccgtcaaggaaggttgtcgcgtcataaatccccatcctccttcctccccatctgctccccgccatcaacgctctccatggaagtcgagtccgcgatgctcgcgtcgtccctaaaccccgccccgactctctccgcgtccgcgacaacccgatttccagcgtcctccaccccgaatcgccgccccggctctctccatggaaggcgcgtctgcgacagcccgatctccgtggaaggcgtgtcctcctccccagatcgtcgtcccggctctctccacgcccgtgacagcctgctctctatggaaggtgagtctgcgatgctcacgtggattgggtaccccgcccccgctctctccatggaaggcgtgtctccgatagccgcatcctcccttgcgaaccgcgtgcgtcatggcaacacgggcgaggcggtggggagtctggtggacgcgcatcacggtgagacgaacgggggcaagggcaagggatatattttccatccggggcggatgttggagagggtcttcaaactctgtgaccctggtgagtgcgctcgatctctggtcttccgtggtttttctgcttgggtttcgttgctttggtgggggattggatcattggaagctaaatttggagaaatctcccttttctctgtctcctctaccctcactcgacatgctttagattcgat

SEQ ID NO: 92233 - DNA, 343 bp, Zea mays
  Clone ID: MRT4577_184111C.1
agctcgaattcgttgctgcggtgacgcggcggcagggcggcagcggcggcagcaaggatagcgacggcggcagcagcaggggcagcaacaggggcggcagcggcagaggcagcaacagggccagtggctaaatgccactggtttttagatattagtatagattagaagtagtatagtgaaataatgtagtagtattagtagtgtagagtagtatagtgcagcgtagtagtattaatagggaagtatcaactcataatgagttgatttgtaagtactgttacttccctttaatgaagaatggcgttgccttcaaaaaaaaaaaaaaaaaaaaaaaaaaaaaaat

SEQ ID NO: 92234 - DNA, 527 bp, Zea mays
  Clone ID: MRT4577_184112C.1
atacacagtgcctcctcaaaaactgtcgtaaccgtcacacacacgactgatacttgtgacttcgccatagccagcaagcaaggataccttccgttcgacttcatctccgatccaccatgtgcgacaactgtctagcactgctgctcctgctgcaccccgtaccagcgcttcacgcgcggctactgcatcggactcgtcgtcatcgactgtgagcgccgacatcgtctggctcatcctccgctacggacacgcggaacatcccactctcgaggtcgactacgcctcgctcgcgcgcttcaccgtcgccacctcgtcgtcagaatgccagtgcccaccgccatctcctacaacctgacgctcacgctggtcgtgcgcaaccccaatgtgggacatagcaacaccaccttccgatcactcgaggtctactacctcttctagcatcaacgcatccatcgcgtttaccatctatccgcgaaccccctacgtgcagtccgtacatgaagaccgccgtgttccgactctccagc

SEQ ID NO: 92235 - DNA, 297 bp, Zea mays
  Clone ID: MRT4577_184113C.1
aaaaataatttttatttttagttccaaatattgaacatacttttttttttttattttaacttactgaaaccaccacctatttatttgattggcgaagaaaaatgatgcacgtggtgtacttggttaatcgaaacaattctagtctagaaatcccctccggtgtataaaaccgtagcgcatttagtattcgacacctaccctcagaatttgataaacctttacgctaaaccaaccaacactttggttccgacaagcggaaacaaaatttattaaaaaaaaaatattcaacaccaaaaa

SEQ ID NO: 92236 - DNA, 360 bp, Zea mays
  Clone ID: MRT4577_184114C.1
gcgacgactactacccaagcttcatgttcagcaactgcattcacgtgtacttggaggacaaataacaccctaaggcccccagatttgaaatcatcgccacgaccaccaccaactgatgacctatcaacgactcaacgtgagccttaataaatattaattcacagccatcaacataatattggggatatacaggaccatcggagcttgtacttatgtaggatgctaagtcttaactgtgtacattaattaacttgtgtgtcgaatgtaccccttatacaaatgtgttcgtgtctgcccttccccaagaatgcggtgagcggtcgatctatagtcaaccggtgcctaaatgatttgtgcttt

SEQ ID NO: 92237 - DNA, 216 bp, Zea mays
  Clone ID: MRT4577_184115C.1
cctagtacgccgcagggctggaattttccttaaagggacaacgcaagcgcgggaagagggacacgaagtcgcggatcagaatgtatcatgcaggaaacttggggtagggttgaccttgtcacatcatggccacaccctttttttgcgaaatgcctgaacgacgtttaatgacctaaggctaccctacgtttttgcctgaatggtctcaccttttcc

SEQ ID NO: 92238 - DNA, 477 bp, Zea mays
  Clone ID: MRT4577_184116C.1
taggggccttttttttttttttttttcggggtcatgccaaatataccaaattatgagcagcggacctccaatatctacagatgttccatgacgattgccacgtgtcgaccgtagctacgaacaaagagaagatactataccgtgcaatgggagaacctgagcttagatcttggcgggtgggaccgggtgcggccacatctctgaggtcccttcttgatccacaggatgtccctccgtacgccgacgctctgacgaacttcattaacgagccgccgccctagcagcttgaacttgatgagcagacctctcttggtgaagggaaacgggaacgttgccaaaaacttgttctggagcgccctgtagaggaacggggcctcacaaacggaaaggccccaatgtccgtgggcgatgccgatgtactcgacgccaaagtagacgatcctgtcccctgacttgtccaccaccctcactgcacga

SEQ ID NO: 92239 - DNA, 157 bp, Zea mays
  Clone ID: MRT4577_184117C.1
ggctgcgttcctctcggaacgcgccgcagaaggggtcctggtgacgagtaccgcgttctctccttgaatccactcgccagcacgcagccctctgcagccgcaccctgcacacccgcacctctcatgtgccaggaacttgctactaccagcaccatgc

SEQ ID NO: 92240 - DNA, 420 bp, Zea mays
  Clone ID: MRT4577_184118C.1
gccgcgatttccagccggccccaaagccgtggagcacggctccatccgcgacccggccgccggagacgaagacccagcgccagccgccggagacgtgcgcgtcggccccaaagatgtggagacccatccgccgtggagacatccaagggagggagatttatgcatcgttcggtgagcttttgatgctatctagatgtcctcttccattgttgctagcttcaagcttgatcacaaactctttccactcctgctagtttatgtttcttgccaaaaagattattgttcattaatgatctttaacatatgttttttgttattctcttgagacctaaatgtttatcgaccaaaattgttactgtgtatgcaaactatgtttttgtatgtcactgaaactacctataaaattgtcactgtgtatcg

SEQ ID NO: 92241 - DNA, 537 bp, Zea mays
  Clone ID: MRT4577_184119C.1
atggcatccaatgggcatcttgaccttaatgatgaagaggatgacactttggatgacatcattgatcttcctcctccgcatgcttctatcattggagggcttcatcttcacccagtagaggccatcataggacctcatgaagagttgacagacttcagtgcccgagctattgatgttcttcaagagatcaggttctccaatcccacactcgctcctaagcacccagggtgtgagaagatgaatgacccagatatgacaaatgctttcagggcttgtgagaggcaaggaatgaagagaataatgacaatgcagtactcatggaatgtcgaagtatttgcacagttctatgcaaccttgtggattaaggatgtggatgaagaagttgatgataatggatatccagtgatgtacttctatctaccgggaatctggcatagaggatgtgtccatgctccattcataatgaagatgattgaggttgttactcaagtcaggtatgaaaaggatgttaagcacaccctctacattctctattag

SEQ ID NO: 92242 - DNA, 570 bp, Zea mays
  Clone ID: MRT4577_18411C.1
gggctactcttccaggtccttaaattcctatgcttgggggaaccacctaccataaagttgtggatgagaacctggagaagctgaagaaggcgctagaggtgtacgaggcacgcctgaccaagtgcaagtgccttgctggagacttgctcagcctgcccgacctgaaccatgtgtgtgatactctctgcctattacgtacgccctacgcatgtgagctcgacgcctacaagcatgtgaaggactggtggtatgttatgatggagaggccgtctttccagaaggtcgatgccctcatgaagctatctgcttgaaacagtcgccctttcaatggctgaatggaataagccaagtataatgtgcattgcttgttcgttcagtgatttgtgttgtataaccaaagtacagtgcctatcattgagcatactatcttgtaacaagacattaaattggtcctaaatgagcattactatactgtgtttaagaatatactctccatcaggcaaaaataaaagataaaggacctcaactttaaataatacaagcttacctgctcatgcatacaacttaata

SEQ ID NO: 92243 - DNA, 304 bp, Zea mays
  Clone ID: MRT4577_184120C.1
gcatgaatacccgcatctgtttccagtcatgaacttcctgcaaactctcagggagagctgctggagggtctttagacacatctacttttctgtatcacggtctgatttgatgtccgcgagtgaagagcatcgctcgctcctagactagatcaacgtcacgatcaacgagaacatccatgagtataagcactcgtcgtcgtgctcctcctcttacgactcaaacgatgacaaaaagcccaataactctaagaagaagaagcttcttggaagaaaacattcattgcatcatgttctcggaggaggc

SEQ ID NO: 92244 - DNA, 254 bp, Zea mays
  unsure (1)..(254): unsure at all n locations
  Clone ID: MRT4577_184121C.1
cgggatgaccaacaaagcttcttatatacaanttctaactgcagcacaatcgatggagaggctgccatttattaccgatcatctgcctcctttccttcatcatcccccaattctgaagagacatcactaaagactgaggtagctgatgatggcaaaatcattggcactgaagatgaaatggaaacatcgtatcttggaaatgattgtgttgacgaagtaaaaaaattatcataatgaactgaccacccaaattg

SEQ ID NO: 92245 - DNA, 348 bp, Zea mays
  Clone ID: MRT4577_184122C.1
ttgcatgggacgtcataagctcttgtatagggtcacctagatttattgcagtggccgctgttctagaccttcgatacgtgggaaaacgcctggggttacggccacttaattggcttgtagagagtcgccttattctcgggtggcggtttagcgaacatgcgggtaccgactgtgcctatcctatgatgggtgcacacctgggtgggcaatgggtacgacagcgctgtgacgggacattaagcgcggcgctggagctgtaacaactcctgctgacagatacaaccgtgcaggtgatatggcacttactgttgaaacacttaagtagttatatttggctttaaagaggat

SEQ ID NO: 92246 - DNA, 183 bp, Zea mays
  Clone ID: MRT4577_184123C.1
ttgcagactcttctcaagggaagatataatcaactctattaccatcactcgggtgacatttctcaagggggagatcacactgctaatctgtgttacaatagtgaggggggccccccccacgttgatactactataatagctgaatgcctccacccccccccccccgggggattcttccaaaaa

SEQ ID NO: 92247 - DNA, 828 bp, Zea mays
  unsure (1)..(828): unsure at all n locations
  Clone ID: MRT4577_184124C.1
tggacgcctgcaggttccggtccggaattcccgggtcgacccacgcgtccggtccataatcacaaacaattcctaactcaatacagaattcagcctacatcgttttacctgcctccttctattcttacattgcagaacgaaggctaagtaagtgttaaaagacacgtgaagggagctgagggagcagggctccttagtgtgatcccatccatccctctcttgggaaaaagagttgcatgcaagcttacagtcttcttaatcctttgactccatctttaaaatttcagctttaccaatgtcaaaaaaattgttaatccagagaactaaataatctgtagaaagaatacaaggctaatactctttttataaagcaggctggtattgcttccatatgtgtgtatgcttgttccagaacctgtttgttggttctgaatgagaacgtacggagcactcaaatcagtgggaattacaatttttcttttttgaaaaaagacactttttaaaaaattttatttatttaatgtatgagtgctctgctgcatatacatctgcctgcctgaagaaggcatcatatccccctatagatggttgtgagccaccatgtggttgatgggaagagcagcctgtgttcttaatctctgagccatctcaccagcccggaatacaaattntatttaaaatatttccaaagtttggtttctgaatctcagaggaacacctgntatggtatcacactgcactnttactctgttagtcatttaaataggaaaaagaaaataacatcagcttcctcttatcataatcatggtcatggacataaatatttca

SEQ ID NO: 92248 - DNA, 521 bp, Zea mays
  Clone ID: MRT4577_184125C.1
atacctttctcggccttttggctaagatcaagtgtagtatctgttcttatcagtttaatatctgatatgtggaccatgtgtttacttcgatattaaatttattttttgtgggggagggctcactacagtagcttgctactggggtcctcacgtgttgtttgggcgttgcactatagctcaagcctggcgcaccccaaagaaaaaaaataaaaaaaaaaaaaaaaaaagaccctaaaaaacaaaaaaatacaaaatatataaaccctttaaagaggggtaattgcacgctcggcgtacccatggtaatagatgtttactgtgcgaaattggggtgcgctcacaaaaaaaaaaaaggccccagagggccgcataccccgacttttctgccctttctaaggagggaactacccccctttagttgcaatgggctcactggcccccttggagaaaattaaaccgccttcccatcccccacaaattaaccgcccgaagcccaaatagagaaagcttgggtctccaac

SEQ ID NO: 92249 - DNA, 495 bp, Zea mays
  Clone ID: MRT4577_184126C.1
acttgtcttactttgcttttctttcttttttgtttggtattcgagtcgaacaagtatgaaaattttaaaacatactcataaacgaccaatcttttcattggcataacttactttgtttatataggtaattggtgttgttacgcaaaaaatattagttcattaaattaatgccacttttttggaggatgatagtttattagatgggaaagagagggtccttttcatttcctgattaattatgacgatccctctcgcgaaaacgctaacttgaattctcattctcaagtgataatggaacaatttcaactctcatattacaactaagtagaattccatggaatgatcaatgcattatttggattctatattatctgcgtgtctagaatcctagcctgaaaatatccctcattttttaggcaattgaagcgggattgacgaataatatataaaaatagtagtgtttattagtgattcataaagcgaaatgacatgggg

SEQ ID NO: 92250 - DNA, 1706 bp, Zea mays
  Clone ID: MRT4577_184127C.1
ggggacatttcatcatattttttgttatcttatagcatgacacatcaccatgtttatcctaccactataaaggcgcacaaagcttccaaagcgaagaagctcttgaggagatactgtaatgaaacatggctcctctgactcctagactggtagtgcccatcgacgtgaagaagcagccatgggagcagaaggttcctctccacaaccgctggcatccagacatccctcccgttgctgatgtaaccgaaggggaactgttccgggtcgagatggtagactggactggagggagggttagagatgacaactctgcagacgacatcaaatccctggacctcacaatcactcattatcttagtgggcccctaagaatcgttgattccgaaggggttccggcttcaccaggcgatcttctcgcggtggaaatctgcaaccttggcccgcttcctggcgacgagtggggctacactgcgatatttgagagagataacggaggtgggttcctaactgaccacttccctactgcgaggaaggccatctggtatttcgaaggaatctatgcgtactcccctcagataccaggtgttcgtttcccaggattaacccatcctggtattgtgggaactgcaccgtcagccgaacttcttaatatatggaacgagagggagaaaagattggccgagacaagcccacagacccttaaactgtgtgaagtgctacaccagaggccccttgccaatttaccgacccctgagaactgcttacttggaaagattcaggaggggactgctggatggcacaaagtggcgaatgaagcagccaggactattccgggaagggagaatggcggtaattgtgacataaaaaacctaagcagaggttccaaagtttatctgccagtatttgtcgaaggagcgaatcttagcaccggtgatatgcacttctcccagggcgatggtgaagtttcgttttgtggagcaattgaaatgagtggattccttgagctcaagtgcgagatcataagaggcgggatgaaggaatacttgaccccagttggtccgacaccgctacacgtgaaccctatctttgagatcggtcctgtcgagccacgcttctcggagtggctagtgtttgagggcataagcgtggatgaatctgggaagcagcatttccttgatgcgtcagttgcttacaagcgcgcagtcctgaacgccattgagtacattgctagatttgggtactcaaaggagcaggtgtatctcttactatcatgctgtccctgtgagggtaggatctctggaatagttgactctcctaatgcagtggcaactattgccatccctacagcaatatttgatcaggatataaagccaaaacacctgagaggaagaccgggaccaaagttgataaggcttccagatctcctgagctgttcaaacaatgggcatattcctgtcacccaagaccaaagtggtacaagggcgtcctaggggcgtatatgatctggaagctgatgccgtatccttctacttatacacacaaataatcgtgttggtgtttccaacaatgtatgaggatagagacacctgagtggtgccatattttcagtgcctgtattgctacaaagttgttcattaatttcactctatagaaaatttcttatttggggtcgaaaaaaaaaatagcagtgaagtgaggatgagata

SEQ ID NO: 92251 - DNA, 601 bp, Zea mays
  Clone ID: MRT4577_184128C.1
ccgggttcccccctcgagttttttttttttttttttttttttttttttttttttttttttttttttttttttttttttttttttttttttttttttttttaaaacaaaacctacaaaatttttattggggacgaggggttcctgttcctggggaaaaacaatttttaaaaaaaaaaacaggggccttaaaagcaggggggaatattcctttgagagagccccaacttgattcctttgggggggaacaaaaccaaaccaattttcccccccccccccaacgaaaaagttgttgaaaaaaaaaagggggacccgaaccaaccccgggcccccaaggggatggaagaagggggggtttttccttgttaagggccccccccccggggggcccccccctttgttccaaaaccaacccccgttaataacgggtttttcctgaaggagccgggggccttgggggcccccccccggaggattttctgggggaaaaaggccccaatggccccccccacaggggggcccccccaaaaaacccagggggccccccagggtttgtcttttttgaaaaaaaaggggggccccaggttcttggccggtttaatcc

SEQ ID NO: 92252 - DNA, 285 bp, Zea mays
  Clone ID: MRT4577_184129C.1
cggggatggttgaatctatacatgaataaattatgcctatgacatggagcctaagagtgctgttcttacaatacacatacatacaaggtatgcaacacctacaacggggcctgcctacagcaccaaccgactgttctatggaattcacgatataacattaactccgggaaatatgtccttcgtaacatgaatgaatctagatccttttgtatggaaaatgtaataacacctacactacaactacaggcgctgtatattattcattggttttgtacagttttaaat

SEQ ID NO: 92253 - DNA, 259 bp, Zea mays
  Clone ID: MRT4577_18412C.1
ggacgctggttcctctacaagacacatccagcgaatgtcgaagcctccgccgagcatcgatcatgtcggcctactgcgggaagtacgcggattagctcatcaagaatgctgcctacatcgggacccctggcaagggtatccttgctgctgatgattcgactggcaccattggcgagcgcctttccagcatcaatggcgagaacgttgatgagaatcgtcgggctctccgtgagctccggatctgctgccctggttgcct

SEQ ID NO: 92254 - DNA, 508 bp, Zea mays
  unsure (1)..(508): unsure at all n locations
  Clone ID: MRT4577_184130C.1
ctatagagtgaaattaatgaacaactttgtagcaatacaggcactngaaaatatggcaccactcaggtgtctctatcctcatacatgatgactgcccaacaaataaaagatctacattgttgngaaacaccaacacgattatttgtgtgtataagtagaaggatacggcatcagcttccagatcatatacgcccctaggacgcccttgtaccactttggtcttgggtgacaggaatatgcccattgtttgaacagctcaggagatctggaagccttatcaactttggtcccggtcttcctctcaggtgttttggctttatatcctgatcaaatattgctgtagggatggcaatagttgccactgcattaggagagtcaactattccagagatcctaccctcacagggacagcatgatagtaagagatacacctgctcctttgagtacccaaatctagcaatgtactcaatggcgttcaggactgcgcgcttgtaagcaactgacgcat

SEQ ID NO: 92255 - DNA, 127 bp, Zea mays
  Clone ID: MRT4577_184131C.1
ggaaaagtcaggcctccgttgtgagttctcaggaaaaaggtgccactgcccaaactgacggggagagacctgcttactcatgcctgagtaatctccacacccgaggcaattgccaccccaagttttg

SEQ ID NO: 92256 - DNA, 1428 bp, Zea mays
  unsure (1)..(1428): unsure at all n locations
  Clone ID: MRT4577_184132C.1
tcgaaatncgtttcgagggattgtgtgagattgaactttagccacggaactcaagaagaccaccgcaagttgttcaatcttgtgaagtccctttccgttaagtaccaacatcaagtctctatcatgtgtgatattcaaggccctaagatcagaactggtcgcatggagaaacctttcgaaattcgcgctggcgagaaaatcgatgttacgcccgaagatgtactcggaacacctcaactcatccaaatcaagtacgccacgatgttgaaagatctcgacgcaggcgacgttattttcatcaacgatgggattatcaagcttaccgtagagtcaaagtccgagaaggctttgcattgtgtctgcaacgcaggaggccaaatctctgatcgcaagggttgcaacattccctctggaaacatctctctcgatgttgtcaccccaaaagacgacaaagacttacaattgatcgcagaactcaatcctgagtacgtcgcttcttcttttattggaactgccgaagatgtgttgaaggtgaagaaggtgttagccggatatggcaataccaacattaaaatcatttcgaagattgagagacctgttgcgctagaaaacatcgatgccatcatagaggtgacggacggcctaatggttgccagaggcgatctcggtgtcgaaatcgacacctgggatgtgccctctgcacaaaagatgctttgccagaaagcgaacgcagcgggaaaacccgttatcgtagcaacgcagatgttggagtccatgacgcagaactcaagacctacccgtgcggaagctaacgatgtgtacaatgcagtacttgacggtgcggatgcggtcatgctttcaggagaaacggctacaggaaagtatcctatcgctgctatccaagtgatggacaagatcgtagaggctgccgagggtcacatgccagagagattatcaactaactttctatctaccaaagttggtatgaccgaaaccattgctctttctgtttacgaaaccgccaagaacttcactcgtattggaaggaagtgcaagattatcgttatcacttatcctccatccgcatacactgcaagaatggtttcgaagttccgtcctccagcagatgtgatcacaatcacctctgatctacgtatagccagagaaattaatcttttatggggtgtgcgatctgttcactttcctgagttatcggaggagaacaatatggaagtgagaaacttgactgctatcaagaaattgatcgaagttggtttggttcaacttgataactatgtcatttgcgtatctcgctctctgtttggcaaacatactggagcttgttcaaatgtttattgtttgcctgtgcttaaggaagaaggactactctaaatcactgagccaaaaataaataatttctgccatttc

SEQ ID NO: 92257 - DNA, 229 bp, Zea mays
  Clone ID: MRT4577_184133C.1
gttgttttgagggcagccctaccaacctccacaggggggattttattgggatgatcccttaacgaaagacacacagcttacattgccaacaatgataaggctcttgcatcgactgaaacggcacaggctgcagaatcccgcgaccacattggccagtaactctatagtggaatggcaacacagcccaagctgacacgagtcaggatcgctcaatatgaattaacccagc

SEQ ID NO: 92258 - DNA, 414 bp, Zea mays
  Clone ID: MRT4577_184134C.1
ctaagaggggccgggcgggggggcacacagcccaagcttttttgcagtttttattgctctagacggccgtcagcccctaggggcataggcgcctggggctccggaggaagatgaggggacacgccaggagcaacttatttgttttttttgtggcgaggacaaggggcgggggggggggagctgttttgtttccccccacacgcaaaaggagatagcaaaagcagcggtcagcagagccaggcgaacccagccctgccccaagcttcgggccatccggctcacattgcagaatgtgtgggcaaccaccctacggcctctgttgccctccgcaagccggcccgccgcctcttggcaacaggccggagctgcccccggaacgcagctgcgggcgagtgacagaggggcgcccccaga

SEQ ID NO: 92259 - DNA, 300 bp, Zea mays
  unsure (1)..(300): unsure at all n locations
  Clone ID: MRT4577_184135C.1
attgggtactcgagccggcgggaccgttagtctacccgcnagcgccgcccttgagncttgcccccaagatgacgatgatccccctcgccggtttcaccgccctatctgccgccggcctcctgctcatcttctcctccttcctgctgcgaactcaagcaggaggagccagcagcagcgaggaggagcggtacgtgccggggcgcagggtggcgtagagaatgttgaaggcagagtccgggatagggaaggaagttagtgagagcagcagcgattgatattttgtggtaagaaggtggaggt

SEQ ID NO: 92260 - DNA, 404 bp, Zea mays
  Clone ID: MRT4577_184136C.1
aataatttttttttttttttttttttttttgggggcagggatctggggatctaccaggcatgagatgagactacagcagcaagcttgggtttcggattaacaaaaagaaccagggccgtgccctggcccacgtggaaaaaaacacatggaagttcactttgagacgacattgccaccagcacccacctcgagaaacgagcgcgttcggctggtctacaaaaaccattgttgcagttgcaaaaaactggtgcaggtgaaatccctaaagaaaaaatactggaaaagccgcagccccagctggaataaagccgtagggaacaagcccacaaccgaaacacaccggagttccattctttttttttttccccgcctttttggcaggctaacgtgggccaatcagggga

SEQ ID NO: 92261 - DNA, 319 bp, Zea mays
  Clone ID: MRT4577_184137C.1
cacaaaaaaaaacctttcttaataaccacatggtatttcatgcgccatatacaccggctaatgcatttacactctaaaagaacctgcccattacttaacaatccgacaagagctttttaaaccctataaattttctgtactgcaaggggatccatccaacagccgattcataagccacaagaaggggggaaccctttaaccggctggaaaaaactttgatgcaatgcttcctcacaggccaccttggggtagtgagcaacaacccatacatacctctgaatatagggcagatgaacattcaactcagcatgcccaacac

SEQ ID NO: 92262 - DNA, 513 bp, Zea mays
  Clone ID: MRT4577_184138C.1
ggcggtggacgacgccggggcacgaggagcggcccaaggggtacctcttcaaccggccgccgccgccggcgggggagacgcggaagtgggaggactgggagctgccctgttacatcacctccttcctcaccgtcgtcatcctcggcgtcggcctcaacgccaagcccgacctcacgatcgagacctgggcgcacgagaaggcgctggaacgcctcaagcagcaggagctagccgccgtctccggaggcggtgacgccgatgccgagtgatccgctggtcagatcacccgcaattctagatatattgtttttttattttctttctggttccctgcttgtgtcgcgcggttcaataaggctgtctgtcagtctgtactgagatgcatgtcatgagattgagagattccagaaatggatggacatcagactgaacactgtatcattgttgctatttcgctggataacttacacttcacaatccttgtaattgttgcgtgatggctaaccacgctat

SEQ ID NO: 92263 - DNA, 682 bp, Zea mays
  Clone ID: MRT4577_184139C.1
accctcctacaccaccgacctcccactcccagccgggccggcgaccatggcggacgccgcaggtgcgactcccctcctccccggcctcccggacgagatcgccatctgggagatcctcgtccgcctgcccctcaaatccctcctccgcagccgcgccatcagccccgcatggcgccgcgccacctccacccgcggcttcctcctgtcccaccacgcccgccagcccgccctccccctccagtacacccacagcaacgtcgccgacggcggcgagtccctggacgtcgtccccttcaaccaccgtgcaggggtcgccgccgccgaccggttccagtgcgtcgcgaggctgaaaacggctcccgtcctaacgagttcatgcgtccgtgctcctcgcttctatctcgaggcctcctgcgacggcctcctcgtgctctccatcgaatttgacgacatctgcatctgcaacccggcaactcgacagtacgcagctctccagcaggttcgcggattcaggcccgtggagttgtacccccacccctctaccggtgactaccagctgttgttgtaccaggatgaagatcaaggtgccatctacatgttcacagtaggctctggccaggcgccgaggcacatagggcgccctgacccgaacgaactggaaaattgccgcggactcctggtc

SEQ ID NO: 92264 - DNA, 236 bp, Zea mays
  Clone ID: MRT4577_18413C.1
tcgtacaaccacagtgtgctgccgtactaccgggacgctgcgcctaacgctggcaccctcttacaactgcaccatttgctgccatacaactcaacttggtctgccacaccgatgggtggtctgccagaacgctcatatgggtggcgcccctcgtttagatgtatggatagagttatgagtgcaattgtaaggggtgccagctgtaggctcaggcttcccataaataagaaacaaca

SEQ ID NO: 92265 - DNA, 747 bp, Zea mays
  Clone ID: MRT4577_184140C.1
atcttgagctccagtgcatcccggcccagtccagtccagtttttcctctcctgccccgtctcccgttcccacagcacagcctccatttcccaatctcgcaggcgacgccgacgcgttccaccggcggcaccgatgcgggcgatctcgacggccgcggggggcatgctgcgcgcgcggctccgctcctcgtcccgcgtgcgcggcggcggcgatggcgcggggcgatggacgacgccggggcacgaggaaaggcccaaggggtacctcttcaaccgcccgccgccgccggcgggggagacgcggaagtgggaggactgggagctgccctgttacatcacctccttcctcaccgtcgtcatcctcggcgtcggcctcaacgccaagcccgacctcacgatcgagacctgggcgcacgagaaggcgctggaacgcctcaagcagcaggagctagccgccgtctccggaggcggtgacgccgatgccgacgccgagtgatccgctggtcagatcacccgcaactctagagatattgttttttcttttcttttctttctggtttcctgcttgtgtcgcgcggttcaataaggctgtctgtactgagatgcatgtcatgagattccagaaatggatggacatcagactgaacactgtatcattgttgctgtttcgctggataacttacacttcacaatccttgtaattgttgcgtgatggcgaagacgctatacaccctggatggtttgcacc

SEQ ID NO: 92266 - DNA, 308 bp, Zea mays
  Clone ID: MRT4577_184141C.1
aattcccggttgcacacgctcacatgtcggcggccggcccttttgttcatatgtgggttggatttatttgttacgttattacgcctctccagaagccagtggaaatgagaccgcaatacctgggggaattccagtttcacatcatcaagaaataaggaggtaaaaatgcacatatatgaattgcacttacttgggtgcttattaggcccatcctgaagcctaggcaaatgagatcggtattcctgggcgaatgccaattccacatggtcaatgaaagagggagggggaaatgtttatatatgcaatgg

SEQ ID NO: 92267 - DNA, 1055 bp, Zea mays
  Clone ID: MRT4577_184142C.1
gtctgagtgttggccgcttttttttttttttttttctttttttttttttttttcacagaaaaagtcgcagtaactgcgtgcattagactttgggcaaaagcttaccagcataatctttctaggctaaaagaaaaaaggtgtttcagaatatacggcaaaacttctacaggcctttctattcatatcagtctgaacattcagttcacaacagcacatgctgctgatgccagcatgatctcttcaggcttcattttcgtggtggcggcggctgcctcttcacggaccggagttgcggcgagttctcaaagcagtggtagaacccaaagtgtgggaaccgctcgtaccacgtgtcctgcggggcgtgcgtgtcccagtgctcgccactgctgctgcgcccgtacttgtgcacccacccagacccgttgtgccgctcaccccaggtgcggttccaccggtccccatgcttgcccgcccaccatgtctccccctgcttgacgccatgcccattcaggtcgaagtgctcgtcccacttgtcgccccatttagaccacccgtcgccctccgaacgctcggcccacttgtcggtgtacttttcgctgccaccaaggccgtcgtacttctcgccccatctttcatgccagacatgggcatggccgacatccagcggtgtgtttggatccaagctgcaccatttatcagcccatttttcggttttgccggtcgagtcatagtactcaaaccattgctcttgccactgctcccctttaccgttctgtccccacttgtctgcattcttctccatatgcataaccccacatgtgtaatcctgccacattgactccttccagtattcccgccaaacgttgcccgcagcatcacgcccagacttctccgagcctaactctttatgatcgaaccggtctgaggcctcccagtatttgtcttcccattcaacagcgccatcagcactaactcccctgatcacggtccacttgcaaacaacaccatcaggtcttcgttctacacctacttccttccaccacattgagccatct

SEQ ID NO: 92268 - DNA, 291 bp, Zea mays
  Clone ID: MRT4577_184143C.1
tcgtagcacagccctatgaatctactgggctgtgcgggagggctctcgctctcctaaccggtgcatattctccaccagtagacctctgttccgccacgacccaccactgctagggcgccgagccgaacgcccacagccccctaatctacgactgcttgtcacgcggaaacccatggtgctggtggcgccgagcccgagcgcgctccgcgtgcgggagaccatcggggtggacctcactgactgatatgaaaacgatgaatgctggaccaaaccattgtgaacggccaggcg

SEQ ID NO: 92269 - DNA, 211 bp, Zea mays
  Clone ID: MRT4577_184144C.1
ccggaaattgtgtccgcgcgagtcatgcccacgatcatggtgatcacgggagtcgtgaccgcgatgacggcccccgtcgaatccacgtccaccgcggttgcgtccgcccttgccacgacgaggctttccgtcacgagccttcttgccgcgctgctgcttgggagcgacgagagcctcgtaatccttctcgtcaataggagcgcccagggcc

SEQ ID NO: 92270 - DNA, 366 bp, Zea mays
  Clone ID: MRT4577_184145C.1
cggggggggggggaatttttattctttttttttatttttttcctatggtgggtggttttttttttctttaaaaaaaccgggtcaattaccccttgggacacccctgggggtgcaactccttttaatttcaaacgccggggcgcctatggtgattatattcccctttctctagaacccgtggacaaactttttttggacgagggcttcttcccccctctctcggcgcttttgaaaccaaaaaacctggggagtggtctctctttcaaaaaaaaaatatgccctgacaactcctgggaaacccctcccccgccttttaggcataaacccccgctttttttacgcaggaagaaaatggcttttcttttt

SEQ ID NO: 92271 - DNA, 363 bp, Zea mays
  Clone ID: MRT4577_184146C.1
ctcgctcagaatacaaccaagggctttcgcgcccgctctcacccactcgctagcaacgaccaatactgaagctcctggcgtacagtgacttcaaggacacagcttggtgacctacacttgatcatgtctcaatgaggataaagcacactcagcatattttgggacatcatccatggcaagcaatcgagctggaagccaccgcggaagtacagacttgccatcttgagtattccccaactcatactcaacagaaacatcaagacgtgtctccggaaccaaccttgactgaagctcctagcatacagtgatttcgaggacacggcttggtgacctgcagttgatcatgtctcaatgaggataaag

SEQ ID NO: 92272 - DNA, 709 bp, Zea mays
  Clone ID: MRT4577_184147C.1
ccggccgggacttctcatccaccaattgtcatcgcaaccaagcctttcgacactctcatccatcacagtctttcagactcacatactccctttttaaccacaaacccccccaaaccacaaaccctccaaaatgactggcggcggcaagtctggcggcaaggcctctggttccaagaacgcgcaatcgcgttcctccaaggctggtctcgctttccctgtcggtcgtgtccaccgtctcctccgaaagggcaactacgctcagcgtgtcggtgccggtgctcccgtctacctcgctgccgtcctcgagtacctcgctgctgaaatcctcgagttggctggtaacgctgctcgcgacaacaagaagacccgtatcatcccccgtcatcttcagcttgccatccgaaacgatgaggagctgaacaagcttttgggtcacgtcaccatcgctcagggtggtgttctccccaacatccaccaaaaccttctgcctaagaagacaggcaagactggcaagacctcaagcatggagctgtaatcgggtcatttggttctgtttttccatgcgatggcaggttgtttcggttgtcatgacaaaggggtcacggtttaagggtttacacggttgcttttcatcagtttattcgcgcgcgtcgggttgtacaataatcccccacggctatggtcatgaaataagaatacttctcagatc

SEQ ID NO: 92273 - DNA, 146 bp, Zea mays
  Clone ID: MRT4577_184148C.1
cccacgcgtccgggtcccctgttctgatcgttctgttcctcacagcagcatccatatgctggggagcctttgaagcaagctgcccctcgtgcacaggagactgccgtgcacatcgagtacgttgaccgtcccgtggacgccgaccc

SEQ ID NO: 92274 - DNA, 359 bp, Zea mays
  unsure (1)..(359): unsure at all n locations
  Clone ID: MRT4577_184149C.1
ggcgccgcaggacagagaggagaggccgcgccgcccaagaccgcaggggggagagcacgccgcagaccagcccgagaccccgcacaagcacgacacaccgccagcagccgaagaggggaacggcgacaagcaggagaggggggaggacgagggcgccaccaccgaaggaggcggccccccaacgagagaggggggaggccagcacagcggccacagcggcagcaccgggggaggacccccacgaaggagaggccgccaaggaaggaggngcggaagcaaacacgccgcaggcgagagagccaaggcaggcgcccggccaacccaagacgaacccaagcgaaaggcaccaggcggacggg

SEQ ID NO: 92275 - DNA, 627 bp, Zea mays
  unsure (1)..(627): unsure at all n locations
  Clone ID: MRT4577_18414C.1
cctgtccgggtccatggtccaatcccagcatcgctaggaaatgcttcccatctcacgttattagatttcgcatctaacagtttactggcctatacctagttctttgggaaatctaaccaaactgaactacctaagactagaacagaacaaccttgaagcaaaagataatgaaggctgggaattcaaagatgcactagggaattgtatgtggctgcaatacctagtattatctgacaatcagctacaaggagccataccagattcagttgggaagttgtccaatagcagccttcagtacctatattttggcaaaaacaacttgtcgggagctgttccagagagcatgggaaaccttattgccttaaacgagttagttctaggacaaaacaatttgaccggtccgattggatcatgggttggaaagttgaacaacttggtaaaattatatctctcagacaataacttcagtgggctgattccatcgtccattggtagctttactaatataacaaatctctacctacagaacaacanatttgaaggtccaatacctcctagtttgggtaaacttcaacatttacaagaactgaatcttangtataacaatctacatggncccattaccga

SEQ ID NO: 92276 - DNA, 834 bp, Zea mays
  unsure (1)..(834): unsure at all n locations
  Clone ID: MRT4577_184150C.1
accctngngagtcgtccggggnanactggtacaccatatatgctttacaaggatacttgcagtaggaaaagtaaccagcagaatctgggcacaattaaatcgtcaaacttgtgcactgagataattgagtttacaagccctactgaaactgctgtctgcaacctagcatctattgctttacctcgttttgttcgggaaaagggtgttccattagagtcccatccatctaagcttgtgggtagcagtgattcgaaaaatagatattttgattttgagaagctggctgaggttacctcaactgttacttacaatcttaacaaaattatcgatattaattactatcctgttgagacagcaaagagatcaaatatgcgtcacaggccaattggcataggtgttcaaggcctggccgatactttcatattattgggcatgccatttgattcactagaggctcatcagttgaataaggatatatgtgaaactatctactatcatgctctgaaatctgcagctgaacttgctgttaaagaaggtccctatgaaacatatgaagggagccctgttagcaagggcattcttcaacctgacatgtggaatgtagtgccatctaccaggtggaattggccatctctaatggaaaccatttctaaagctgggataagaaattctcttctcgttgctccaatgcccactgctttcactagtcatattcttggcaacaatgatggctttgaaccctacacatttaatattaacagccgacgggttctaagtggggaatttgttggggttaacaagcatcttcttaatgatttgacggaaatgggcatt

SEQ ID NO: 92277 - DNA, 3080 bp, Zea mays
  unsure (1)..(3080): unsure at all n locations
  Clone ID: MRT4577_184151C.1
cggcgcgtgggatgaaggccacggcatggtacctgctacgcactcgcgccgctcccgagccgctcctgttgacgcattcaggttccaaacgtgtgcagcacaatcggagaggaattgtgtcatatcgggatatatctccgaggaacaagtggatgataaaagactctagaattcgttcttttaacaaccccgatgttatgtctttaatgctcgctatgtttacgatcagggtggtggcaaaagagtgcatttgctgtatatttggagcgttggcatgctgatatttttgagttccttgatctgagaaagaaccatgggacggaggaaaatcgtgcaagggatcttttctatgcgctatgggttcctgatttattcatgcaaagagtccagaataatggagaatggtcattattttgccctaatgaagctccagggttggctgattcctggggtgaggagtttgataatttgtacaagaaatatgagagccaaggcaaggcaaagaaagttgttctggcacagaccctttggtttgacattttgaaggcacagatagagactggtacaccatatatgctttacaaggatacttgcaataggaaaagtaaccagcagaatctgggcacaattaaatcgtcaaacctgtgcactgaaataattgagtttacaagccctactgagaccgctgtctgcaacctagcatctattgctttacctcgttttgttcgggaaaaggatgttccattggagtcccatccatctaagcttgtgggtagcagtgattcaaaaaatagatattttgattttgagaagctagctgaggttacctcaactgttacttacaatcttaacaaaattatcgatattaattactatcctgttgagacagcaaagaggtcaaatatgcgtcacaggccaattggcataggtgttcaaggcctggcagatactttcatattattgggcatgccgtttgattcaccagaggctcaacagttgaataaggatatattcgaaactatctactatcatgctctgaaagcttctgctgaacttgctgctaaagaaggtccctatgaaacatatgaagggagccctgtcagcaagggcattctccaacctgacatgtgggatgtagtgccatctaacagatggaactggccatctctaagggagaccatttcaaaagttgggataagaaattctcttcttgttgctccaatgcccactgcttccactagtcagattcttggcaacaatgagtgttttgaaccctacacgtctaatatatacagtcgacgtgttctaagtggggaatttgttgtggtcaacaagcatcttcttcatgatctgactgaaatgggcatttggactcctactttgaaaaaccagataatatacgacgacggttctgtccagaagatagcagaaatcccggacgatcttaaagcaatctacaaaactgtttgggagatcaagcagaaaactttagttgacatggcggtcgaccgcggatgctacatcgaccaaagccagagcctcaatgtccacatggagcaagcaaactttgggaagctgacgtctcttcacttccatgcttggtccaagggcctgaaaactggaatgtactatctacgcacacgagctgctgctgatgcgatcaagttcacagtggataccacgcttctgaaggagaatgggaacggggttagcgatggaaagcccgcggaggaagacgtagacgctaaaatggcacagatggtctgttctttgaacaaccgggaagagtgcctggcgtgtggaagctagattggagattccatctggacactgcacttcgtgatctgtgaacacaacattacatacagccggctgatgattggagctcagtaaccagaacgaagtctgtgatgtaggtcgagttggaagttcccataatgggaatagcttgtacctgaatactgctacggcgctacctctggtctgtattgctctaaggtgtttgtgctgctgccaatgtactgtaaatatctaccagcgtcaatgttgtcgatgtgctctaagatacagtatgttttaaccgtgctacactctttgcattggatcgaacatgatgtaatgcatcgtcttccataatgatacgagtgctggaaaacagaacaatgtaaactaattagtctgtatcctcgatcccgatcgtctaatatatacagtcgacgtgttctaagtggggaatttgttgtggtcaacaagcatcttcttcatgatctgactgaaatgggcatttggactcctaccttgaaaaaccagataatatacgatgacggttctgtccagaagatagcagaaatcccggacgatcttaaagcaatctacaaaactgtttgggagatcaagcagaaaactttagttgacatggcggttgaccgcggatgctacatcgaccaaagccagagcctcaatgtccacatggagcaagcaaactttgggaagctgacgtctcttcacttccatgcttggtccaagggcctgaaaactggaatgtactatctacgcacacgagctgctgctgatgcgatcaagttcacagtggataccacgcttctgaaggagaatgggaacggggttagcgatggaaagcccgcggaggaagacgtagacgctaaaatggcacagatggtctgttctttgaacaaccgggaagagtgcctggcgtgtggaagctagattggagattccatctggacactgcacttcgtgatttgtgaacacagcattacatacagccggctgatgattggagctcagtaaccagaacgaagtctgtgatgtaggtcgagttggaagttcccataatgggaatagcttgtacctaaataatgctacggcgctacctctggtctgtattgctctaaggtgtttgtgctgctgccattgtactgtaaatatctaccagcgtcaacgttgtcgatgtgctctaagatacagtatgttttaaccgtgctacactctttgcattggatcgaacatgatgtaatgcatcgtcttccataatgatnaanaaaaaaaaaaaaaaaata

SEQ ID NO: 92278 - DNA, 937 bp, Zea mays
  Clone ID: MRT4577_184152C.1
ccaagctccatcgagctcaagttggccctccaccaccccaatggcgcacgcccaagccaaatcactcacgcctactggtccttctgctactatacaaacacgcacggcgaccaaaaccttgcaacagtagctatagtggtactggtagagtggtagtagctcaccaaggtttagcaaatcgtgtgccgtgccatgtcactacgccgcagctcagcggctgcgctcgcggcgctgctggcgctggcggtgctgctgggcacgtcggcggacgatggcggccagggccaaccaatcgtggcgcgcgtgagcaaggacgcctccacctccctctacaccatcgccatcaaggtcggcggcgtgccgctcctcgtcgacctcgccggcccgatgctctggctcgccaactgccccaccccgcaccgcatcatcccctgcgtctcccacgactgcgacgacgtctccactacgtaccgcccgcctggctgcccgaagcccaaccttcgtggagacgggccgtgcgcctgccccgcatacccgcgcaacccggtcgacgggcgctgccgctctgacgacgccaccacgatcaccctcgccgccaatgccacggacggtcagaacccgctctacccggtcaccttccgcgccgtcgggtcctgcgcgccaggggagctcctggagtcgctcccggcgggagcggccggcgtcgcgggcctctcaaggctaccgctgtcgctaccgacccagttcgcgtccttgctcaaggtagcgaacgagttcgcgttgtgcctgcccagcggcggcgacggcgtggcagtcttcggcggcggcccgttccagctcctggcggcgccgcccgtggagctcgccgagcgcctccgcgagaacccgctcccgctcctcaagcacccctacaacggcggctactacttcggcatca

SEQ ID NO: 92279 - DNA, 144 bp, Zea mays
  unsure (1)..(144): unsure at all n locations
  Clone ID: MRT4577_184153C.1
tttttntttttttgacgaacgagaaccatcgactttatggatagattacattcctgaacacaaggtatacctccaacaatgcagtatggtacaaaaagaataagcaatagcccaagatcacaacgcccacccagggggagccca

SEQ ID NO: 92280 - DNA, 941 bp, Zea mays
  unsure (1)..(941): unsure at all n locations
  Clone ID: MRT4577_184154C.1
nganatttcgtcaatctgttcagtttctttctttaacaanaactggtaagtttcacagtttaattatcagcacagcaggtaataatgttattaggaaagacaaaatgtggtactaatcaaatttgtttgtagccatctatacgtaggttcggtatatacgttctaactttgcaagcttcaggttcctctggacctgatggaagggaagatcacacacataatctggccaccccatagagtgcgtcgggtggacaggatggtaccggaaggcaggattatgcctctgtcagcaactccaaggaggaagcaacaatagggtctcaatcgaccgcatcgaaggcgtcaacaattggaaggtcttcatacaagaatgcataacagaggtgaaatgtaataaaatgggatagatgaataatatatgagaacttatctctattgccttagcattctcagtatgtctctcgttacattagataaacttataaacataccttcggctcctgaacaatgggatgcacgaaggttcttcgaaggctaagcactatgaagttatggcccttgtaaaaggtatcttatgtaggacattgttcatctatttataggggagatgaaccgccttagtatagatttacaataattcccatcagtttttacataagtcgtttacaaatgacatcagaacagtaatgtattttctttgttctcagctccgcaagtttcaaccttcgtcgttcgttagcctccccttctgggcttgctcccgaagttgctgctttcagccatcatctttgttacttacgcatagacgaagcgcctttgtgcacttctttagccgaagcttagcttcgtctactagtgagaatattcctgaaatacacttgttaatgccgaagcaatatgtttgataagtcattgttcttcgctaataagtgatcttcggc

SEQ ID NO: 92281 - DNA, 352 bp, Zea mays
  unsure (1)..(352): unsure at all n locations
  Clone ID: MRT4577_184155C.1
nccaggcgtccgttaccattctgatgacagtcatgtttcctctgttaatgacgataagatgatccggtctgcatcatatgttcttttctaccgacaagttcgacgttcaagtacagcggcaaacggtcgtccagctgacattgaaatggtcgattcactagagacatatttccccagatcaaagcctgactataatatgtgaatcgagatattgagatcataccagttatggacattacatgtctgctacgaaatggaatatctgtgtatgaaacctttgacatttcgaggcatgtcagacaccttaggacctaatagcgtaatctcttgaatctgcacatctatatgattg

SEQ ID NO: 92282 - DNA, 378 bp, Zea mays
  Clone ID: MRT4577_184156C.1
ggggtgaggtttttttttatttttttttttttttttttggggccatgggcgggcttgacccactctaattcagacaacccaacagggtctcacttcgggaagagaattcaggatgaagggggccaacatacccacaagtgggcatttttttactggtaccggaaacatggaagataaacaaacaggggcccacttacatctacaaaaggggtgttgggtaaacaagggtttttagttaaccaccctaaatttacctgggatgggggatgaaaaaatattttttctagaacttaccctcccaaagggactttacagagggggttccctcaccgtaattttttttctttgcccctttcagttggaggtctctcaatatat

SEQ ID NO: 92283 - DNA, 200 bp, Zea mays
  Clone ID: MRT4577_184157C.1
cgcgtccgtcagctacagacgaagaagaagcaagcctagctctgttccgggagcgacctaggggggacgggggccacgatggcgacagcgacggacctggggttcgaggcgacagagctccgcctgggcctgcccggcggcggcggtgggggaggggagcccgcgctgggcggcttggggaggagctcgttctacgacta

SEQ ID NO: 92284 - DNA, 150 bp, Zea mays
  Clone ID: MRT4577_184158C.1
tgacaaaacacgggtgggggttgtccttaacatacacaaattccaaaaccaaaacggtgtattgggttcttccagtaaacatcaaaaaagaggaggtttcttttacatcttaccacctcctcacataacaagaattacataaattcatat

SEQ ID NO: 92285 - DNA, 4881 bp, Zea mays
  Clone ID: MRT4577_184159C.1
atggcggctgccgatgtcgccgtgtcgcttccagctctggcaggctccctcgttgtcatgacccaggagatcgccagagccttctcgccacggacatcacaattggtatcagaggctcgtcgccatccttctcgttctcggatccaggcgggtggctcggttgctgtcaagcgttggagagaagttgcagacacggctcctaacaagccatccgcgcaggcgcgacatctggttgccgcgatggaagatgtagagaaacgcctggccgagaagttccagcaagcactggattcctcagcgacaactttgatggaactatctaagaagatggacggcattggagtgctggcaagcaagttgggagaaatcgagagtcgacaaatggagagcgacaagatggtgcagtatctacaggcaaagatggacctctctatgaagtccttggctcaggtgtcgcaggagcagaccaagttggcgaatatggtgactaatgctgcaagaggaatggcgtcgacctcaaaatcccccgctggagacggattgatgggagctcatcccataggccctcaggtatggcagaatgttccacccaagcagacactcaatgtggaaggaggatttaaaagggtggaagatcttgggaatattggggaagtggattctgcaaacaagagggtgtggctacctaaaatggattttcccatatttgaaggagaggatgctagagtatggattgatcattgcgaggcttattttgcattatattcgattcctgaggagtttaaagtcagtgctgcttatttgcacttgaaagggagagcagcacattggttccagtcttgtagagagagtgtagagttgtttgaatggttccagtttaggctggctgttcttaatgagtttgaagtatctacacatgcagataagatgttggagttactcactctgaaacagactggaactgcattggaatataagattcaattcgaaaagttggtgtatcacatcaggctgtttgacaaatccattagcgagacattcttggtcacacagttcgtgttgggtctcaaaatggaattaagggcttgtgttgaagtacaatttcccaagtcggtctctatggcagcacaacttgcactgaaacatgaggcatttcagtctagacagggaacagggaacaagaggtttggcctggtgaaacctgcatttgtttctcatgtgaacaacagggaatcatctgatttgcatggagaggtttggaaggccaaacagttgaaggagtataggagagttaatggactatgttacaagtgtggtgaaaagtttgtgccaggccacaagtgtaaaactgcagtccaaccacagctgaatgttattgccatagaggaagggggtgatgggggtccaattctggatgatgaagtgttggactatttggaaactggtattcaccaagatggggatgaggtgactctatctctcaatgctatgagaggaacagataattctaagtgcattaagctcagagcactaatcaacaaccaagtgatactgcagttgctggattcggggagttccaatacatttgtcagtaatatgactttagccagactacattgtgagctacaacaaattgaaccagtggatgttaaggtggctaatggacaagttttgcgttgcacccagaaggcaatacaacttgagtggtggagttgtggcagaactttccatgctgatgcttttgttattccagtagctgcttatgatatggtgttgggaatggactggctagagcagtacagccctatgttgtgtgcatgggaccagaagtgggtggaattctattatgaaggaagtataattaggttgcaaggagagaaagacaaaagaaacaaggagatattggaagtttctggagaccagattcaaggttggactaaaagaaatgatatatgggccatggccttattacaaaaggtggaggtggaagagaaaaaaaatgctgagacagttcctcctgtggttgaagatctattggaacaattctcaggggtgtttaaagtaccaaactctcttccaccctacagagattatgatcatgctatttctctacttccagggtcagctccagtgaattgcagaccttatagatattctccattgcaaaaggatgagatcgaaaggcaagttaaagagatgttgcaaactggcctgattactagaagtgtgagtccgtttgcttcccctgtacttctggtaaagaaaaaggatggtagctggagattttgtgtggactataggaaactgaatgacattacagttaaaaacaaatttccaatgccaattattgatgagtttcttgatgagttggttggagctacctgtttttctaaactagacatggcctctggatttcatcagattagaatggctgcaggtgatgaggagaagacagcattcaaaactcatcatgggcattttcaatttcgagtcatgccttttgggctcactaatgctccagctacgttccaatgtttgatgaatgccatttttcagcattgcatgagaaagtttgtcctcattttcatggatgatattttggtgtatagttctagcttggagcaacatgttaatcatttacaggaagtttttagtgtgttgcagaagcatcagttgtatgccaagaggagtaaatgctcttttgcagtgaagcacattgaatacctggggcatgtaatttctgagaatggtgtttccactgatccctccaaaacagcagtgatgcagaaatggccaatccctacatctcacacagatcttaggggttttttgggactcacaggctattacaggaaatttgtgcaacattatgggatattggcaaaaccacttacaatggttctgcagcaaaaacagtttgtttggccacctgctgctcaagaggcttttgaggcattgaaggctgctatggctactacaccggtattagctcttcccaattttgcagaaacatttgtggtggaaactgatgcctgtgataagggagttggagctgtgctgtctcagaaaggacaccctatagcttattacagcaaggcattgggagtccagaatagtaaactttctatatatgagaaggagtttttagctatattgatggcagtggacaagtggaggtgctacttacaaagggggctcttcattattaagactgaccacaagagcttaactcatttgcaagatcaaactctagcaactgagctgcaaaagaaggcaatggctaagctagctggactgcaattcaagattcaatacaaaaagggagctgaaaataaggttgctgatgctttatccagggtggctccaaacatggaattaactgccatatctgtaggcactccagtctggattcaagagatagtgaagtcctatgagttggatgttcagtctcagaatctgttgagagagctggcagtgcaaagtccaaattctcagggtttcagacttaaggatgggctaatctataagaatcatcaattgatggtgggacagaatgtgggcttacagactaagttgattgctgctttccactcatcagctgtgggaggtcattctgggatacaagcaacttatcagagaattaagaggttgttttactggcaaggcataaaaaacgacgtggaaacatttgtcaaacaatgccaagtctgccaaagagctaaacatgagcactgtaagtacccaggattattacagcctcttcctattcctcaaaactgctggcaggacatttctatggatttcatagaggggttgcccaaatctagtggttattctgtcattatggtggtggtggacagacttaccaagtatgctcatttcatccctatcaagcatccctacacagcccacagcatagctcacacattcttttcaaatgtggtcaagttacatgggttgccaaagtccatagtttccgatcgagacaaaatttttacaagtttgttttggcaagaattgttcaagttgactggcacccaacttcatctaagctctgcctaccacccccaaactgatggacaaacggaacgcgttaatcagtgtttggaaatgtttctccgctgtgcagttcatgacaccccttctcagtgggcaaagtggttggattcagctgaattgtggtataacagtagttaccacacttctctgaaatgctccccatttaaagcattatacggtgttgatcctaatgtgggcatgatgccattcgagatgggggaaagggagaatgatgcttctattacttttcagaatagacatcattacttggagatgatcaaggcacatttggcggcagcacaaaataagatgaaatattatgctgaccagaacagatcattccggcagtaccaagaaggagacatggtctatgtcaagctgcaaccatttgctcagtcctctgttgctcatagaccttgtgccaagctgtcctttaaatactttggaccatttcagattttatctcgcattggttccgctgcttacaaactcaatatgcctgaatcagcagctgttcatcctgttttccatgtatcacagctgaagactcatgttcccaacaataccccagtgtactcccaattgccatctgctgcttttgctgaaggagtgtcacctgaacctgaagtcattctggatcgtcggttggtgcaaaagggcgcagccgctgtggttcaagtacttatcaaatgggtcggtcttccagcagagatgtcatcttgggaagactatacagtgctgaaagatcgatttcctgatgccatcatctggagtccagatgctgctcgagggggggaaaatgtcatgacccagggtgcgtga

SEQ ID NO: 92286 - DNA, 277 bp, Zea mays
  Clone ID: MRT4577_18415C.1
ccactcactaccgcaacagattgcggggcctccttggcgacaagcgcacggacccatccaccacgtcggtgctcctgtacaacgcgccccgcgggagcgcccccgagaaggggcggctgcacactctgcagtacgaagggagcagcccaaagcatacttcgcgaggtgaccatcgagcccgtgccgaccggtggaggctgctgcacataagacagcaacatgagcgtcggcgtctgaagtggtgggcggcggtgcgaccatcggaacccgcgcggcg

SEQ ID NO: 92287 - DNA, 964 bp, Zea mays
  Clone ID: MRT4577_184160C.1
cattggctgcctcgaggtgggccggtccggattctcgtcgtttccttgtgcggcacggatgcttttgctctgcaccagcgtcggcgcagatcgcaaagcaccagggcgatctcggcgcccagcacgggcggttcaggtcaagcctcgcgtcagccgtcaggtctcctccgggcagcggcgcgtgcgtccccccatcccccccattcgacgagagagagtttgccccccacccattcgacgagatctcggaggcagcctcgaggtgaccctgttctgattctcgtggtttcaggggaggatctaggtccagggagattaatctcgaggttggacctcacatttttatggcctttgactgcaacaaggaaagaggagtttcttcgcctgacagttgctcccgcatttgcaccgagggcactctcgtccaggcaaatcccttatctcactactggaagcctaaacgtttggagaacttcaacaagttggagaaccagaagtccagttatgaatctgctccgagtggctctgatccaaaacaggatgctgaagcgagtgatgaggcaactgcctcactgtgtggcttcaggtgcttcactgatctgccagcttcgttggtctgcgaggtccttgcacgtctcgatgcgaaggaccttggaattgtatcctgtgtctccaccctcctgcacgccttagccacagatcatcagggatggaagaagttatactgcgaaaggtgggggcttccagacctccccaccaccctgaatgggcccttgctgccgggtgtccccctagatgggaagttttggaaaacatttttcgtggagcgggagtttaggagcaaatccttcatgggaagattcaatctggatattctccgtggccacaatgaggatgtgcgtgctgtgtcccttttggtatcagcaaatctgatattcacaggcggccgccgacaagtgagctc

SEQ ID NO: 92288 - DNA, 348 bp, Zea mays
  Clone ID: MRT4577_184161C.1
aagcagtggtaacaacgcagagtacttttttttttttttttttttttttttattgagaatcatttgtattttgttttatccgaggtttggtttttgcaaacctactccctgttgaggtggtcacaaagaccggttttttttcaaccctaaccgtaaacaaacggccactgagacgaggggagcgaatcttcttattcaaaggggacacagagtacccgcaaggaccaccacacaattggtcgatattgcctcgataacaagtgacgggagcacaagagagaacgagaaaaagaagcattccagacgcaagagctgaaatgaacacaagagagtctccgagtacccacc

SEQ ID NO: 92289 - DNA, 828 bp, Zea mays
  Clone ID: MRT4577_184162C.1
ccgggacagcgacgcaacggaaacaatccaacgagcacccatagaaactggagcaggggcaaaccagctgatctaaaccatgaacacaggcagagggacgacaccctggatactacacgtatcacaagcagcatgtactcggatcaccacatcactcggaaccagtaagaacagaaccaataagaagacgggactgacggcggcgactgacctgaggcggcaggatgcagccgacgtccctccgtctctctgtccccccaggtccagggcgcaggatcacaacagtggcgtagtacaaataggcggaggaaaaagatgtgatggtggccgatggcgctaacagcttttatgagactgcccctggggctccgggcttgcaaggaagagatcggatgaggagggaggaaggcggcggatgcggcgtgcgcgtcgacgtcagcggagggaggccggggtgcagtgcagtgcggggggataaaaaggcggagaggttgcggaacaaacaagagatggagcggcggtgcaggcagatagcagaggccaacgaccggagtgggaagcggacgtttcgcttgttgggtgggtgcagttcgtgtcctttctcacctgtaggtagcagtagacctagtgttttactattattttcatttattaaaaaaagtttggcttgctcttatccattagcagaagtttcggggtgttgttttatcgctccgtggtagtaacatgtaagatcttgttatggttagcgctggaaacctttttcttgagtgataccagcagatagcttgcgcccgcgtacaagaccacttggccttgttccgttcc

SEQ ID NO: 92290 - DNA, 1005 bp, Zea mays
  Clone ID: MRT4577_184163C.1
gtgcaaaaaaaacccaaaaagggctaaaatccaaaaaagttgggtgcagcgatgggctactcgtcatcagattctctcgagcatcactcaaaccgctactgtactggcctcctgcaccagcatggacaccaatgctgtgattcaatgggcctggcatcaacaccgaagttgtcaagtatcagtggggccaagacagaaacctcatccatggacgcatcgatgaggacaagctcgtcacctgaagaggtcgacaggtctggtgagctcacggtgtccatcagcaatgcaagcgaccaggagagggagtgggtcgaggaagacgagcctggtgtatatatcacaatccgggctttacctggcgggaccagagagcttcgccgtgttcggttcagccgggagaagttcagcgagaggcatgccagactatggtgggaagagaaccgagcgaggatacacgaacaatacctctgagaagaaacgcccgagaccatcagcatcagaagcacagaaagctttccttcggttgagctgatggtacatctggcactaacacttctacatgcatttccagcttcattcaatgttttgatgaccgaagaggcgaaggggtcccgtttccggcattttacattctttcagtccttttgccgttttctcgtcagttttgaactggaaatgcgtgagcgactcatttagctcaaaaaggtctctcgttttgggggtggggtaatgtacgtctttcactgctgagcctgtagtttccactttccggcaaccaaaaggtctctcgtttttcatcaataatactacatatctacctgttgtttcccataggacaaaatagcatgtttgtgtcgttgggcactattttgctgttgtcactgtcttattgtactactcttccagacagcacaattatcaacacacaagttggtactgagtgcgccccaactcaaaaccactttgtgacgggttgattgtatcattaacgatagttggacgcac

SEQ ID NO: 92291 - DNA, 377 bp, Zea mays
  Clone ID: MRT4577_184164C.1
gtaagctcggaattcggctcgaggctgaggacccccgtgcttttgtggcaacagccggagcgggctaccagcgttggagcctgcataatgatgccttcggtgcaaacaagtatgactaggactaccctgcactgataatccctgaccacttgcaagctacaaatacataatgtgtcaagtggcgcaccatcctttacggatctggcgcatttagtgggctactcgcacagcatacacactgttagcagtgaggcctaccctgatatagaggaatgtgcagcaatacatcaaatcgagtccaggaatacagattactatgaaagcggtgccgtctcttcaccaggagactgaaaatgttaccgccacccttggagcta

SEQ ID NO: 92292 - DNA, 1088 bp, Zea mays
  Clone ID: MRT4577_184165C.1
ggtgcgcaccggcaccgacttccccgccggcgatgacgacgacgacgagatgacgccagaagccactggcggatgtggtggcaaggacgacgacgccaaggagtgggtggcgcaggtggagcccggtgtgctcatcactttcgtctcactggcggaaggtggcaacgacctaaaacgcattcgattcagccgtgagatgttcaacaaatgggaagcacaaagatggtgggctgaaaactatgacaaagttatggaactttacaatgtgcagaagtttaatcaaactgtccctctcccagctaccccaaaatctgaagatgagagctccaaggaggacagcccggtgacaccaccactggacaaggaaaggctaccccgcactttccacagacaaggtggtggagcgatgggctcctcttcatcagattctctcgagcatcactcaaaccactactgtactggccgccaccaccaccaccaccaccatggacaccaatgctgtgattcaatgggcctggcatcaacgccaaagctgtcaagtatcagtggagccaaaacagaaacctcatcgatggacgcgtcaatgaggacaagctcgtcaccctgaggagatcgacaggtctggtgagctctcggtgtccgtcagcaatgcgagcgaccaggagagggagtgggtcgaagaagacgagccaggcgtatatatcacaatccgggctttacctggtgggatcagagagcttcgccgcgttcggttcagccgggagaagttcagcgagatgcatgccaggctgtggtgggaagagaaccgagcgaggatacacgaacaatacctctgagaagagacgcccgacaccatcagcagcacgagcacatgaatagagctggcactaacacatccacatgcatttccagcttcatacgatgttttgctaacctaagaggtccggtttccggtattttacatttcgttcagtctcacgtgtggtggtggtggggtgggaggatagtgtacgtatttcacagtttcactactgaatctgtaggtctcgtttttcatcaataatgtatatctacctgttgtttcccat

SEQ ID NO: 92293 - DNA, 634 bp, Zea mays
  Clone ID: MRT4577_184166C.1
agcgggatctcttgatcaggcagattgtggagcagacagagggcaatgacaatttgctggcaatgatgaaggaccagtatgcgaattacgtggtccagaagatactcgaaacatgcaatgagaaccagcgggaactcctggtcagccgtgtcaagggccacatgcaagcattgaggaagtacacatacggcaagcacattgtaagccgagttgagcagctctgcggcgacggaaccgccgagccggattcttgaaatgaacccgcctaattcttcccaggccaggggtgtgagggtgtcttgttcttttgctcagtccatcagtggagaaagcagaacagatcaagtccacctctggtgcttccaaacagactaacaaaactgtcatcgaagattgtataggtgtgactcgcttcaggatagtcttgaggttctagaacaggaacttagtggtgtgcatcagtgtatctatgttagggtgtgcctatttacagaataacagtggttggctagctgtgtgcagaagggagtttagcgttatggtttgtatgtgatacatattatgcctggtaatgtatttgctttcttgcatcgccagttgtggggtaaatgcaatgttcccgcattgtcctgat

SEQ ID NO: 92294 - DNA, 635 bp, Zea mays
  unsure (1)..(635): unsure at all n locations
  Clone ID: MRT4577_184167C.1
gagaacacgcgggaactcctggtcagccgtgtcaagggccacatgcaagcattgaggaagtcacatacggcaagcacattgtaagccgagttgagcagctctgcggcgacggtaagttccattgccggctagcacttacaccaagattttctttgaaactgttgggggcagtgtcacgagctcatgaccaacgccttcggatttgccacaggaaccaccgagccggattcttgaaatgaacccgcttaattcttcccaggccaggggtgtcttgttcttttgctcagtccatcagtggagaaagcagaacagatcaagtccacctctggtgcttccaaacagactaacaaaactgtcatcgaagattgtataggtgtgactcgcttcaggatagtcttgaggttctagaacaggaacttagtggtgtgcatcagtgtatctatgttagggtgtgcctatttacagaataacagtggttggctagctgtgtgcagaagggagtttagcgttatggtttgtatgtgatacatattatgcctggtaatgtatttgctttcttgcaaaaaaaaaaaaaaaaaaggcccctagttcccgcaccgtcctgaaaaaaaaaaaaaaaaaaaaaaaaaagnaaa

SEQ ID NO: 92295 - DNA, 156 bp, Zea mays
  Clone ID: MRT4577_184168C.1
atggagctttcgcactctagaaacctcattgaagaaagtatcatatcccaagagctaatttgtgcgggatccatttcctacaagctcaaggagctcaaggccttcaatggcatgtttggtcacgtcgctactcaccacatctacaacttcaattag

SEQ ID NO: 92296 - DNA, 309 bp, Zea mays
  Clone ID: MRT4577_184169C.1
gaagcccatactatgtccgatccagatcccccaattgatctactatgggtggcacaccatttcccctacttatggtgatcaatgtttcttaatttcatgataaccccaaaacctatgcttaatgcttaaaatgctatataaaattgagcttattcccacataccttgcatcaatgatacgcctaaccatgggaaaacccaagtcttccaccctatgatcttcaacacgcaaatggctcaagccacatacccttatcacccttgtttcaacaatgcccaaccctatctttggcgcattcattgttacaaa

SEQ ID NO: 92297 - DNA, 531 bp, Zea mays
  Clone ID: MRT4577_18416C.1
cattgggtacctcgaggccggccgggacactgataaccgaggagacaggcgtctgtcgtactcgtgctagtctccgcgcactcaaagctgttccccaacttccgcccgcttctcccatgttctcacctaccgccgtcggctccccccgaatcaacaacatcatgaatggagtgcatcgtccatgcacatctctgcagaagtggtatccaagcgcggaaactgatgtatgagatctgtactgcctgccaacatgggattcaggctgatgcccaaatgaccgcggtacaagagcattgacgggagcgttgcatagatagctttcaacagcttcttcagctgcaactgtgactgtgagacacgtatccccatggtagtatcttctgaccttagagcccacatgcctcgatagaagtgaagagtggttcgctaccgccagatcttccatactgatcaagtacatcgatgacaaggacgatcgcaggcatagcaacgttctcgtcgtgatcactacaccactgcactaggagattg

SEQ ID NO: 92298 - DNA, 415 bp, Zea mays
  Clone ID: MRT4577_184170C.1
ggagattgggcggctgcagcagctctaatgctgaccttaacagcagcaagtttgaggacggctacagttagccaatatgttgtctgtctatgtcctcgcgaagtactagagcagtagctacataccgtggtttgtccatatcctgttgttagatgatcaagggtgattagatacatgttctggaaccaatgttcagatgacaaattgcaaactaaacacccttttgctctctatctttattttttttttgcaattgcaatgcgtgtaaagtacattatcaatgtcagccccaggcatatcaataaaaaaaaaaatgaacacacaaaaaaaagaaatataaaaaaacatttagaacaaaagggaaagagacctattgcgatctgcaccaaaaacaaaaagcattaacattgaagct

SEQ ID NO: 92299 - DNA, 827 bp, Zea mays
  Clone ID: MRT4577_184171C.1
gctctcagagaacttacagagatggagatgcaagtgaaagagatgctgggacttgttgaggaggaaggtgaatgctctgcagaaaaggctgaggtgtattgccaagaacgacctgtgcttgtcgcccacatcaaaaaattctattgcatgtatcgcgcccttgctgagcggtacgacaatgtaactggagaactgcgcaaaaatatcccatcatcactgcagccacatggctcttttggtgcccctgaatcagattctgagacacagtctcctccatctacagagcaaaagccaaaaactcgatcagattgctttgatgtgtccattggctctggtgtgagctctgacgtatccaagaaggggagtgatgggtcttcatcgtcttcagagtctgagtcagagcttgatgaaagcaaagaggaaaatggcaacagcatgttttatgccttgagccaaagaattattgagcttgaagttgagcttcatgaagcaaggggaaaacttgatgctttggaggaaaagaatactatctcagaagtgtctgaacatgatgaaaaactgcgggaggatcttgaagaagtcaacagtgagaaggaagcattggaagctgcgctgttggcgaacaaaaacgagactgatgtgctgaaggaagcaatggcctcagcagctaagcagtttgaaattgaattggcgcatcgtgatcttgaacttgataagtgcaagcaggagcttggagaactttcagcgaagtatctgcatgataaatctgctcttgaggctgagattggaatgctccaaggagttatcacaaattttgaaggtgagct

SEQ ID NO: 92300 - DNA, 400 bp, Zea mays
  Clone ID: MRT4577_184172C.1
tcggactatgctaccgactacgctgacgctcttctcgaccctggcgagcctggctgtgccattgaaactactgacgacgctatcaccgaacaccatctcaacgatgaaaatcgatgtggaccagcatcaccaccaacactaactgagggtggtcacctgcagcacagtaatcagaactatcataccaatgccttcatattgcatgtggtgtgtttatcaaaaaaatatttgacttacttgtggagtggctatcagaaaaatagcaaactaatcttaggtataccagctgtgtatcaaacatgcgtagaacaagatatgtatgctatatataatgagggaaggtttatggtatcaatataccatgctgtgagatcacgcgacacaagctcaccaatgggaa

SEQ ID NO: 92301 - DNA, 230 bp, Zea mays
  Clone ID: MRT4577_184173C.1
cagaccattagctttatctactccagagcgcagaagaacccgatcgacaccatgagggtgttgctcgttgccctcgctctcctggctctcgctgcgagcgtcatctccatgcatacaaggcgctgcagccgctgacagccactgacgacggttcatctaccgacgccacaataccactaccctacacaacagctacggcctcaggctcagcacaagtcacagcgatatcc

SEQ ID NO: 92302 - DNA, 278 bp, Zea mays
  Clone ID: MRT4577_184174C.1
tgtcacgtatcatttaaaactaatatataacttttaaattgaatatttatttgtaatcatttttaacgattatttacaagttttttctaatatggcatcttggtttatagaagttcttccaacagctccgatcgaaatttttgctcttgctcgagcttttcgggaagattcttttgcagaaaaagttgaccttggcattggagcctatcgtactgatgaaggtcaaccatgggtacttccagttgttcgtgaagccgaaatcagcattgccaatgata

SEQ ID NO: 92303 - DNA, 519 bp, Zea mays
  Clone ID: MRT4577_184175C.1
actccaactccatgatccatctcatctacaccccctccgctctccttatcccttcattcgcccgacccccgccgccgtgacccctgccagcccgcggtcttcccctcgttctttgcttctgctcgccgacctcgtgtcttctgctgacgtgaacaaagacatgacgctgccagtacctcacgataggaaccgcctgctccagtttcctccggacacccacaccgagctccacgagatcctcggcaaggtcgacgaggagaatgtgagcgcatataccattgctgccgcttctgaaaggcgaaatgagaaagacttccactgataactccttcgacatggagactatccccgctgtccacactatccggactgacgctttgatcacctgtgatgctgtcgacgcacaatgccatcctgcatcttgaacattatcgacactcctgtgctgtattgaatgtgaatacattaatgagcaggttgttgacatcattaagagatttcttctgcgcaagactattg

SEQ ID NO: 92304 - DNA, 1523 bp, Zea mays
  unsure (1)..(1523): unsure at all n locations
  Clone ID: MRT4577_184176C.1
aatcaacaacgaaaaaggtggcgagagggagagggagaggaaggtgccggccctagcaatggcggggtggtacgaggaggcggcgggtctgctgctgcgccggtcggcgttggcggagatggcggtagatgtgctgctgtgcgccgtgccgatctgggcggcggtcatgatcggcctcttcatagggtgggcatggcggccgcgctggaccgggctgatcttcctcggtttccgcagccgtctccggctcctctacgtgcctcccgggctcggcgcgcgccgcctctagttctagaccgcgctctccgcctgctccgtcgcgaccaagctcatctcctccgcattccgccgctgcagaggcaagcaccaggacagggcctcccccgacgatgatgccgctgcgaccagagacggcggatgtcgcgccgacggcaggagggacctataatgtactgcagccgcactatttttgaggatgctactcctgaactggttagagatttcttctgggatggtgattttcgtctaaagtgggatcccatgcttgcatattgcaaatctttggatgagttccctcagaatggagcaacaattgtccactggataaaaaagttcccgttcttttgcagtgaccgtgaatacatctttggaggacgcatatgggaatctgggaagacttactattgtgttactaagggtgttccatatccatcattgcccaagaaagaaaaaccgaggcgtgtggagctgtacttctcaagttggcgtattagagctgttcaatcgcctaaacatgtgggtcagcaatctgcgtgtgaagtaactttggttcactatgaggacatgggtataccaaaagatgtagcccgggttgctgttcgtcatggcatgtggggtgctgttaagaaacttcagtctggattcagagcataccagcaaatgagacacacagaaactaccctgtcacacagcgtcatcatggctcgaatgaccaccaagatatccatcacagcttcaaatgatcccttggaccatgacctctcggttgccgataaaatcagtgacgagaatgacagctccaatgcagttcaacatggttttgattggaagtggttggtggttgggggtgcagtggctgcggtttgtgtgctcaacaccggtctggtaggcaaggccgtcttgcttggagcagcgagaaggcaagcaaagaagtgatatgaggagcagccttccagccagacattcatcagattgtagctacgatcgtacaggcaaaaaaatgttgagaaaataggtggggttcaacagagataactgctgtttgaggcgtatgcaatgggtctatcggatctagtttcacagtatagtctattttatttagagataaaaatcgcttgtttaagaataagtaaagctctttatttaagaagaggtgtttgagaattaagacggaatgaccgtcgttcctcgccccctcaaccttagccgctggctttacttcnnnatatatataaaaaatttat

SEQ ID NO: 92305 - DNA, 218 bp, Zea mays
  Clone ID: MRT4577_184177C.1
tttctttataaagacacctcatttcttatgacacggaagaatcttattatatggactactaattgaccttaaatgcctcttttaactacctatcttttcaaaacagacctccacaacttacctgaagtacatgctttctacaacttccaaatactattcaccactttatctcatccacaccatctaatctattacttatccttaaaaaacattcattc

SEQ ID NO: 92306 - DNA, 2088 bp, Zea mays
  unsure (1)..(2088): unsure at all n locations
  Clone ID: MRT4577_184178C.1
tacacattggtaccctcgaggccggccgggcccggctccccacatcttgtctgccacagttccacctctccatttcgccgaggaagaaaaaggaaaaaaaaacacagaaggggttggagagaaacggatcaggggcggaaggttccagccctagcgcagcaatggcgggttggtgcgaggaggcggtggcgttgctgcagcgccccgcggcggcggagatggccgtcgacgtgctgctctgcgcggtgccgatctgggccgctgtcatgatcggcctcgtcgtcggctggtcctggcgcccgcgctggacggggctgctcttcctcggcctccgcacccgcctccgcatcatctggctgccgcccggcctcggggcccggcggctctggttcgcctgcactgcgctctccgcctgctccgtcgcgcccaggctcctctcctccgcattccgccgctgcagaggtaagcaacaggacaaggcctcccctgaggatactgctgctgtggctcgggacggcggaggttgcgccgatggcaggacaaattttgagggtgaacatgatactgtcactgagaaggacctagaacttctccttcaacttttagataataaggaaagcggggatacagcttggcagaatttgatggagcgtacaacctccaacatgacctacaaggcctggcggcgtgagcctgaggagggacctataatgtactgcagccgcactatttttgaggatgctacacctgaactggttagagatttcttctgggatggtgattttcgtctaaagtgggatcccatgcttgcatactccaaatctttggatgagttccctcagaatggagcaacaattgtccactggataaaaaagttcccattcttttgcagtgaccgtgaatacatctttggaggacgcatatgggaatctgggaagacttactattgtgttacaaagggtgttccatatccatcattgcccaagaaagaaaaaccaaggcgtgtggagttgtacttctcaagttggcgtattagagctgttcaatcgcctaaacatgtgggtcagcaatctgcgtgcgaagtaactttggttcactatgaggacatgggcataccaaaagatgtagccagggttgctgttcgccacggcatgtggggtgctgtgaagaaacttcagtctgggttcagagcgtaccagcaaatgagagacacagaaaataccctgtcacacagcgccattatggctcgaatgaccaccagggtatccatcacggcttcgaatggtggcttagaccatgacctctccatcgccgataaaatcagtggcgagaatgacagctcccatgcagttcagcatggttttgactggaagtgggtggtgtttggtggtgcggtggctgcggtttgtgtgctcaacaccggactggtaggcaaggtcctgttgcttggagcagcgagacggcaggcaaagaagtgatgtgaggagcaaccttccagcctctgcagaaaggcattcgtcaggctgtagctacaaccgtacaggcaaaaagtattgaggaaataggtggggttcgacagatataattgcaatgtgtaattttggattgtgcacttgtgcagtagatgtagcatgcttgctaccataacagattccgctgtatcaggaatcgctggctaatactccgtatatctgaagatctaagaggtcactgcatgtttgcagctttctatgttcgatatacgtataacggcactgcatgttataagagaaatccattctctgacactgaacagccttttaacatttcgaggcgtatgcaatgggtctatcggatctagtttcacagtatagtctattttatttagagataaaaatcgcttgtttaagaataagtaaagctctttatttaagaaaaaaaaaaaaaaaaaaaaaaaaaaaaaaaagggcgggcccgtcgcgatcttagaactangcactataaaccaatggtgaaaggtttgttgctgtgcttttggtagcagcngaatggtgtcaagggccaccattcttnntttcacccaaaagggaagaatggccctaccgctgt

SEQ ID NO: 92307 - DNA, 1004 bp, Zea mays
  Clone ID: MRT4577_184179C.1
gaaaaccaagccgccgcacccggagttcatccacaccagctctcaacctcgggggttttgctaagggagcttcgttgggacgcacagaaggagattgtgccctcgctggggaagtctggagattcctcgttgacgttgagggaagccgcggagttactgcacaacgtgtctagcatcatccatgtctcaatcttcggaactcaattaagtcaagtccaaagggagcaaaaggagttaagctgaaacagccagacatgcaccagctacaggtgcaccgtacactatccggtgtgcactagacactggtgcccaggctggcgcatcgacgaactcgctactctcgggaatcgctggggatgctgcggctaaaatttactggactgtccggtgtgcaccggactgtacggtgagctaacaacgtccgcgccaacggtcggcagcatgatcagcgcgcaatcaacgggcgacgcgtggccagagccaatagtcaccaggccacaccgaactgtccggtgtgcaccggacactgttcggtgtgccaaggggaccatggctgcaacggtcggcttcgccaaacaaggaaagaaatcgtgcactgttcatgttcggtggtgcaccagactgtccgatgtacccccgaatagaaggcaagaattgcctaacaaatggagctccaacggctcctagctaccttggggctataaaaagaacccctaggtgcatggagcagtaccccaagcctccattgaacattttaagacgcctagactccgcaaacacgcatttgattcattgtgtttgagatttgagcccttgttttagatatgaactccctgcgatgtgtttttattcttgacttgtgggggtggtgttgctgcgactgtagcgcttgggtgtgttcccatccccccccttactcttgtggttttattgtgatcaatattgtaagggtgagaggctcccacttgcggagattcctcccaaagggaaacatctgctataag

SEQ ID NO: 92308 - DNA, 169 bp, Zea mays
  Clone ID: MRT4577_18417C.1
ggtacctcgagccggccgggtgcgttgctttttcgtcggatctgagaccagacgagttaccatctgctcccatctcgcggtacgatacaagtgatcatttcataccagctgatggtcgacggcatctcgttgtactcgtattcgccggagcactccgcggcggcggaga

SEQ ID NO: 92309 - DNA, 611 bp, Zea mays
  unsure (1)..(611): unsure at all n locations
  Clone ID: MRT4577_184180C.1
taagatccaagcaattggttgactgggccgacaccatcatgtgtcaaagagcttcgcagcttcctcggcctagcgggttactatcggaagttcatacgtcactttggggtaatctcccaacctctaacatccttgttgaagaaagggattatttttgtatggacaccagaccacgacgtggctttccaaaccttgaagcaagctcttgtcacggcgccagttttagctctacctgatttctctacaccctttatgatagagactgatgccagtgacactggaattggggctgtactcatgcaacgaggacatccgttggcatttctcagtaaaacattgggacccaagtccagaggattgtccactcacgagaaagaatacatggcgatcctgactgcagtccaacagtggcgcccatatctgcaacaaagtgaatttgttatcttaactgaccataagagcttgtcccaactcaatgaacagcgcctccacacatcctggcaacacanagtgtttactaagctcttaggcctacaatacaccattcacttaccgcagggtactgaaaacagggtggccgatgctctctctcggcgggctactactgagct

SEQ ID NO: 92310 - DNA, 157 bp, Zea mays
  unsure (1)..(157): unsure at all n locations
  Clone ID: MRT4577_184181C.1
accgangcgtccgatcaaatctacaggggagtagctctttctcttgtcttcgctggctaacaacccgggaacgtgtacaccttgcaggttttgggcgttctcccaacccacagctgaaaaaccctgacagagataagaaagttcctgcaaagatatt

SEQ ID NO: 92311 - DNA, 168 bp, Zea mays
  Clone ID: MRT4577_184182C.1
gctcgctactggtcctacgcaccccactcccccgctggagcggcggccgtggcggcgaggtcctacccaacatcgtcgagcggccagctgctccgacagatgctaatgcaccaatgctccgtcgcgcaccgaaagagagcgactacacctagttctactgagatcctc

SEQ ID NO: 92312 - DNA, 135 bp, Zea mays
  Clone ID: MRT4577_184183C.1
cgaggacatccgggtaaactgcgtggtttcaggaattatcaacactgacttcagcaacgtgtttcatgggaatgagtctctctggaagaccttcaaggcacatcatcagctgccgaggattggggagtcagagga

SEQ ID NO: 92313 - DNA, 343 bp, Zea mays
  Clone ID: MRT4577_184184C.1
gccgacggcaccaagccactgcccgacaccacgacggggggcgaatcctagaggggcggccaccaacccgcgagccagaccaccacacccgcgcccagggcacagcaccgacgggacggcaccgccaaggacaccgcgccgacggccgacggaaccggaacgccgacgacacacacagacacccacgacaacaacaaggagaagggcacccgagccggccacgacgaggacaaagagcgcagcgcaaggaacccggacccgcaaaggacggaggccgccaagggggaaaagcagaacagcaacaaaggacggggcacacagggaccaagaccaagcacagaac

SEQ ID NO: 92314 - DNA, 296 bp, Zea mays
  Clone ID: MRT4577_184185C.1
gacttatacctagcacaattaactattgtgtgggcaaagaacatttaaagggcatagtagaggtaaggagagacacatactcagctagagataaaaatactaagttgcactgattacttaaaatactagtcacaccataaaagtgccctgtagtttcaaaaacacgtaagcaatgaaatgttagccattatgtgttaaactacttaatctcatttctgtgatgtgaatatttttaaccccctttttgtagatgagggaactgacaagtgacttgtccaaggccatatagctgtgag

SEQ ID NO: 92315 - DNA, 707 bp, Zea mays
  Clone ID: MRT4577_184186C.1
tgcatctcgaaagcatcgcgcagcatcaggcgattcgacctcgccgttgctcgggcgccggagacgccgacgccgacgagatgacggtgttccacttcctcaactgcgcggtcctcaccttcggcccccacgtcgtctactactccgccacccccctgtcagaatatgacacgattggcactagtgtaaaagcagctgttgtttatcttggagcagcacttgtaaagttttgagagcaaactggttgtccgagcctccgagggttgtatgccactcagcagcttgtttgtttagcaacattcctcaaagtacctgatgcgaatgatagctttgatccctaccaggaattaatgaaaattctaattgggtttatagatgttgctggcctttattttgctttgacacagttgacccacagaaacatctcccagaaccataagttccaggctgttggtcttggctgggcttttgctgattcagttctgcaccggctggcacctctctggattggggcacgagggcttgaatttacttgggagtacatattccaaggacttgaagcaaatgccaatcttgtgatgaccctctcccttgctgcattaggatccttgatgtggctgaggaagaacaacctaggactttaattccaattatttatgcatgtgctctgcttctggcaacaatgccatctatcaccagttacttgc

SEQ ID NO: 92316 - DNA, 814 bp, Zea mays
  Clone ID: MRT4577_184187C.1
ggccgcttcgagccggccgggccggcattacacacctgcatctcggaatcatcgcgcagcatcaggcgattcgacctcgccgttgcccaggcgccggagacgacgacgccgacgagatgacggtgttccacttcctcaactgcgcggtcctcaccttcggcccccacgtcgtctactactccgccacccccctgtcagagtatgacacgattggcaccagtgtaaaagcagctgttgtttatcttggagcagcacttgtaaagcttgtttgtttagcaacgttcctcaaagtacctgatgcgaatgatagctttgatccctaccaggaattaatgaaaattctaattgggtttatagatgttgctggcctttattttgctttgacacagttgacccacagaaacatctcccagaaccataagttccaggctgttggtcttggctgggcttttgctgattcagttctgcacaggcttgcacctctctggattggggcacgagggcttgaatttacttgggagtacatattccaaggacttgaagcaaatgccaatcttgtgatgaccctctcccttgctgcattaggatccttgatgtggctgaggaagaacaaacctaggactttaattccaataatttatgcatgtgctctgcttctggcaacaatgccatctatcaccagttacttgcggagatcattggagtggcagactcccaaggtggttggcttcgagctcttctcctccttggttatggctttcatcagctggcagctgttctcggcttgtcagaggccgatgtaatcaacgaaaca

SEQ ID NO: 92317 - DNA, 337 bp, Zea mays
  Clone ID: MRT4577_184188C.1
aatattaaggagaataaaaatagtaaagacaaaaaaaattatataatgacattaacaggtatttttgtttaactgtgaaaaggaaaaaaggaaaatttaggaaaagtggggggaaacttgaacgggaaaaaagatagacgatggatgagagaatgataagagtaaaaagtaagaaagagagaacttgtggaaaagcagggggggggaaatgctcaagtatgacctagcttaaaaaattagagttggtagatctacactaagaactcagatagggacgggcagcaaggggtataaagaaacagctaacattgatggagctagaagaaaaaatacggaa

SEQ ID NO: 92318 - DNA, 887 bp, Zea mays
  Clone ID: MRT4577_184189C.1
cattgggtacctcgaggccggccgggacccatccattccacctccgttcaccccgtccatttgatttgcgttcactgcgttgcgtttccttggaggggattgttctctcctctcctttggattggaggtccctccttcttctcctctctctctcagaggaaggcctgaggatccaggaagaggacagcaatgggggaaggtgcaggtgaccgtgtcctgagccgcctccacagcgtcagggagcgcattggcgactcactctctgcccaccccaatgagcttgtcgccgtcttcaccaggctgaaaaaccttggaaagggtatgctgcagccccaccagatcattgccgagtacaacaatgcgatccctgaggctgagcgcgagaagctcaaggatggtgcttttgaggatgtcctgagggcagctcaggaggcgattgtcatccccccatgggttgcacttgccatccgccctaggcctggtgtctgggagtatgtgagggtcaacgtcagtgagctcgctgttgaggagctgagagttcctgagtacctgcagttcaaggaacagcttgtggaagaaggccccaacaacaactttgttcttgagctggactttgagccattcaatgcctccttcccccgtccttctctgtcaaagtccattggcaatggcgtgcagttcctcaacaggcacctgtcatcaaagctcttccatgacaaggagagcatgtaccccctttgctcaacttccttcgcgcccacaactacaaggggatgaccatgatgttgaacgacagaatccgcagtctcagtgctctgcaaggtgcgctgaggaaggctgaggagcacctgtccaccctacaagctgataccccatactctgaattt

SEQ ID NO: 92319 - DNA, 375 bp, Zea mays
  Clone ID: MRT4577_18418C.1
ctaagctttgagttttatttttcataatgcttcttgattcatggaaccagggagggtggaagctttaagttatgaaggagcacaaagtgattctattttgaacacaacaacccgtccagatggcaatatctcaattatttggcagctcagccttcgcattaatacttcataccggtgagtttatgaggggtaggctccactcattggctacttgtccgagacaataacgtgacatgtagcgtttacaagacccagagccaggagctaacggcagaatgcaactatcctatccctccgttaatatgaaggcactgggcttgaccttgctgcgatgccaggatcactgatgcaacgacaaagtcttacgatgatgat

SEQ ID NO: 92320 - DNA, 586 bp, Zea mays
  Clone ID: MRT4577_184190C.1
ggccctaggggccttttttttttttttttttggtttttttttttttttttttttttttttttttttttttttttttttttttttttttttttttttttttttttaaaaaccaaaggcccccccctaaacattacgggaaatctacttgctacggttttgcccgctgaaacaaaaactttgaaacaaaaacaaggcccccccttttttgtttttttggggaggggggccaattcgggggaacccaagggttcctggaagggtgaaacccatggtaagggtaggttaaccaaaaaagggtgccaaaacacaacggtgttcccccctgggccacaaaatccttcagtttaatcatcccccggaggtacccctgagcctgtttaacccccatgaaatcgggcaaaaaatgggaaaccgaaagggttacccccctttgccccaggaacttgaaaaggcctttttaaaaattcacagggagctcggggaactcggggcccccgaagggaaacttttcttccccgggggggggggtggttttccccactatcaacaaatcctcgggggggatcccccccgggaagggtgggca

SEQ ID NO: 92321 - DNA, 161 bp, Zea mays
  Clone ID: MRT4577_184191C.1
gttcaacatatagtggcacggaaagccctcaaggtttaaaatgacaacgaagatgaatcatgttcttagcgcacccttacgcaaaaatatctctgaaaaaatctctcctcaatgaaaaccaaaaataatcctaatcctatttcacaaacagattcaagaag

SEQ ID NO: 92322 - DNA, 197 bp, Zea mays
  Clone ID: MRT4577_184192C.1
ttttctttgtcgacgagggctgcccacaaaaggggggggttgcatgaacgcggacggggagcctacaacatggctttgtcgagcacgtgaatccccccaacagtaaagagaatggtggctatgccccgtcaagggggcgctcttaagccaacagaccatgatggaccgtggggtcatgttacatgtgcctggtttca

SEQ ID NO: 92323 - DNA, 252 bp, Zea mays
  unsure (1)..(252): unsure at all n locations
  Clone ID: MRT4577_184193C.1
gcnggctccctgttgaccatttgttattctgaaccatcgagccatggcgggcaagctgacttgtctccacagtcttcgcgaacgccttggtgccaccttcttcttccatcctaatgaactgatagcactcttttccaggtatgttcaccagggcaagggaatgcttcatcgctcatcagctgcttgtggtgtttgatgccctgtttgattgtgacaagtataagtatgcaccctttgttgacattttttttg

SEQ ID NO: 92324 - DNA, 170 bp, Zea mays
  Clone ID: MRT4577_184194C.1
tcgttatgaaatactaacacgaactatgacgagtttcgcataagatattgacaggaatgaacggggggagctgtgtgtagcacctgcatcaaacattcatgcgggtactttgataaagggactagtggaaagcaagcaaatggatgcggactgagctgccatctacatca

SEQ ID NO: 92325 - DNA, 221 bp, Zea mays
  Clone ID: MRT4577_184195C.1
tgtgtacccatttgtgctgcacacgagtttacggatgggccgagtcgctagctgagtcgtcgtcatcatcaggttgcttgagcactcgagcctctcagagcaaattaaatctaaccgtcgtcgtgtcatccgggtatatttaccttgtacatcgtcttttcatattgcttggtgtgtcagtgttaccgatggaggcataacataaatgatccatgaattcc

SEQ ID NO: 92326 - DNA, 330 bp, Zea mays
  Clone ID: MRT4577_184196C.1
cgcctctgttcaaatttcatggtctagaatatttgacatgttaggttttgaagaagtatcacatttgtgtttttcttcttttaatcagttgaggtactatattaaggctgtaagggtagcctttcttcccgctgttctgccttccaactatctcaaccgtccatccatgcctctgttttcatcgtccatcggatgcaaccctgcagccaccaacgtcggatgacgcccatgccgcaaatgccgcaactccacagccgccggatgacgcccacgccccacgcgagcaccagctatcccgatccatccctcctccccacgcccctctctcac

SEQ ID NO: 92327 - DNA, 407 bp, Zea mays
  unsure (1)..(407): unsure at all n locations
  Clone ID: MRT4577_184197C.1
ccggggatcaagctgcggttgtggctcnagctgcnngtgcggcgggggggtccctggcctggnggagacgagcaccgccgcgcaggccaccgtcgtcctcggcgtggccccggtgaagaaggccgcgcccgagttcgtcgtggccgcggcggtgtccggcgaggccgcccacgcctgcggctgcggtngcngctgcttgtgcgagcggtgcgnctgctgctcacntcgntcgacggccctgggtctgattattatctatctagcttgtggtggtggttggcctctcctctgcgtggccgggctggctgcccttcctnggtnttgtgtggtgtgtgcgtgtgtgggagatacagagttcttcagtttgctatctctctctctgcctgtttggcgtccgtctttgtgct

SEQ ID NO: 92328 - DNA, 392 bp, Zea mays
  Clone ID: MRT4577_184198C.1
cttgcgatcctctagattttccgccctttttttttcttcttttttttttttgtaaaattttattaaaaagggaaagtttaacccaaaaaccccggaacccccccccaatccttaccatcttaccatattttcattttatttacaccttttactatttactttcatatttttttcctttattacattgataaacccttacaatctcacacatcataccaacctttaaccttaaatcttaaaccttacatccctattaacctacctaacttacattccttcctttaccctcattgccccatttcccactttaaaacctgtcaatccctttgaccttattaaataatcaatcctccaacatatttccaatactaaattccccccatgtttccctt

SEQ ID NO: 92329 - DNA, 491 bp, Zea mays
  unsure (1)..(491): unsure at all n locations
  Clone ID: MRT4577_184199C.1
aagcgtacataccaatgcgggacagaaagtgagttaaggaaaagggtctgcggaactcctgttatccacgcagagagaagctactaacatatacacaggtctttgcacgataaaagcgctacatgctatcatcgttgaggtacataacaacaacatgtgtcttacaggcatcaatgaaagctatgacacacaacaacctcgtgtaggacatgggcgagcccaaaccgccgggcacatgcnctatgggaacgcacccaattcagggcacaggaaaaatattggctctttacgggcataactaaggcgttgtaagagttttctccaatgttttcaatatacacagatatcgttccaggcttaatggaacaacttcattctaagggcagggtactgacaagagaaatcatggggggacagtgtacagatccttttcctgattttcttcatttctatataagcctaaactatccttataagagatcatatgaagc

SEQ ID NO: 92330 - DNA, 156 bp, Zea mays
  Clone ID: MRT4577_18419C.1
gttcggttcgggattcgtgaggatctccggagttcggcacctaggtagaccggatcgagatggcggcgtcggatgaagactaccgctgcttaggcgacggactaccctggaccacggacgaccactcactccacaacgccaagaacacccacgcca

SEQ ID NO: 92331 - DNA, 271 bp, Zea mays
  Clone ID: MRT4577_1841C.1
gggaagtgtcagcttgcgctacatcccagtctccttcctgcagctcatcaaatctttcactcttgcaaccacagttcttctgcagtcgctactctggagtcagcatttcgagtggcgcttatgctcttcgctggtccctctcgtgtggcggtatatccctgccttcggtgacagagtctaccttccacatttccggtttctgtgctgccatggttcgtcgcctggctacgtctacatacaccatcttggcagagtccctactccctggata

SEQ ID NO: 92332 - DNA, 282 bp, Zea mays
  Clone ID: MRT4577_184200C.1
cccctctcgagattttttttttttttttttttttttttttttttttttttttttttttttttttttttttttttgccttttcctgggatcaaccaccaaagcggaaacaaagtccccaaaaaaacacttccacccagacccttgacaactttttgaaaaaatgcaaaaggtttggcagggcctacagggcagaaagtacccaaccaacaagctgtccatcgggttaaggcccaaaaccccccaggggcagagctcaggcggatatagaacctgtttgtaatt

SEQ ID NO: 92333 - DNA, 406 bp, Zea mays
  Clone ID: MRT4577_184201C.1
acaaggccatgcacaacacagatggaagccttttatttggttcattatacgctcatgtacaacgaggtgtcacacattcgctactcagttgtcagcggtttcttagtgtccagtatgcatacgtaacccatatgcatggcttgctcatcatgccacaccgactgctaacgtgggtactagcatacctcaaagccttaaaggctggggtcgtggcatcgcccccctggaccagaccagtgactggtggcggatacaccggaggcatggccaagctgtcgtcgttcgtctcaggggggacttcccacacatcagggatcaaaccatcctggctgccgacagctactacactctgaatatgcaacaggacgggtggatagccgaagcacatgcatttgaccctcactgc

SEQ ID NO: 92334 - DNA, 360 bp, Zea mays
  Clone ID: MRT4577_184202C.1
gaacggtgaaccctaattgcatgacgccgacagagagcctccttctcccggttcccgcattagtatctatctgcgatgtgcgccgacttcagctacctccgagcggcgggcaccggcctcgcccctgctggaaaggcttggagtgcgattccgtacagacgctgaaggtttattctttcgttcggagcataacacgccgcagaaacgttatatgtgctttcctgggcgcaggtcgagctccacaaccactgctcattgaagcagtctgctagacggtagtcggacccacgttctagcagaggtagccaggaacttgctgaagactttccgagctttccaaccaaccattatagagataca

SEQ ID NO: 92335 - DNA, 412 bp, Zea mays
  unsure (1)..(412): unsure at all n locations
  Clone ID: MRT4577_184203C.1
ggcaaagagtctgcagtgtctcgagcgcaggaagtggcagattatgtttttttaattanntgaacttggancttcatgcaggggaacgggttgttgataggcatgcgccttagcccttctcgtctcggtggagagcaccgtaagtactcagttggcaaaagagcagtttatgagaagacaatatgatcagatactgtttttccctttaattggcagaggtagtcagtttaatatacatagtgtataccatggattccccaatgcggtgtgactccttgggtcagtaacctggctaatggaatgggctttgatcacagaaaaattaaataaaaataaacataataagaaataataataagaaaaataaaataaagaaatatctaaaaaaagagggcaggcctgttctaagagt

SEQ ID NO: 92336 - DNA, 369 bp, Zea mays
  Clone ID: MRT4577_184204C.1
gtatttcgccgctactttactcatttcggcacccgactaccttgcgccagaaacggcgatcaattacgattccttgattgctatttttgttcctatgctttatgccgtatttcgttgcagtatttgcgggctcaaaagttcaactggtggcaaaagtgctgacctatcttgcaacctacaggtgatacaaaaccacttcgaaagaaggcaagaccgatgaataaacgatcaacagggagcatttccgaggctcccgggcaggccgcaggctcgaaccttcctcaggctattcctccaccgcagactccccagtctcaaggctcagggctgccacaaacgagccctgcatatacgccgcagacacagatg

SEQ ID NO: 92337 - DNA, 149 bp, Zea mays
  Clone ID: MRT4577_184205C.1
ggaacagtaccagagggcggctgtaactgtttgctgactgactgacgcggcagctagacaaagcacattcttaaattaattgtgcaggcaacaaaagctgttatggaacaaccgacactacagccatgctgcactatatgcagcataca

SEQ ID NO: 92338 - DNA, 526 bp, Zea mays
  Clone ID: MRT4577_184206C.1
aaaaaaaaaaaatagaaaaaaaaaaaaaaaaaaaaaaaaaaacctaccaccagtaccacaccactccgcgctagctgaggacggtacagcggcacagagcgacgacgacgacacaggcgccacacatggaatcccagttctccgccgccgtgccccggttccacggcctccggggctaccccgcgcccaggtccccggtgggggggctgccctccctgagggggggcaggaaaaagtcctcctcccagggaatccgctgggaataaattggttccgccaccaacctgattatggggaccaccaccaccctgatggtgttcccgggaaggttcgggttggggccctcggcaaaccccaaggggaagggggggtttaaactggaggggcgcgaatcccgcctgcaaaagggggacccccccgggtttaccctcccccacaccctggcctggggggccgtcggccacatcctcggggtgggaatcggggtcgggttcaaaaacaccggggccccccaccagataattgg

SEQ ID NO: 92339 - DNA, 320 bp, Zea mays
  Clone ID: MRT4577_184207C.1
acccgtatcaccacttctttaaccacctcgtcgttttgctctcccttatctcttccaacgctactttttttatgtggggagggacacaacccaccacttgtaaggaccagccatctagctcttgacccccacaaaaaatgtgtgctgatcacgcataaaccgattgatcatctagagcggatcacgatctcgctcctcgttctgtagacctctttgttggtacacctccacacacattcttccgtattaccatgcatcgctttagagcctgcactcagctcaatctctataaactaaactcataaccctgttcctttact

SEQ ID NO: 92340 - DNA, 274 bp, Zea mays
  Clone ID: MRT4577_184208C.1
gcgcttctgcgacgccaccaccacacgttcacggtggcgagagcttatcgtcttcggcggcgaagatggtgtcgcttaagcttcagaagccgctcgccccgagcgttcttaagtgtgggaaaggcaaagtctggcttgagccccatggaatcaggcagaacttcattggttacttccggccgaccatccggaattgggttaaggttgggttattattcaggaaccctcaaaaggttcattttaggtcccgtccaggaagggcacatgaggccaa

SEQ ID NO: 92341 - DNA, 888 bp, Zea mays
  Clone ID: MRT4577_184209C.1
attgggtacctcgaggccggcctgcacgcccgtccagaaagtgcgtacgtacgtacgtatatatctatgtatgtatatgcgcgcgtgtgatgcacgaataagcgtggctacgtaatctatcgtaaaaaaaaaaaaaaaaaaaaaaaaaaaaattattcgttgcagtagtcgcagctgacggacgactgaaccaccgacagacaacatggccgcctccgcctccaccgtctccggcctcgccggcgcctccctggccagccgcccggcgttctccaccagcttcacgcggggcagccgggtgtcggcgaggaaccccctgatgagcaggaacctggagaggaatggcaggatcacctgcatgacgtttccccgggactggctgcggagggacctgagcgtcatcggcttcgggctcatcggctggatggggccgtccagcgtcccggccatcaacggcaacagcctcacggggctcttcttctccagcatcggccaggagctggcccacttccccacgcccccgcccgtcacctcccagttctggctgtggctagtgacgtggcacctgggcctgttcatcgtgctcaccttcggccagatcggattcaagggcaggaccgaggactacttcgagaagtgaagcggttaagatcctatccatcatccctggtgctgcgctgcgttgcgttgcgtgcgtgctcgccgcaatcgaacctttgctgtatagggttccgatttcgtcgaatgtaatgtatgatgctacttttgcgcttcaatataaaaacaaaaaaaaaaaaaaaaaaaacactaaaaaaaaaaaaaaaaaaaaaaaaaggcccctaaaaaaaaaaaaaaaaaaaaaaataaaaaaaaaaaaaaaaagcggcc

SEQ ID NO: 92342 - DNA, 370 bp, Zea mays
  Clone ID: MRT4577_18420C.1
cactacccttctagtgactagctacaaaccggctagggcacacttagcagcggatgcaaaatagactatatgtgccaccatcctggcatcgtgatcgatcaggacacgatctacttctgcattggagtgcagcagaacgacctggtggagatcatcggcaacgaccaaagcaaccggaccatacaatcctacgtgagctataccggctgcagatgccagattatggatgctgtcaagaaccatgccgaaatgaaccccatcaacacaatatttgatttcaagcggatcattggtagaagatttagcgatgcttatgcacagagtgacattaaacactggcccttcaaggtcatttctggacctgatgaca

SEQ ID NO: 92343 - DNA, 809 bp, Zea mays
  unsure (1)..(809): unsure at all n locations
  Clone ID: MRT4577_184210C.1
tcggaacgactgaacaccgacagacaacatggccgcctccgcctccaccgtctccggcctcgccggcgcctccctggccagccgcccggctttctccaccagcttcacgcggggcagccgggtgtcggcgaggaaccccctgatgagcaggaacctggagaggaatggcaggatcacctgcatgacgtttccccgggactggctgcggagggacctgagcgtcatcggcttcgggctcatcggctggatggggccgtccagcgtcccggccatcaacggcaacagcctcacggggctcttcttctccagcatcggccaggagctggcccacttccccacgcccccgcccgtcacctcccagttctggtgagtacgtgtgtacctctcgatccgggcatgcatgcatctggcacgcgtcctgccgtgccggccttcgctgctggtatttcatcttctgcacgaacgtacgctagctagctagttcggcatgacaagtacgtaaaataaaactcactgacgaacacgaactggtggcctggtacgttgcaggccgtggctagtgacgtggcacctgggcctgttcatcgtgctcaccttcggccagatcggattcaagggcaggaccgaggactacttcgagaagtgaagtggttatgatccgatccatcatctctggtgctgcgttgcgtgcgtgcgtgccgaaatcgaacctttgctgtgtatagggttctgcgatttcgtcgaatgtgtgatgctacttttgaccttccatgtaaaatctatgccgcccggnccccacgcgctctggt

SEQ ID NO: 92344 - DNA, 429 bp, Zea mays
  Clone ID: MRT4577_184211C.1
gggcaatggctcaaggtccttcaggcacatttgtacccggtgatgagggatggggcgtccgagcgtggaccgaggaagcatctggagcatactgccgccacacaggctgcagctccctatcgctgagctgctgggcattagatacactgcctgtaccacgaccaacaccactcctattatggcataagacctacccagtgaccgtggatgtcgctggtggctacttcctctgccctggaatgtgcatgctgaattaggggcttatgaaccataactaactctggagaaacgtacaggcagatgtatacctctgcaacgtaactgcgactaggtgcagcgaacgcctgttagctaaacacaagtctgcatagcgactaaactgctgaaaatcatgagatgaagtgggagattccacctaacaggcgtgag

SEQ ID NO: 92345 - DNA, 974 bp, Zea mays
  Clone ID: MRT4577_184212C.1
gccggccggtccgggacgggcagcacggcccaactgcttatccagacatgtccaagtgtagcgctcccataggcgcctcggcgagcggcgaatctgtttcatccgctgcaagtgatccacaccaggcgcgcccccacaacaatccgcggcgtctctctccgcgcctccgcgccacagaaccagctggggctagcccaccgcgcagcgcagccacaaattaaacggagcccggcaggggcatccattattcgttgcagtagtcacagctgacggacgactgaaccaccgacagacaacatggccgcctccgcctccaccgtctccggcctcgccggcgcctccctggccagccgcccggcgttctccaccagcttcacgcggggcagccgggtgtcggcgaggaaccccctgatgagcaggaacctggagaggaatggcaggatcacctgcatgacgtttccccgggactggctgcggagggacctgagcgtcatcggcttcgggctcatcggctggatggggccgtccagcgtcccggccatcaacggcaacagcctcacggggctcttcttctccagcatcggccaggagctggcccacttccccacgcccccgcccgtcacctcccagttctggctgtggctagtgacgtggcacctgggcctgttcatcgtgctcaccttcggccagattggattcaagggcaggaccgaggactacttcgagaagtgaagcggttaagatcctatgcatcattcctggtgctgcgttgcgtgcgtgcgtgccgcaatcgaacctttgctgtatagggttccgatttcgtcgaatgtaatgtatgatgctacttttgagcttcaatgtaaaatctatgccgcccggccccaacgcgctcttgtttaatttgatgcatctagctactactagtaaccctaaaagaaaaacttgctcatcagataaaaaagtatttttttttc

SEQ ID NO: 92346 - DNA, 1192 bp, Zea mays
  Clone ID: MRT4577_184213C.1
gggacctcgagccggccgggaaaaaaatatccgcggcgtctctctccgcgcctccgcgccacagaaccagctggggctagcccaccgcgcagcgcagccacaaattaaacggagcccggcaggggccgggattattcgttgcagtagtcacagctgacggacgactgaaccaccgacagacaacatggccgcctccgcctccaccgtctccggcctcgccggcgcctccctggccagccgcccggctttctccaccagcttcacgcggggcagccgggtgtcggcgaggaaccccctgatgagcaggaacctggagaggaatggcaggatcacctgcatgacgtttccccgggactggctgcggagggacctgagcgtcatcggcttcgggctcatcggctggatggggccgtccagcgtcccggccatcaacggcaacagcctcacggggctcttcttctccagcatcggccaggagctggcccacttccccacgcccccgcccgtcacctcccagttctggctgtggctagtgacgtggcacctgggcctgttcatcgtgctcaccttcggccagatcggattcaagggcaggaccgaggactacttcgagaagtgaagtggttatgatccgatccatcatctctggtgctgcgttgcgtgcgtgcgtgccgaaatcgaacctttgctgtgtatagggttctgcgatttcgtcgaatgtgtgatgctacttttgaccttccatgtaaaatctatgccgcccggcccgtaaaaaaaaaaaaaaaaaagcggcctgccggccttcgctgctggtattccatcttctgcacgcacgtacgctagctagctagttcggcatgacaagtacctaaaataaaactcactgacgaacacgaactggtggcctggtacgttgcaggctgtggctagtgacgtggcacctgggcctgttcatcgtgctcaccttcggccagatcggattcaagggcaggaccgaggactacttcgagaagtgaagcggttaagatcctatccatcatccctggtgctgcgctgcgttgcgttgcgtgcgtgctccccgcaatcgaacctttgctgtatagggttccgatttcgtcgaatgtaatgtatgatgctacttttgcgcttcaatataaaatctatgccgcccggccccaacgcgctctggttt

SEQ ID NO: 92347 - DNA, 420 bp, Zea mays
  Clone ID: MRT4577_184214C.1
cggacgcgtgggcgtgttatctctgccgtgctgcccagggcgcgcccactgtggacccgctgacacactggctaaaaaactccttgccgctggttgccctcgttgcgctttccgtgctcccggtatgtgactccattgttcccgatcgctccttgctcctcagcccgttcttggacagggcttcggaacacacctttaatgcgggtacagaacaggtaaatgacttaatccacacgctgctactataccttgggtacaacgagttacaacacatacttgtcaaattgacatacctatcctatggaacatgtacgactacatgtcctaaggctacatcctcaccgtgctttcctacaacgactaggccatgtagcgcttgagaacggtccagcttacttagcccggctagtgctagaatat

SEQ ID NO: 92348 - DNA, 981 bp, Zea mays
  Clone ID: MRT4577_184215C.1
ctggggctagcccgccgcgcagcgcagccacaaattaaggggagcccgggctgggcatccattattcgttgcagtagtcgcagctgacggacgactgaaccaccgacagacaacatggccgcctccgcctccaccgtctccggcctcgccggcgcctccctggccagccgcccggcgttctccaccagcttcacgcggggcagccgggtgtcggcgaggaaccccctgatgagcaggaacctggagaggaatggcaggatcacctgcatgacgtgagttgactgagctttttattacgagctttctgtgaaatatacttgtatatatattatactagtcgctgctgatcctccgtacgcgctcgatcgccaggtttccccgggactggctgcggagggacctgagcgtcatcggcttcgggctcatcggctggatggggccgtccagcgtcccggccatcaacggcaacagcctcacggggctcttcttctccagcatcggccaggagctggcccacttccccacgcccccgcccgtcacctcccagttctggctgtggctagtgacgtggcacctgggcctgttcatcgtgctcaccttcggccagatcggattcaagggcaggaccgaggactacttcgagaagtgaagcggttaagatcctatccatcatccctggtgctgcgctgcgttgcgttgcgtgcgtgctcgccgctatcgaacctttgctgtatagggttccgatttcgtcgaatgtaatgtatgatgctacttttgagcttcaatgtaaaatctatgccgtccggcccctgcgtgcgtgctcgccgctatcgaacctttgctgtatagggttccgatttcgtcgaatgtaatgtatgatgctacttttgagcttcaatgtaaaatctatgccgtccggccccaacgcgctcaggtttaatttgatgcatcatgtaaaaaaaaaaaaaaaaaaggccccta

SEQ ID NO: 92349 - DNA, 229 bp, Zea mays
  Clone ID: MRT4577_184216C.1
tcgaaggttttatgccgtctatgttgttatcttttgccaacgttgtaacgtcgtatgatgcgtggatggcctgtttcttgacatgcacactctaaatttgatctgttggtttgcatgaggttgatttgtatctcatactaatcgagcgtgagatgtcatctaaaggcttaatgaaggcaactgttgtatgaatcaaactgttaattttattataatttattaaatattg

SEQ ID NO: 92350 - DNA, 991 bp, Zea mays
  Clone ID: MRT4577_184217C.1
ccacgcgtccggtttcatccgctgcaagtgatccacaccaggcgcgcccccacaacaatccgcggcgtctcatcccgtcctctcgctctcgtccgcagcaccaccgccgcgcgtcccactcccaccgtccctgtccgcgcctcgtccgctccacagaaccagctggggctagcccgccgcgcagcgcagccacaaattaaacggagcccggcctgggcatccattattcgttgcagtagtcgcagctgacggacgactgaaccaccgacagacaacatggccgcctccgcctccaccgtctccggcctcgccggcgcctccctggccagccgcccggcgttctccaccagcttcacgcggggcagccgggtgtcggcgaggaaccccctgatgagcaggaacctggagaggaatggcaggatcacctgcatgacgtttccccgggactggctgcggagggacctgagcgtcatcggcttcgggctcatcggctggatggggccgtccagcgtcccggccatcaacggcaacagcctcacggggctcttcttctccagcatcggccaggagctggcccacttccccacgcccccgcccgtcacctcccagttctggctgtggctagtgacgtggcacctgggcctgttcatcgtgctcaccttcggccagatcggattcaagggcaggaccgaggactacttcgagaagtgaagcggttaagatcctatccatcatccctggtgctgcgctgcgttgcgttgcgtgcgtgctcgccgctatcgaacctttgctgtatagggttccgatttcgtcgaatgtaatgtatgatgctacttttgagcttcaatgtaaaatctatgccgtccggccccaacgcgctcaggtttaatttgatgcaaaaaaaaaaaaaaaaaaagccccctaacttattactctgataaaaaaagcatttttttttctaaaaaaaaaaaaaaaaaagggccctagggcc

SEQ ID NO: 92351 - DNA, 152 bp, Zea mays
  Clone ID: MRT4577_184218C.1
cgtacgtaatcatgaatggacatctatcccgccggaagagaactttgcacaccaacacactactgacttactgagtactgactgacacaattgtttacgttcaccgtacgtactcgtaagcatgctcggcagtatgccctgtctgtgctcag

SEQ ID NO: 92352 - DNA, 2867 bp, Zea mays
  unsure (1)..(2867): unsure at all n locations
  Clone ID: MRT4577_184219C.1
cctcgaggccggccggaatccgcggtgtctcatcccgtcctctcgctctcgtccgcagcaccaccgccgcgcgtcccaccgtcccggtccgcgcctcgtccgcaccacagaaccagctggggctagcccgccgcgcagcgcagccacaaattaaacggagcccggccggggcatccattattcgttgcagtagtcgcagctgacggacgactgaaccaccgacagacaacatggccgcctccgcctccaccgtctccggcctcgccggcgcctccctggccagccgcccggcgttctccaccagcttcacgcggggcagccgggtgtcggcgaggaaccccctgatgagaaggaacctggagaggaatggcaggatcacctgcatgacgtttccccgggactggctgcggagggacctgagcgtcatcggcttcgggctcatcggctggatggggccgtccagcgtcccggccatcaacggcaacagcctcacggggctcttcttctccagcatcggccaggagctggcccacttccccacgcccccgcccgtcacctcccagttctggctgtggctagtgacgtggcacctgggcctgttcatcgtgctcaccttcggccagatcggattcaagggcaggaccgaggactacttcgagaagtgaagcggttaagatcctatccatcatccctggtgctgcgctgcgttgcgttgcgtgcgtgctcgccgcaatcgaacctttgctgtatagggttccgatttcgtcgaatgtaatgtatgatgctacttttgcgcttcaatataaaatctatgccgcccggcccccaaaaaaaaaaaaaaaaaaaaaaaaaaaaaaaaaanggggcgacccgggctgcctgagctgcagccccgcatcgcggcctagtagaggcccatcgtcgcgcgacgcgacctagcggcagacgtccttcgtccagccccagcccaagctccagccgccgcttggctcctgccgtcctgcgtcctggtccagcgcttcctctccagctccagcgccgcagcgcgctcgcccgtgcctcatctccagctctccagcgccgcagcgcgctcacggcccaccagcgccagccgccaggccgccaccgcggcaccgccaggcgcccaggcgcgctcgcccgccgaccgccgttgtccttgtccagccgccggagtccggagcaccgagcacgggagcagccgaggcgagcaaccgagcaccgccattgagcaacagtgaccgtgagccaagccgggctctctcaatatcaccacaggaacaaaggatcagaaatggctatgcaggccgcaaggaggctagcatctttgaaactccaacgacgcctactccttccctctcaggccgagtccccaagcataagcatcccaaccgcagcggcggcggcagccttcctccactcccatgccaccagcttcgggtacaagcaggttcgcgaagaggataagagcaaattggttggcaacgtgttcagcagcgtggcttctagctacgacctcatgaacgatctcatgagtgtcggcctgcataggctgtggaaggacaggcttatttccaagctgaacccctttccggggatgaagcatctcgatgtggctggtggaacaggtgatgttgcttttcgtgtactggaaatagttaagagtgtgggtcacagagctatgcagggtactcttactgaaaccgaagaaggcacccacatttatgtctgtgacattaatccaaatatgctaaatgttgggaaaaagcgtgctgcagaaagaggttatagcgaagaacattgtcttagctggatacaaggagatgcagaagctctgagttttgaggatggatctatggatggttacactatcgcatttgggatcagaaatgtgacgcacattgagaaagctctgtcagaagcttacagggttctaaagcaaggggggaggttcctatgcttggagttgagtcatgtggatgtccctatttttaaagagatttatgatgtttactcgttttctatggttccggctattggagagctggttgctggtgatcggcagtcgtaccaatacttggttgagagcatccgtcggtttccgaatcaggaaaagtttgctcagatgattcaggaagccggattccagagggtggaatatgagaacctcgtgggtggtgtagttgccattcattctggactgaaactgtagagctgaatacggatggatgttttttcatgcgtgcaccgcttctacaattagtagtatttgttttttaaattaattctataataggttcggtggcttgtaaaagcagctggtgctggctgtcagcatcagcacaataagtagtatttgctaataagtagtatttagtatttgcgagaagtatatgctggagcagtagcgtcagtggctattttggcttttaagctagctgacctcttccatttgtaaagttttttcttgaaaacgtgaaaccatccagaacatcaaattagtcttatcacatacctcctgcaatcaaaaaaaagacggccgctcgcgagtgaataaaacaattagaagaatttgttttttttttaaaattaattccataaaaggttcggtggcttgtaaaaacagctggtgctggctgtcagcatcagcccaataagtagtatttgctaataagtagtattaagtaggatttgcgaaaagtatgtgctggaccagaagcgtcagtggctattttggcttttaaaccaactgacctcttccatttgtaaagttttttcttgaaaacgtgaaaccatccagaacatcaaattagtcttattacatacccccggtaaggcatttttctgtt

SEQ ID NO: 92353 - DNA, 260 bp, Zea mays
  Clone ID: MRT4577_18421C.1
caagaatcctgcagcgaaagggatgcccctgcttgctttaatgcaggcaattatctaaatggttcaaaagctgcccaaagaggtcaaagttatggctgccgcctcctcaaatttttgaccacgagctaaaggagatagcaaagatgcggcagtcgcttggtagatcctcgctctacgttgatgaagctttggtggaatgaaggcactgccacaaggaacctttgctttgtccatgctatttctccaagactcccaaggct

SEQ ID NO: 92354 - DNA, 307 bp, Zea mays
  Clone ID: MRT4577_184220C.1
gttgtcgggaggatgccgcgtcgtagctcgaattcgctcgagtgctcacatgcactgttacatattaagcttagccaactgcgactctcctggcagctctcagctgaaagtcgactgccgcctctgatcactcactgctgaccttctatactaggtctcccctctgcccactggacgcccctgacttgtttggcctttttctccaagttctgctcacaaatagtaatgatgcaatgtctgtcttactcactacgctgtaggatccatgaggacaggccttgagtctgtcctggtctcaggaatcacg

SEQ ID NO: 92355 - DNA, 357 bp, Zea mays
  Clone ID: MRT4577_184221C.1
aatagttgcaaactgctagctcggtctgtacattctacagttgctatgggcgtactgcgatggtctcgtaagtttggcgagatgatcaaccaatatttgcatgatatatgtatcgtgttccataacgtaaggttatcacagtctgctatcattacctgaggtgactataacatcaccagactacttcaactcggctaccccaaattaaaaccactggcttttcaatcaaacgcgatgaccaattgtgtgaatcaacgagttcctataatgctaggccgatttactatatccaagcttaccttcactagcatgcaactaaattgctttactacagtctaacctacatctaatgtactg

SEQ ID NO: 92356 - DNA, 278 bp, Zea mays
  Clone ID: MRT4577_184222C.1
ggaaccaaaaaataaattccgttttaaatattaaatcgggggcaaaagttggattccttcataatttaaataaaggtacctttgaactttttcttttttgaaaattggaaaagacccttaaacatttttcctatctacataaatgcccgagcttttttaactgggacaattcaaattttgctcctgaaagaaattattccttttgagcattttcttgcttaaagctttaatttttatttcatgggttttcaaaactttcctttaaaaaaaattttttt

SEQ ID NO: 92357 - DNA, 1060 bp, Zea mays
  Clone ID: MRT4577_184223C.1
gatcgaatccttatcgttttctgtttttgttttgcccatttttttcgctggcggccatcacatctggcgctgctgtcgtgcctgctggtactgctcctctctttcgacaagttcctcttccactacctgaagcgccgttggttctccggcggcagcggcgccaccgtcttaaggccccccgccaaatcgaggcggaacatggcgtccgccaagtggagcgagacggccatgctcgttatcgacatgcagaaggacttcgtggacccggcgatgcgcagcccgatgctggtggccggtggcgaggccgtcgtccctgccgttgccggggccgtcgccgtcgcaagggagcgcggcattttcgtcatctgggttgtcagagagcatgacccttctggaagagatgttgaacttttccgtaggcaccattattctgggggaaagggtccaacagtgaaaggtctgaaaggagcggagctggctgatgggcttgttatcaaagaaggggaatacaagttggtgaagactagatttagtgctttcttcgcaacacatcttgattctgtcctgaaaactgcaggaataaagaacttggttattgttggagttcagacaccaaattgcattcggcagactgtgttcgatgctatagcactggactatgagaaagttacggttctaattgatgcaacagctgctgcaagaccagaaatccatttgtccaatatcagggatatgaagaacatcggagtggacacgccaaccctggaagaatggcgccgctagggttactctgtctcttggcagcaccagcaaacggagatgacctgttgtatgagatgcatgcagcacctccctgcatctacttctttgcttctaatctgcgtctgactgcgcgtacgttgttgtattgttatacccagtgcggtagaacaattgcagatggtggtatatggtatatgcaaacttgtaatccctcaaaaaaaaaaaaaaaaaaggcccctcatgtgatgtgcttgctttcacgtcgcagcagatggcagtatggccctcaatccactcc

SEQ ID NO: 92358 - DNA, 166 bp, Zea mays
  Clone ID: MRT4577_184224C.1
cacagccttccggaacgcgacaacatttctttatatgattttttcgacttgcggtgtacacacgactgcgtaataccccgttcttctgtaaatcgaccacaccgatatcgtgcacacaccccacgttacaagatttcccgtcggacaattatagtgaaaatagaaa

SEQ ID NO: 92359 - DNA, 212 bp, Zea mays
  Clone ID: MRT4577_184225C.1
acgcaccgatgttacttactaccatcataccttcatttttcctccgaccaccctatctcaccggagtggtacccaacaggttgggtcactaccagctgttatgaccaaaactcctcatcaaaaactattaacacgggctcaacaaccatttgatccattaactcattatttactatgtcatctacatctatttaacctaattgttcctcaat

SEQ ID NO: 92360 - DNA, 483 bp, Zea mays
  unsure (1)..(483): unsure at all n locations
  Clone ID: MRT4577_184226C.1
ctaataaaaaaaaaaaaaaaaaaaaaaaaaaaaaaaaaaaaaagaaaaaaaaaaaaaaaaaaaaaaaaaaaaaaaaaaaaaaaaaaaaaaaaaaaaaaaataaaggaaaggggaaaaaaaaaaaaaaaaaaatagggggcgccctttttaaaggtcccaattttacttccccttccttccaacgtaatactttttttttggggccccctaaatcaatttccctgcccgtgtttttccaccgtcgngcttggaaaacccctggctttccccattttatttcctttgcaagacatccccttttcccaatgtgggttattaccaaaaggccccccaccattcccctttccaaacatttccccacccttattggcatttggaccccccccttttccggccctttaaccgcgggggttttgttgtttccccccattttgacctgtacttttgccagccccttaacccccgttcctttgggttttttcc

SEQ ID NO: 92361 - DNA, 405 bp, Zea mays
  Clone ID: MRT4577_184227C.1
ttcttgggtttacccacgcgtccgcccacgcttcggataaagcttatgaaaagttatggtttcactatatatcatgctaaaagcctcctgcagtagggccggggggaccggtataaacctgacccgtcatagggtacatcggactaaaagacagccactgtagaggtggtcctggacctgaaaaccagcctggagcttactttaccggcaacccttaaggactacatccaaaaaccgctttatgatcagcttgtgattgacaggaaatggcctgtgcatgttggagaccatagaaagtatctgcacattatgcttgggaagctaaatccatcgagcaccgagaaagatcgggactcactctcctgggatacaacagtttaacacgtgtttaattaaaccccctct

SEQ ID NO: 92362 - DNA, 256 bp, Zea mays
  Clone ID: MRT4577_184228C.1
cccacgcgtacgcggacgcgtgggtttgaacgtaaatgagctaattaaagcctttgcagagaaaacaaacgacgggggggcggtctatagaacccaagcttactgacgcgtagctgcaatgtgcttgatattttattgagcaatctaattctaatcaaggggcccgagtagtacaaggatttgaatcgaaacaccatggcttctgctaacggaagcgcatcgtgcttctgttcactgattgcagcttaagaaaagg

SEQ ID NO: 92363 - DNA, 313 bp, Zea mays
  Clone ID: MRT4577_184229C.1
tttcttttcatttttttttattttttatttgtctttttttttggggttggtttttcattttttacattgggaataaaaaccaaaacttcattatagaaatcccatttttttgggccatcccccaaaaaaaaaagggcctcctccaaccgcctttttccacatttgaaaaaagaggggggataagaggaaaattcccaattttaacgaacactctagtaggcctaaaaatgaattatcaaccccccaggaggggatcctcaacctgggaagatgaacctggcaaactccaccactgccccgtttagccagcgcc

SEQ ID NO: 92364 - DNA, 908 bp, Zea mays
  Clone ID: MRT4577_18422C.1
tcccgggtgcggacccacgcgtaccgggaaagcagaacaatgtagcaactactgtaggtgctcgttcacatagatgggctccatggggagttaataaaaaaaataatgtcaactatcatatgaattaaaatccattcatgtcagctatctactatggatttatttttctatatttaatctatcatgtacatgattatatatttcttattttatttgtttgttggacggttggacaactaatattatcaggacgaactatccgacaaatatccgttatctacccgagtaatatctgatatctgtttcttacccgcctgaattattatctggtcccgtcctgtatctgtcccgaattttaactacccgtacccgatcctgtatccgagagaaatacattaggattagatacgtgatgaccctgtatatgcatgtatccgtcccgctttcacccctaccacggacacatgaaaggtaatggcagagtttggtagagttatttacgcctctgcgatagctagcagatgtgcagcggtgactaaggtcttagtggccgcgagctcggcgccaagatccatggcgctgagctaggccacgttagcctctagcacgacaagggaagctagcgtatctcattgctcggcgccatagcctatgacaccaagcaaagggtacaaaaacgacattaagtcgtctaagggggccaaacatgattttttttccagaaatgctaaattgcaaaaaaaatcggttataggcagactggctagaataaatgctagattggtcaagcccccatttgtgttgatcctcaaccccagcattcaactcaaaggcttctaaaatttcacattaatattgcgaagtaacaactcagggctatgagtaaggaataaaatgtatattgtgcc

SEQ ID NO: 92365 - DNA, 677 bp, Zea mays
  Clone ID: MRT4577_184230C.1
tcgcaacatacatagtgaaatacactaccaacatctcatcaccaatggcaggcaacatattgccatccttgcccttcttgctctttatcaagcgttgctaccgtgactcttattccacaatgctcacaacactacctctttccggtgacagccgtgcgcatttgcaataccactaactgtatcagattcctacagtgctgacaagcaggaccatctgcaaacacagcatactgtacggaacgaagacgcatctgcacgcgatcgcaaccaacacacttatgctccatatctgcgaacacacacatatctgtaatgacatctatttctgcaaagaattggagcccaacaactacaacaacagttgcttccaacaatcaatcaactagttgcaaccaaccttgctgcttacctccagcaacaacaatttcttccattcaatcaactagctggggtgaaccctgctgcttacttgctggcacaacagctactaccattcaaccaacttgtaaggagccctgttgtgcttattactgaaaaacagaagcttccattccatctacaaggtgcggcaaacatcgctgttttcttgcaacaacaacaacattagctgccattatacccactagctgagggaaacattaacgccttcttgcacagcaacagttgctaccattcta

SEQ ID NO: 92366 - DNA, 339 bp, Zea mays
  Clone ID: MRT4577_184231C.1
agctagtttccacatagtccctagttggccgccgcttctacccactaatcttactccttgcaagttacgcctgattcaaatccatgacttagcacctaagaaacctgtaccgcaacagtgctcgactctaagtttccacgcaatacttggaatagatctgcaccgtatctcggtctacgaagctgtatttgaacacaatcgatgtcgaccactttgtcgcctatggcctcaatgaaggacatttcgagagcctagcagtcgccggtgccgtcaggagccatggcgctaatgccaactgaccgaacaggctgcatgcagtagaagaagtgtgatatgaat

SEQ ID NO: 92367 - DNA, 290 bp, Zea mays
  unsure (1)..(290): unsure at all n locations
  Clone ID: MRT4577_184232C.1
atttttnnanntttttacaacaggttttttcacacaaaagtttgtttgtttgtacattgatcaaaaaatgttggagaaacatgaaaacgcttcaccatggaagaaaaattttttttgagtaactcaaacaaaaaaggttggcccacatattgtacatgcactaaaacaatacaaggttttaaaaatgttgtttttatacgcagaagcaacagtatcaacatcatcatcccgggggagacatgttcctagcctacgtacaaaaggaaacacaaagcatgctctcaagcaaa

SEQ ID NO: 92368 - DNA, 411 bp, Zea mays
  Clone ID: MRT4577_184233C.1
caagaagtggacaattcatggcatcagagggatggcctttgaagaggttggctgtgggatctctttctggtcatgagctccaacctgtacatatatatgtaaattctagattccaatgtcccaaaaaaaaaaaaaaaaaaaaaaaaaaaaaaaaaaaaaaaaaaaaaaaaaaaaaaaaaaaaaaaaaaaaaaaaaaaaaaaaaaaaaaaaaaaaaaaaaaaaaaaaaaaaaaaaaaaaaaaaaaaaaaaaaaaaaaaaaaaggggggccctttttaaaggccccatctttactacccctggctggcaaatcaaaactttttttatagggcccccaaattacattcattggcccgctttttaaaaatgtcaaaatgggaaaaaccttggggtacccaacttaaatgccttgg

SEQ ID NO: 92369 - DNA, 589 bp, Zea mays
  Clone ID: MRT4577_184234C.1
ctcgaggccggccggaattccgtactgggatgccgcgagcacgatccttggtctgcattgccgtggaggccattgcgctcctcgagccgacgcgcggagcgaatatggtctagcgttagttctgggagtgggtgcggcacatggtgcggtctccggcacagcacgttccatcaacacgcgctggaccgtgcgtccccctcgtactctatcgacatagacgcgaacccgtgcgttcggcgacttcacgaccatccaggatcgccgtcaactcgctcccggacatgaacctcgtccgcggcgtcatcagggtcaaccccgacacctacacggagaaggtgagcatctactgcgatgctgcgctatcatcaccctggagggcagacggtccggacagaacaatcgtgcagaggggctacaccgcgtactcgtcgacgggggcctaggtacggaccctcatgacgatcgactccgcgtccttcaccgtgaacgcgcagtacttcctggtgaggaacatcactttctataacactacgccggagtcgaggtccggctcgactggcaatgacgtggcgtggctgcggctgtatcg

SEQ ID NO: 92370 - DNA, 252 bp, Zea mays
  Clone ID: MRT4577_184235C.1
aaaaacatcaaaaaaaaaaaaaaataaaaaaaaaacatgacaaattaaaaaagaaaactaaaaccaatgcaagaatgcatcaggtggaaacgcgcatatcgatgggtgatcgtgccatcagagctgcacctttggcccttcaaagggtcgctcaatgtaacacctcatggatcaatgattctattcagtactagcagattctcaacatcaacgtgggtgtacacacggaatatccaatgtttgttccagtaa

SEQ ID NO: 92371 - DNA, 425 bp, Zea mays
  unsure (1)..(425): unsure at all n locations
  Clone ID: MRT4577_184236C.1
cgncggcccngcncgnggaccccggggacaagggccaggcggacccgagccacnggagcaagagcncccagggcgggcnccagcgnancgaggagaagacaccnggaagcncnacncggagaggcngangacccncaccggcgngnaccgggnncnggaagnacgngnccaacggagagaggcgcgagacccggcggnaccnggagaagcngnacgcgcccaagnaccgcaccanggcgagcaccgngccgcnggccgnggagggagagcccnccagcaagggangcgcgacggcggccacagaccngancgancgangagcgagagggagcacncggagngncgngncnnnncccnngccaaaacnnnccnnnnnncccnncccggaggcgaaaaaaagaggcngcnnnngcaaggcggcgggc

SEQ ID NO: 92372 - DNA, 781 bp, Zea mays
  unsure (1)..(781): unsure at all n locations
  Clone ID: MRT4577_184237C.1
cgggagttcactaaatatgtgtatgtgtgctcaaccaacaaattgaaataatgtcttgtccgatcaatgtcgaggaagcacagcgaagtcgagccatcaccgtggccgactctgctccgggcgacgcgaccccggcagtgaccgagatcagcgcgacggggaagcgcggcatcccggtgctcgttgcgccgctccacagccagcgagaatgtgatggaagccgagggcgccgcgccagtgcggaggagatgatgagcatggggttccagggcttcctcctcctggaggagaaggacgacgacgatccggtggcgcagcgcaagaagtggttcaaggagatgcgcgggtggctgatggtgctggccaccgtggcggcgtcggtgacctaccaggccggcctgaacccgcccggcgggttctggcaggacggcgaccgcgccggcaacccggtgctccgggacaggcactggtcgcggtacatgatcttctactacttgaacgccaccgcgttcgtgacgtcgctggtgatcctggtgctgctgatgaacgagcggttctaccacacggagaccaaggtggtggcgctcatgctcaccaccttcatcgacctcatcagcctcatcggcgcctacatcgccggcaccacgcgcttcttctcctcctgcatctacatcatcgtcatcacctgcgttgcctttgccggggtcatctacttcgggagagtgatggctgaaatatgcnagntcacccgtgagaaagatgccctgcatgctccgactac

SEQ ID NO: 92373 - DNA, 793 bp, Zea mays
  unsure (1)..(793): unsure at all n locations
  Clone ID: MRT4577_184238C.1
cctgcaggttccggtccggaattcccgggtcgacccacgcgtccgggaggctgcggctgcagacggtctctccgagaagctgcaaggatgctgtctgtgcgcgtcgccgcggccgtggcccgtgccctccctcgacgggcgggactggtctccaaaaatgctttggggtcatcctttgttggtgcaagaaatctccatgcctctaacactcgacttcagaagactggcacagctgagatgtcctccattctcgaggagaggattctgggagctgacacgtctgttgacctggaggagactgggcgtgtgttaagcattggtgatggtattgcgcgagtgcacgggctgaggaatgttcaagcagaggagatggtggaattctcttcaggcttaaagggtatgtccctgaacttggaacccgacaatgttggagttgtcgtgtttgggaatgacaagctaattaaagaaggagacgttgtgaagaggacaggcgccatcgtggatgtccccgttggcgaggagctgttgggccgtgtggttgacgccctcggtaatgctattgatggaaagggtccaattggttccaagacccgcagacgagtgggcctgaaagcccctggaattatcccccgaatctctgtgcgggagccgatgcagaccggcatcaaggctgtggatagcctggtgcccattggccggngtcagcgtgagctgattattggtgacagacagactgggaaaacatcgattgccattgacacatcatcaccangaacgttnaacgatgggacga

SEQ ID NO: 92374 - DNA, 2094 bp, Zea mays
  Clone ID: MRT4577_184239C.1
ctgatctggttcccacccgcgggcatcacatccccgccgccgccgccgccgccgccgaatctcgcgctcgcggcgcgggatctcgcgggccccggccccacgacccggcggatcgggatgagagtggggcgtcggcgatgaccggctcggcggcctcgctgggcctgcggtccgggagctacggctccctcgcggccgccgtcggcggcgggaggaaggccggcgccgccgccgcctgccgcccgctgcgcggggagaaggaccgcctgcagctgctgcaccgcgcgctgcggctgggcggtcgccgcagggccggcgtcctgctgctgctcgccgtcgtgtccgccgctgtcttctcctctctcttcgccgtcgtcaaagatgacagcaattcaatcagtatcgtaaataattatgaagtaccaaatgccatacagaagtcagtgtatcccagcacaacacggcctctaatgatgtctggaaaccaatactccaccagtgttgtcaacaaaatcgagcttccaaatcggcttcatcttacgtatgcaaacttcacacatccttgcgaaggtttctcagtccctcctcccctggttgataagaaacgcactggaccccgaccatgccctgtttgctatgtttctgtggatcaggcatttgccttgatgcccctacaagcttcaccatcacctgtcgtaaagaacttaaactatgtatcagaagatggtgttactgcaaatttatcaaatctaggatctggatttggagggcatccatctctggagcagagaaacaaatctttcaacattaatgagtcaatgactgtccactgtggctttgttagaggaaagaagcctggccaaggtactggattcgatatcaaggatgatgatctgctagagatggagcaatgccgtgagctagtcgtagcttctgctatttttggaaattatgatatgattcagcatccgaggaacatcagtgaattttcaaaggcaaatgcatgtttctatatgtttgtagatgaagaaacagaggcttatgtcaagaattctagttctttgtacaataataataaagttggactgtggaggctggtggttgtccgaaacctcccttatgaagatccaaggcgtacgggaaagattccaaaacttctgctccataggctttttccaaatgtgagattttcagtttggatagatgcaaaacttcagcttgttgtggatccctatctcctgcttgagaggttcctttggaggaagaataccacttttgcaatctctcggcattacaaacgctttgatgtgtttgaagaagcagaagctaacaaagctgctggaaagtacgacaacgcgtcaatcgattaccaaatagagttctacagaaatgagggcctaacacattattctcctgctaagcttcccatcacaagtgatgtccctgaaggctgtgtgatcatcagagaacacatccccatcacgaacctcttcacgtgcttatggttcaatgaagttgatcgcttcacctccagggaccaaataagtttcagcaccgtccgggacaaaatcagggctagagttggctggatgcccgagatgttcatggactgcgagaggcgcaactttgtcgttcaggcgtaccacagagagctactggagcagatgattgcatcaggtaggatgcccccttcgggggctgtggtggtgaccgacgcagcaccatctcggaaagtccgggcaggtagcaggaaggctactccgtcgaagaagccctccgtgaagcggaaaaaagagaagaaatcgagctcgcgacggcgtctcccgaaacccgtcgccggtggtttgggtgctatgtgacctaagttttcgtcgagtagcagagtcttgatactcccacagtcacacacttatacagcgtgtaccggaatacaaacaatgttccattacttaggtctggggcttgtaatcgtgccccggcgaaatttgttcatattactcttcatcgttgttgtacataacatctccaaaccaatattcaattttgttcattgatgataaaaaaaaaaaaaaaaaaaaaaaataaaaaaaaaaa

SEQ ID NO: 92375 - DNA, 316 bp, Zea mays
  unsure (1)..(316): unsure at all n locations
  Clone ID: MRT4577_18423C.1
ctnccgaccattaactttattttattccaaacggcaaaaaaccccgatcgacaccttgagggtgttgctggttgacctcgctctcctggctcttgctgggaacgccaacttcacgcatacaagcggcggctgcggctgccagccacccggcgccggttcatctaccgccgccggtgcatctgccaccttcggttcactgccacctcgggcattccaccgcgccactgcgcgcgtcactgcacgcgtctggcgcgcgtattgcgcgacatgcatctataacgccgctagctatccagccacctgcggcaagcgatca

SEQ ID NO: 92376 - DNA, 1386 bp, Zea mays
  Clone ID: MRT4577_184240C.1
tttttttttttgtttttttttttttgcggcatgcctaattggggatggcaagttctagtcatgaaacaaaagctgcccacagcaagtgacttcgctgtacacaaacggtcgaccaaaacgacatcattaattacccagttttagttgcacacactaacataacagctaaaacaagattaaggacacagactattgtttgacagcctgtgttgcgactggtgactagtcatcccaagcacgaaacagatcacgtaagacaccagatgaatatgctatggagtagcagtgtgcatgtgataagtgcattagacaatattcaatactgtgaggaaaacggtctaacatgaggccgagtcattatgagcccatctatctcttcatgatatatcccagtagcattcccaggagagcaatggccaccacgaccacaaaggagaatccaccattctgcttgctggcttccctcctcgtaaggtccagttcctctcgaagcttattgttctgctgaatggcagagtttctctcttctgtcaactttgaaatcaaagcagatgtctcggaggtgtagtccttttgatctatatgagtttttacagccgagaacaacagtgactcatcagattccctcgttgctgcgtctcttgataattcaagttaattccatcggacaatgaaggtcggggtgatgagccttcttcagattcctcatgcactggggatggcggtttgggtggtgggatgtagacgaccttcagcttaacctcatccaccacattagctgattctttggtaaacatatcgccagtgatgtccttgactaaggtcccttccgccacaacgacactttgcacaagaaacttgtccttgcactgcatgtctggtggcgcctccttttgtgcttgcattgtcacaatgacatcgctggtggaccgaggtggcacgatgccgctgttgggccggacacagtacttcttcgggctcgtcgtcttaaccttaaagccgatgtagtcatctgttcggtttgtcaactgcatagagcacgagatctgcttctttgtctcgaatgggaatcggagctcgaggggctcgatctcgagcaagtccttggagtgagaccacatcccgccgccgctggagtccgggaggcggaggcacgctgtacggagttgatccgggggtggttgcctggcaggccacgcgggcgggagagcgaggagctagggtttgggaagcgaggctggtttgcgctcgccacagcccacaggagcagggaaaagagcctggagtggagtggagtggagcagcaggaggggcagatgggaatttggaatcgccgtaggcaacaacgggagttggtaggaactaggaggagcggaggagggaagc

SEQ ID NO: 92377 - DNA, 387 bp, Zea mays
  Clone ID: MRT4577_184241C.1
taagctcggaattcggctcgaggtggattgacgccctcactatcttgaaaacaacacatcgctttatctttgggggccatttcaaaggaggagcgggcccaatacacggtgacgctcttaaacagcaggacctttgacgatgttcagctgatcgaatattcgacaaacgactacctgcctgcgactggggctaagcacgcgacatatttgccccaatccctggggggctactccaagaagcgtttgcaaagggagcaatgctccatcgtagagcgcctaacgaactggcttatgatgcaagggcacaacaacggcatgaaggtcatggccgtccccaacatgaatcacaccttggagattatccacatgcttactgactccaatgcc

SEQ ID NO: 92378 - DNA, 471 bp, Zea mays
  unsure (1)..(471): unsure at all n locations
  Clone ID: MRT4577_184242C.1
ctctctcacttgcccgggcgccgcctatccgcctgatgttctgagcctgcgcaatgccctctagaccgagaacgcctctggcgagaggcagaagagatggcacgctgcggttgtggggccggcactcggcgtcggatcncagtgcgacctactattgcgttggcgtgcggatgcacgaccgtgtcgagatcatagccaactaccagggtaaccgtgccacgccctcacacgccgtcttgaccgactccgagcgtgtgataccagatgcagccaagatcctgggatccatcgaaccccataaacaccgtgtatgatgcacaacggatcattggcaggagggatattgatgcctctgtgcacaatgataatatgctgtgctgcttcgaggacattgctgagcccggggagaacccagtgatccgtagtcagcacaccggagaggataaacggttcgcatccgaagagatctac

SEQ ID NO: 92379 - DNA, 241 bp, Zea mays
  unsure (1)..(241): unsure at all n locations
  Clone ID: MRT4577_184243C.1
ctcgccctcgctgttgccctttttgcctacactgttgctagtggctcggctgttactgctcctcgtccttgaagaggcagtcgcgatgtagtattgacggaaattctgggcaagagccagtctaatgtacattctgtgatcagagtctagaaatgttgctgcatgatttgcaataactatagttgtccctgcgtcaaacttcgtcttgtgttcatcagtccgtgtttaaaaaaaaaanaaa

SEQ ID NO: 92380 - DNA, 661 bp, Zea mays
  Clone ID: MRT4577_184244C.1
ctcgaggccggccgggccgggatagccgacgtcgtcctccaactctaaccccgtcgcttccgcatcccgtaccggctccaaccttcacggccggttccttcctctgccaccatggggaagacacgaggtatgggcactcgtgcgcaagatcaacacccaccgcacgaaccagaggtggcctgaccaagcatacaagagacagccacttgaggaatgagtggaaaaacaccttttgctgtatcctctcacgacaagggcatcgtgctggagaatatccgcattgaggccaagcagccaaacttcagcccatccggaagtgtgcccgcgctcaactggccccgaatggaaagaagatcgatgcctttgtgcccaatgatggctgcctatactacatcgaggagaatgatgaggtgccgactgctggattcgggcgaaagggccatgctgtgggacacattcctgaggtcatgctcaaggacgtgaaggtgtccggagtgtcactgctcgcactcttcaaggagaacaaggagaagccacggccttacatcacttttcggtagccaagaaagatgaaaactgcccaagcgctctattgacaaagctaaatatccgctagcaactgcactgctaactcatactgtagtaattctgtttccatttt

SEQ ID NO: 92381 - DNA, 437 bp, Zea mays
  Clone ID: MRT4577_184245C.1
ccgctgctcatctcacatccctcgtgaagactcctgctcctcgccgatcgatacgatggccgtgttctccgacctccacaccgccgacggcctcaagtccctcgaggctcacctcgccggcaaaacctatgtgtctggtgactccattactaaggatgacattaaggtcttcgccgcggtgccgtcgaagcctggcgctgagtttcctaatgccgcccgctggtacgagaccggctctgcggctgtagcctcaaaaattcctggtaaaggttgttgtgtaaaattggcttgcggatcaagttctgccggaacttcttctgccgatgaagcttaagattaatattaccttgatccttttggtgatgaaactgaagaagaccagaaagcaacttattaaccgtccgtcgctgccaagggcttttctaaaaagaaagaaa

SEQ ID NO: 92382 - DNA, 427 bp, Zea mays
  Clone ID: MRT4577_184246C.1
aaacggcccaattccaatcccagtttccagggggggggctaattttaatccaatttttagcgatcggggaaaaaaaaaatggggggggaagttcaaaacccccaaaagggggccccctcggggtccattttggggggccccgtcaaggaaatctcgggggggttcacgttcacctccgaggggaccccggtgtcctggaacccgcccccgttaaaccgttcccccttgcccagtttgttgtaccacccgccggcctcctgaaggagctggagcaccatgcccgcgttgccgttttactgggcctgcgcctgggcctgcaccatgctcgccagggggagcggcaacttggaggggtggaggcagggtgggttcaagaaaaactggccctccagcgcgttggaaaaaaggtcacgtggggtgccggggg

SEQ ID NO: 92383 - DNA, 363 bp, Zea mays
  Clone ID: MRT4577_184247C.1
ctagggtttttgattttagccgccgccgctgctcatctcacatccctcgagaagacgcgtgctcctcgccgatcgatacgatggccgtcttctccgacctccacaccgccgacggcctcaagtccctcgaggctcacctcgccggcaaaacctatgtgtctggtgactccattactaaggatgacattaaggtcttcgccgcggtgccgtcaaagcctggcgctgagtttcctaatgccgcccgctggtacaagaccgtctctgcggctgtagcctcaaaattccttgttaaggctgtggtggtaaacctgcctgcggaaccacttcttccggaacttgttctgccgattaagcctaagatta

SEQ ID NO: 92384 - DNA, 290 bp, Zea mays
  Clone ID: MRT4577_184248C.1
ccacccattcactcgcctgcgctccctcgccgccccaggtccccagcccctgctcacccaccggacacctcctgctcgcccatccttcccatcggtgtcggcgatgcactccccgaaggacaactcggctggcgcgacgagaaagatcagctgcataacgtctccgtccatgacatcgacgccggaaagaaggccatcctcttccgagtccccgctgccttacacccccacatgcagaaaccagcatgtgccaggctgcatcacacaggctgatcagctcccagccaagg

SEQ ID NO: 92385 - DNA, 129 bp, Zea mays
  Clone ID: MRT4577_184249C.1
accaactacctccgcccgggcatccgccgcggcggcttctccgaccaggaggacaggctcatcgtccacctccaggcgctcctcggcaaccgctgggccgccatcgcctcctacctccccgaccgcacc

SEQ ID NO: 92386 - DNA, 357 bp, Zea mays
  Clone ID: MRT4577_18424C.1
agacaccacacaccaccaaccagcagccgcaccacgcacccatcgcacagagatcgtgcggcggtcacgatgatggcgtgcttcggcgtctctgcggcgggcgccccctggcgccgcggaacatggcgcgaagcagtccggcaggtgctcgtggcaccgaccccggccctagccgcatgctatgcctggcccggctgcgccggacgccccccagctatgctacgcggctactgccccggccagtacagccatgatacccgccggctccggcatgacccgcccacagtacggaaccaccgggggcaagaagaaatacactgccgtttgcctatgcatgcccaccttcaacggctggca

SEQ ID NO: 92387 - DNA, 387 bp, Zea mays
  Clone ID: MRT4577_184250C.1
cgccatgttagggtctgtgaggatttgaacggtggggtcaagttttttgactaggcagcgccgttgacttcttcccttggcttccatgttagctcatctctaagtctataacaagtttgaaatatacgtatgtgtatagatgtccaaacgggccacccgacacggacccggcctgaactcgtttcggaccggtacgaatagggccgggccagacatggcccgttgatgcttcggggcggatcgggctggcccacgtgcctagggacatgcccaaacccggcacgcacagggaaaaatcgtgtcgggccggcccgttggcccggtgggcctcaacggaccgggcccggcactggcccgaaccaacagtagaacggtatataaatacat

SEQ ID NO: 92388 - DNA, 318 bp, Zea mays
  unsure (1)..(318): unsure at all n locations
  Clone ID: MRT4577_184251C.1
ttctgagaatccgagcatcgcacaactgaacagcagttttttgcgctgcctctctcttgctgcacgccgcacgatgacatcgctaagactctcatgcccaaatctgcaccatgtcaatgccgatggctgagatcacctgcaaagggcagcattgtagctcagggcgtgtcgaatccctagaggtaggaccggggccaaaactgcccggtccacacaacgaggctaggaatatgtctatactggcgccgaaagcgtgtggtgcacctntccaaggttcgcatcaactgggctggcttgaccaccagggacgcctccttc

SEQ ID NO: 92389 - DNA, 521 bp, Zea mays
  unsure (1)..(521): unsure at all n locations
  Clone ID: MRT4577_184252C.1
gggggggggggggggggttttttaatttttttttttttttttttttaatcatgcagcatcacaaaatagatattgagaataaagcgcgcgtgagcatttaagtgctggggaactagtgataacagaccttacagttcaaaagtaacttgaaggggagggggggggattcaattnccaagggaacctatgagcaaactgtggagggcgggttactgagtggggggggggggaacacgctttttggacagattttgctacatgagtgggggcacaaggcaacctaacaaaacttttttaagttacaactgggtaaacactacagggacttaggcgctgtttggaaacacccagtttttaaaaaactgggttatagaaattgagggggggncaaacataccagtttatgagtaagtttatagaaattagattttgagttttttaaaaaatgagaaggtgggcttttctagctaaaatataaaaagtgggttgttaaaaaccgtggtggtttcaaaaaggggctt

SEQ ID NO: 92390 - DNA, 832 bp, Zea mays
  unsure (1)..(832): unsure at all n locations
  Clone ID: MRT4577_184253C.1
ctatttcaaaatggtgtagtactccactgaagtaatgaactttgctgttttcttgctaccacccccaaaatctcaggaaatgaatagctccacctccactccaatgttctttcggaggctacacgctccagagcttcgtatcattcctgctccagccttattcattctgtgaatttgtaagaattggtccgtttgttagctgtaagaagcaagctgcaattacatgtgatgttcatgatgtgattcacagtagcaagtagtgatcattccagtcggtatcccatgtttctgaaactttgcatttcaatctctttggttgcaataggaggcggacgaagagcaagaaaaatcagaagacgacaaagattctgaccataattctgataaccctgatggccccgatacatcttcgtttagagcattcatgatctcatttttgtcgccgtctagctcttttaacgattcaagggagataatccccgagcagagtgaagaaatgggatacccaactttaacaccagttgggaaggcaaccaagggaaagacaggcttgctaagcagagggaagcattccattggaaaaatcattaataaagcggctaggatgagcggtttcaaacaaaactcggaacctaaaactgacaaagaggtggcgagtcatgctgaatcagctgcacctgcattggagctcgaaggaccaaatgaagttaactccctgaccaacatgccagctatgtcagagccatctgtccttttgtcagaaacaatgcgatccactctttattcctctcttccctatctggnccaaggaangagctgngttttgctatac

SEQ ID NO: 92391 - DNA, 416 bp, Zea mays
  Clone ID: MRT4577_184254C.1
acaatataaaaaaaaatttatacaaggtgatatcattttacaaaagaaaacaacaatactaattaatacaaagatagataattaaacaaattaaaatcctttaaaagtgcattcagttggtaaagaataaggttcagaaatagtaataccactatcactaacagtggctaattgcatcttattaaaacttttagcatatatgtaatacaaaactttgatacatttttctaaaagatctttagcgtttgcttaactaatattatctacaccacccttttcatcaacaaatttacgtaaaatatgttgagctaaataagcaccatatccagttgccatagtttcatcaataaaattagaacctaataaatcagtataacctaagaaaggctttccattcttataacctgcaacaacta

SEQ ID NO: 92392 - DNA, 667 bp, Zea mays
  Clone ID: MRT4577_184255C.1
cccacgcgtccgcgccatcgccaagggtgtcggtgtggctgtgtcggccacggccagctagagctgtgacctgggagtgggagggttggtgcctataggatcgtcatggacaccatcgaggagtgcggcgacggaggccgccacctgctgctgggcctcggcaccaggatactcgtcggcgtgccggacaactcccgcggctgctccgagctgctgtcgtgggcgatcggcgccgtcgccaagcccagcgactccgtcgtcgccgtgcacgtcctcggagggagggggaggaagcggaggctgcagaaggccaacgccttcgtcatctacatgctcggcgaattcgtcaaagcttgtgaggccaagcagattaatttggaggccaaggtgatatgcagctcaaacattgggagagccctgacccaagaagctgcactgactgatgggaacatcctcattgttgggaggtcaagaaatgcgtaccataggagccattttgagattgcaaactactgcttcatgcatgctccaaaaaactgctcggtgatcgctgttggaaggcaaggcgtacacagagtagtactcggttgagactcggtcatttgatgcagatagcaccatctcctcaagctcaacatggagcaggagattcgcgcggcttcagaag

SEQ ID NO: 92393 - DNA, 390 bp, Zea mays
  Clone ID: MRT4577_184256C.1
aacaaccttcccaggcctacgagaagggaacttagctcaaccacgcgcaacactcagcaggttactagaatccacaaccctggggacgccacatgacgcggcgacacgctggtacttgactagcctaccctaggcggtacctacagccacaggcgtcgccgcaaaacctgctgatggtacccaacttgccgtgcgtacggtgtgggtactacgaccacacgggacttatgtatcaaccgatcccgctatcccagcagctggtgtacttcatgcagtaccaacagaagctagtgagcggtggccggcgcccggcaaacgcactccatcctcaacggcgagctgtacattagtagagacggcgcaagctacttcgtgcagaactactacata

SEQ ID NO: 92394 - DNA, 469 bp, Zea mays
  Clone ID: MRT4577_184257C.1
gatgctaaaacaggatttaattaatgttggctcaaacagtacaggagtgtacaacaagatccagggaagaaactgttgccaggaaatctaatatctggggcgttaatcggtcttgaggattccttcaatggtcgggtcaacgtaaaacaatggaactggaccgcattctgcatttagtgaggacctgctgctaaatcagtgtcagcagcttggtgataacagcagtaggagaaagggggaaggccttcaagggctcgtattgcatcttgcctcctttggcacttaagcatgttgatgaaggtgccgacacccagggctgggagtacaagccatgctgaagggaggaaggaagtttgtgggaagacatcatcagcgaggaatagcggaccttccgagagagacaatatcttgagtaggttatgagccggcttgagctctgggtctattgaggctagcttagcaaatgaaa

SEQ ID NO: 92395 - DNA, 642 bp, Zea mays
  Clone ID: MRT4577_184258C.1
gtggacttttttttttttttttttaggtgcaacgactcgatcttgattcatgtacatgtgacatatactacaacagaaaaagagcaataatgtgacatgagctgggtgatggtagtggtaggtgcgcgtggccaaaatcaaaatcccgcagggatgagatggaactgaaatgtttggatgttagggaagtcaactgcatccccgcagcgcaggcgcagctcatgtagtacgtgaggagatcgtacgttgttgttggaatcgtgtgctggaatcgtgtccagaattgcgtcgtcgtcacattcgccagcttccctctcgccacttgagctatatatgtgcagcagtgcaagtcttgtccggatgacgcctctgctgcacgtacgttcaaatctgcctccgtcattctgttcccagtgcggcgccggcatgcatgcctgtcaggcgttggagctcagccctctcgcctcgcacgatcgcatcacccgcatccgcttgcacgaggacacgaacatctcccacggcacgtcgccgacgagcatccagtcgccggtcgccgtcctcgtaccaccacggcgtgctcccacttcgccgtagccgtccatcagcccgatggagcagcagcagaacaactcgttgagcgcc

SEQ ID NO: 92396 - DNA, 1964 bp, Zea mays
  Clone ID: MRT4577_184259C.1
cattgggtacctcgaggccggccggaaaaaaaaaaaaaaaaaaaaaaaaaaaaaaaaaaaaaaaacaccccatcgcgttgccggatcgagcttggctctatctcgaaccttgcttcgccgcacggcaccagaagcacggccgtgttctcatcccctccacacgtttccgcctcccgatccacgtccgccgttagccgcggccgacacagctcctcctcctcctcgcagctcttctccagctctcggaggcccgaggtttcatcgacccgcgctccttcatcctcgacacctcactccggcggcgcgggtccgcagtgctgcacatcgcgagccgcgcggcacagccgcacttgttgtccttcgtgcgtggggtgcggttcgacgcgggcggcgggatggcggcgagcgcgcgggacagcaccgatgcagcggagcgagttgtggatgaccacgacggctgggcgtcggacgccgagatggacgtggagatggatgtggtggaaggcgatgccgaccggagggacggcggcgcggatggtgatgatgagtacttgctgctcactaggataagggacacatcagcagctgaagcaagggcaggaaaggatatacaaggtataccatgggagaggatacacatagccaggcaagattaccgaaaagctaggttggaacagtataagaactatgaaaatttccctcaatcaggagagctcatggataagctatgcaagcaagtggagaagagcagcaagtattatgaatttcagcacaacactagatcagtgaagccatcaattctccattttcagtaagccactggtcatcattgtctcacaaattatcagaggttcttgacttctctgggcatgttgctccagcggagaagtatcctggcagtttactagaaggtttctctggtgttcaagttagcacacttgctgtgaatgagggtttggtggtagctggtggttttcaaggagaactaattggcaaagatgtggaaggctgtagtgtaaaattctgtatgaggacaactttgagtgacaatgccataacaaatgccatagatatacacagatcgatgagtggaagcctgcacattacagtatctaacaacgattgtggtgttcgtgaatatgatatggagagatatcagctcgtgaaccactaccgatataactggccggttaatcacacatccgtgagcccagataagaaacttttggctgtggttggagatgatcgagatgctcttcttgtggattcacgaaatggaaaggtaacctctaccctagttggccatctggactactcatttgctacggcatggcacccggacagccggacattcgcgaccgggaaccaggacaaaacctgccgcatctgggacacccgcaacttgtcgacttcacttgcagtactgcggggcaacatcggcgcgatccggtgcatccgctactcctccgatgggcggttcctggtgttctcggagcctgccgacttcgtccatgtgtacagtgtggctgcggactacaagaaacggcaggagatcgacttctttggtgaggtgtccgggatcacgctgagcccggacgacgagtccctgttcatcggagtgtgcgaccgcgtctatgccagcctgttgcagtacaggatgatccgcggattcgactatcttgactcatacgtgtgaagaactgagctttggtgaccggtgttgtgctaggtgctggctgaaggttctgatgcgcggttcagggaatatatctgcctgctcttagttcatggcgaatgatggttcggtgggactcgacgccagcgaatctgccgtgtaaatagtttagaatttgaagcgtagtgtagtgctgtggaccaatgctgtctctgaacatacatatgatcagagtaatgtgtgtttgcgctgttagtttcagactccggaatacaaatagttttggacc

SEQ ID NO: 92397 - DNA, 427 bp, Zea mays
  Clone ID: MRT4577_18425C.1
cccaaactgacaagcgtgagaatagatcaacaggatgaacaggaactcagccaacacaagacacgacacgctggatccgcgggcggaatggggcacacgcgcgcactgacgaccggggccccaccttcattgcccccctacgcacactttacatagcccacgtaagtgggagcccgcacctggcacgtccacgcgacagacactgcttgtttcttaacggggtacgtacgacacacacatacacacacacggagagacgtcagtcaccgttttatcactgctacagaaaaatccagaagtgttaccgccatggacgcgactgtaaagactacccctcaacgcgcggcacgccaatcccctggggctagggtaatggcccccgtcgatacatgaacacggacttactagctggacttaaaggcctgct

SEQ ID NO: 92398 - DNA, 200 bp, Zea mays
  Clone ID: MRT4577_184260C.1
cccggttcgacctagcgtccggtcgtatccaccttgcctcacaactaacttgtcaccagaagtatacctgcttaatttgagcatattatcttagcatgccttcaagataatcataaattgccctgatctacattgctgcagtgcagaatgtacatttgttttaatcatttgtgaagtataattgccctgatcatcataag

SEQ ID NO: 92399 - DNA, 220 bp, Zea mays
  Clone ID: MRT4577_184261C.1
cggcggccgccctgagcaatgccaatggagggtgcagcctgtacggacacggtcgaccggacatcttgatccccctctcctagacgacctagggtacaaactatgatcccctgacccatacccctaccgattctcacgcctcgactgactgacaaggtaatcccggaagctaataccgcgcgcgaacatgagttggactgcaacaacgcataggaggaga

SEQ ID NO: 92400 - DNA, 2010 bp, Zea mays
  Clone ID: MRT4577_184262C.1
atctcgaaccttggttcgccgcacggcaccagaagcacggccgtgttctcatcccctccacacgtttccgcctcccgatccgcgtccgccgttagccgcggccgacacagctcctcctcctcctcgcagctcttctccagctctcggaggcccgaggtttcatcgacccgggctccttcatcctcgacacctcactcacagccgcacttgttgtccttcgtgcgtggggtgcggttcgacgcgggcggcgggatggcggcgagcgcgcgggacagcaccgatgcagcggagcgagttgtggatgaccacgacggctgggcgtcggacgccgagatggacgtggagatggatgtggtggaaggcgatgccgaccggagggacggcggcgcggatggtgatgatgagtacttgctgctcactaggataagggacacatcagcagctgaagcaagggcaggaaaggatatacaaggtataccatgggagaggatacacatagccaggcaagattaccgaaaagctaggttggaacagtataagaactatgaaaatttccctcaatcaggagagctcatggataagctatgcaagcaagtggagaagagcagcaagtattatgaatttcagcacaacactagatcagtgaagccatcaattctccattttcagcttaggaatttgttatgggcaacatcgaagcatgatgtctattttatgtcaaattccacagtaagccactggtcatcattgtctcacaaattatcagaggttcttgacttctctgggcatgttgctccagcggagaagtatcctggcagtttactagaaggtttctctggtgttcaagttagcacacttgctgtgaatgagggtttggtggtagctggtggttttcaaggagaactaattggcaaagatgtggaaggctgtagtgtaaaattctgtatgaggacaactttgagtgacaatgccataacaaatgccatagatatgcacagatcgataagtggaagcctgcacattacagtatctaacaacgattgtggtgttcgtgaatatgatatggagagatatcagctcgtgaaccactaccgatataactggccggttaatcacacatccgtgagcccagataagaaacttttggctgtggttggagatgatcgagatgctcttcttgtggattcacgaaatggaaaggtaacctctaccctagttggccatctggactactcatttgctacggcatggcacccggacagccggacattcgcgaccgggaaccaggacaaaacctgccgcatctgggacacccgcaacttgtcgacctcacttgcagtactgcggggcaacatcggcgcgatccggtgcatccgctactcctccgatgggcggttcctggtgttctcggagcctgccgacttcgtccatgtgtacagtgtggctgcggactacaagaaacggcaggagatcgacttctttggtgaggtgtccgggatcacgctgagcccggacgacgagtccctgttcatcggagtgtgcgaccgcgtctatgccagcctgttgcagtacaggatgatccgcggattcgactatcttgactcatacgtgtgaagaactgagctttggtgaccggtgttgtgctaggtgctggctgaaggttctgatgcgcggttcagggaatatatctgcctgctcttagttcatggcgaatgatggttcggtgggactcgacgccagcgaatctgccgtgtaaatagtttagaatttgaagcgtagtgtagtgctgtggaccaatgctgtctctgaacatacatatgatcagagtaatgtgtgtttgcgctgttagtttcagactccggaatacaaatagttttggaccaaattcctaaagcctgtttgtactgtggaacacatgaaagggctagtttgtattcacttcgatatatgtgttgttattattgagttcctggacagtgtttcaaatttaaacatcgtatttttagatgc

SEQ ID NO: 92401 - DNA, 372 bp, Zea mays
  Clone ID: MRT4577_184263C.1
ccctcaccttccaggtgaggggggtggtgcacaaaccaacaacgaatagcgcagccagcatcaccatggtgagcaggatggaggacctggaggccattgttgacgactaggtatttaatcttaagcacttgcttatttgtacctttacgctccacaccaatgaccttctaaagtaccacctttgcatacgctttgctgtcaagtccggaggctaccgtatcgccgactacgtcatttctgccgatttcaaggccgacaccacctataagaccacactcagcatttaaataatctttggtgatgaattatatttaaaaaaaactcatttagagcacattttttaaagacaatattattttttttattgggatt

SEQ ID NO: 92402 - DNA, 903 bp, Zea mays
  Clone ID: MRT4577_184264C.1
ccggccggggtcgctatccacccacgcgcgttgccggatcgagcttggctctctcgaaccttgcttcgccgcacggcaccaaaagcacggccgcgctctcatccccctccacacgtttccgcctcccgatccatagccgccgtgagccgccgccgacatagctcctccctctcgcagctctccagctctcggaggcccgcggctcatcaacccgcgcttcttcatcctcgacatctcacccggcggcgcggacgcgcagtgcacatcacgagccgcacggcacagccgctcttgttttccttcgtgggttgcggttcgacgcggccacgggatggcggcgagcgctcgggacagcgctgatgcggcggagcgagtcgtggatgaccacgacggctgggcgtcggacggcgagatgggcatggagatggatgtggaaggcgagttccacgaccgcgatgccgaccggagggatggcggcgtggatggtgatgatgagtacttgctgctcactaggataagggacacatcagcagctgaagcaagggcaggaaaggatatacaaggtataccatgggagaggatacacatagccaggcaagattaccgaaaagctaggttggaacagtataagaactatgaaaatttccctcaatcaggagagctcatggataagttgtgcaagcaagtggagaagagcagcaagtattatgagtttcagcacaacactagatcagtgaagccatcaattctccattttcagcttaggaatttgttatgggcaacctcgaggcatgatgtatattttatgtcaaattccacagtaacccattggtcatcattgtctcacaaatatcagaggttctcgacttctctgggcacgttgctcccggtggagaagcatcc

SEQ ID NO: 92403 - DNA, 2655 bp, Zea mays
  Clone ID: MRT4577_184265C.1
cattgggtacctcgaggccggccgggctcgaggccggccggggcaccccatcgcgttgccggatcgagctcagctctatctcgaaccttggttcgccgcacggcaccagaagcacggccgtgttctcatcccctccacacgtttccgcctcccgatccacgtccgccgttagccgcggccgacacagctcctcctcctcctcgcagctcttctccagctctcggaggcccgaggtttcatcgacccgcgctccttcatcctcgacacctcactccggcggcgcgggtccgcagtgctgcacatcgcgagccgcgcggcacagccgcacttgttgtccttcgtgcgtggggtgcggttcgacgcgggcggcgggatggcggcgagcgcgcgggacagcaccgatgcagcggagcgagttgtggatgaccacgacggctgggcgtcggacgccgagatggacgtggagatggatgtggtggaaggcgatgccgaccggagggacggcggcgcggatggtgatgatgagtacttgctgctcactaggataagggacacatcagcagctgaagcaagggcaggaaaggatatacaaggtataccatgggagaggatacacatagccaggcaagattaccgaaaagctaggttggaacagtataagaactatgaaaatttccctcaatcaggagagctcatggataagctatgcaagcaagtggagaagagcagcaagtattatgaatttcagcacaacactagatcagtgaagccatcaattctccattttcagcttaggaatttgttatgggcaacatcgaagcatgatgtctattttatgtcaaattccacagtaagccactggtcatcattgtctcacaaattatcagaggttcttgacttctctgggcatgttgctccagcggagaagtatcctggcagtttgctagaaggtttctctggggttcaagttagcacacttgctgtgaatgagggtttggtggtagctggtggttttcaaggagaactaattggcaaggatgtggaaggctgtagtataaaattctgtgtaaggacaactttgagtgacaatgctataacaaatgccatagatatacacagatcgataagtggaagcctgcacattacagtatctaacaacgattgtggtgttcgtgaatatgatatggagagatatcagctcgtgaaccactaccgatataactggccggttaatcacacatccgtgagcccagataagaaacttttggctgtggttggagatgatcgagatgctcttcttgtggattcacgaaatggaaaggtaacctctaccctagttggccatctggactactcatttgctacggcatggcacccggacagccggacattcgcgaccgggaaccaggacaaaacctgccgcatctgggacacccgcaacttgtcgacctcgcttgcagtactgcggggcaacatcggcgcgatccggtgcatccgctactcctccgacgggcggttcctggtgttctcggagcctgccgacttcgtccatgtgtacagtgtggctgcggactacaagaaacggcaggagatcgacttctttggtgaggtgtccgggatcacgctcagcccggacgacgagtccctgttcatcggagtgtgcgaccgcgtctatgccagcctgttgcagtacaggatgatccgcggattcgactatcttgactcatacgtgtgaagaactgagctttggtgaccggtgttgtgctaggtgctggctgaaggttctgatgcgcggttcagggaatatatctgcctgctcttagttcatggcgaatgatggttcggtgggactcgacgccagcgaatctgccgtgtaaatagtttagaatttgaagcgtagtgtagtgctgtggaccaatgctgtctctgaacatacatatgatcagagtaatgtgtgtttgcgctgttagtttcagactccggaatacaaatagttttggaccaaattcctaaagcctgtttgtactgtggaacacatgaaagggctagtttgtattcacttcgatatatgtgttgttattatgcgcgttccggtgcatacgctactcctctgatggacggtttctggtgttttcggagcctgcggactttgttcatgtgtacagcgtggctgcggactacaagaaacggcaggaaatcgacttcttcggtgaggtgtccgggatcaccctcagccctgatgacgagtccctgttcgttggagtgtgcgaccgtgtctatgccagcctgttgcagtacaggatgatccatgcattcgactatcttgattcatacgtgtgaaatggagctttggtgttgacgtgttgtgctcggtgctggctgaatgtcacttgttctcggtgacggttctggtgcgcggttcagggaatgtatctgcctgctcttctgcgctagttaatggcgaatgatgattcgttgggactcggacgcgagcgaatctgccatgtaaatagttcagcaattgaagcatagagctgtggaccaatactgtctgaacatatgagctgagtaatgtatgttttgcgttgttagttcaaaaaaaaaaaaaaaaaaaaaaaaaaaaaaaaaaggtactctgcgttgttaccactgctt

SEQ ID NO: 92404 - DNA, 988 bp, Zea mays
  unsure (1)..(988): unsure at all n locations
  Clone ID: MRT4577_184266C.1
tttgttactggaacattcgtgcatccgcgcaacgaacaggccttactgccttagtaggaacggaactacctacggaacgaccatcaaagagttacaggaagctaatccagagatcttaaggacacagacgaggccaggctccgtagcagctgattgggtgtgattcctaaacccagcaagattattagctggtgctaaagatcaggcagtcgtgagtctccacgaacagtggttactggcatgcatggaaatctggcaatggaaggcatgctccttagcttgatgctctggtcgctttggaggggaggaaagatgccacgcatggcgcagttgtcccgatgtgactaattccagttgaaacgtggaagtggaattgtactaatgcctgcattgcgctttcccacgataaagccatagatggcaccgacagttggagctatcagctagctctgcagtgaaattagataaaaaaaaaacaccctgcatttctgcatatgatgagcttgggaactagtagtacatgatgaatccacgatggttgtctgatctgaactctgacgacaggtggtccgcctgcaactgcaagtgccacaccgatagaggatatggttcttttccgagactgcggcaccgacgttctcgcggatcgagccttcgacatgggacgtgcctggagaacgacggcagtagggcactgcgactctgctagtctgccctctgcactgccccctttcacttttcgtgcaacatacctttgcttgctttgagcctatgacatggcacgtgccagagcaacgcatctgtccttgggtcgcttgcagctgcacctcctcctgtatgtgtttcccgcaacccgacgcgttcccggaggctccttggactccctgtggctnctgcggtcaatatcactccgtggtatatttgttaaacacctgtcggcaagatnctgatcgaccccatttggatctgtacaagtcgcgttctctgc

SEQ ID NO: 92405 - DNA, 365 bp, Zea mays
  Clone ID: MRT4577_184267C.1
ggggggcaattaaaccattccaaaccaacttattggtaattaaaactagaaaggggagggacctgaaagcctaaaaaatcccggggccaaaatggaaccccagataatgataaggcagggggggaccacacccaaaaaccccttggacgctttaaaaaaagccagcttaagccaggggaatgtctcgggagcaatcctttggggaaacactttttttccgatttaagttgaaaaaaaggagggttccctctccaaagccaaggaagttacttggggccaacattctttagggggcaaatttggtcctcccccattggagactggacaggcacaacaagaaccttcccgctttcgaacccttcctt

SEQ ID NO: 92406 - DNA, 305 bp, Zea mays
  Clone ID: MRT4577_184268C.1
ttcatgcaaacaaacaaggtatacggcggggagatgacacgacaggtgcggttgtttctcggacaccatggatccgctgaagctgtactgagcggtgatgcaatcaaacgtgactaggtgcgcaacagcgctctatgacgctgcctcccactactagatcttgcccatcaacttagccaccgccgatcacaagagccccgacctacctattcgcaacccgtttggttatgatccagctctgcatgattgtgactggtaacctctttaatcacgaacaatttgcatttacgctgctcgcaaaaaca

SEQ ID NO: 92407 - DNA, 563 bp, Zea mays
  Clone ID: MRT4577_184269C.1
gaaaattgcttaaacgactgataacgccccagtatgaagtggtatggatggtatggttcgaccccgcgataacacaaaactgacgagctccaaaggtcgataccaaccaatgtgttgattggatatcccttgtccggttgggcaactccgtattctcccactaaactgtcgtgcataccatggtttatgcaaaaatcaggccgagtgtttgatgaagatcatgtcgtcagtggtcgagtgagggtggttggccgaggaacaaaaaaacacgcaagcctggaaaaaggatgtttgatgcaaaaagtcggatgattgggtataatgattaaatcgtaggtaaaaaagatatgcgttagaatgacgaaagcagttttccgagtttccaaagggtatcgtcgaataaagttggataaagccgaggaaataagaattaatgttgggtaatcgaaaacacacgggcggtttttccggaagtgtgcccccatgttgtgcgtgtggcctccattgaatttgtgcaatggtaatggaccctgcagcaactcgccctgttgatctggaatacc

SEQ ID NO: 92408 - DNA, 394 bp, Zea mays
  Clone ID: MRT4577_18426C.1
aattaaggaacggttcagtttcaaacccttggtttcaattgagagtgcgagttccacaaacaaagggaattgctaccctaaacatatacagccacaggagcatgagaaataaaatattggacaaacatggtttctatactcagaacagattattgttagagctcaaaccaacaattagtaatcaagtattgacctccaaatcaacaaccgttacaaaatctgtggtcgttttgccggcactccactgttcgtaccaccatcattcatttacaaccatctacaggttgttgtggtagttgttaacaccggcgtaagagttataggtagtgtttgcgaccgacccttgttacacggacgacacgattgtgatgcacacggtctttagcttcttgag

SEQ ID NO: 92409 - DNA, 383 bp, Zea mays
  Clone ID: MRT4577_184270C.1
aaaaacaacggggctttttgaagccttaaatatgcacagacattatatttacaggaccaagagcagactgtccacccactttgatacactgaaaaagggctgtccacagagtcctcacccgagtccaagcgataagccacgtcctaactaggactaggagcaccctgtgccactctgcttgaatattcgaaaaaccataccttatcactctcagaacacaacacagaaaagctcagggcactacagagggagcgctgttacactacatgtagctccatcaatgggagatgacaatcccaaaaaccgaagatgccgtccggggcaatgaggggcacaatgctcagggatatgaacagacgccatatggcccccctgggggccgt

SEQ ID NO: 92410 - DNA, 360 bp, Zea mays
  Clone ID: MRT4577_184271C.1
agctgcacgcctgcaggccccggcccggaattcactggggggacaccacgcgtgctccaacctgcagggcggactcttctgtcggttttgacaatcgctgaatactagaaacgttcaagccctaaacactcagggagctcgttacatcgtaatgatagaaaatttcatgctcgagtgcagggtcgatcaactctttctcaaagctaagaatcgactacatatgtaggtagactagcttttgtgccagatgcatggcgataataaccaggctgataacattcagctgtaaacgatagcagtccgtgtccgaaatgacgatgaggagtccatgttgctcatccacgatcaccatggacatca

SEQ ID NO: 92411 - DNA, 545 bp, Zea mays
  Clone ID: MRT4577_184272C.1
agaaacagtaaaaactaatacgaattaaagtcaagcgaacatacttaacaagtcggtggaaatttgaagaaatggtgctggtgccatacactataactgacagcaaaagaatagttttagatagataacatgaacaaatagctcaaagggccctcctttgctttccttctctgcttgaatgagaatagcagcacatcactgcaatctgccagatgagcaacaactacctaacaggctaacaacagccaattacatgatccatccactccattcatttgatttcaacttcgtgccggcttctccaacactgcagagaggtacatcgccggctttgcgctccctgttccggccttctctcccgttacccatttgagcttcttgtaaccaaacctaccaattagcctgacgagcagctgcctccgttcatcgctgtggcacacgtagctgtcaatccagagcagcccacgggcgcgcagcacccggtcgacatcaaacatgaagaactcaagcgcttcctccgtcccggcctgacccagcgccggcga

SEQ ID NO: 92412 - DNA, 210 bp, Zea mays
  Clone ID: MRT4577_184273C.1
ccggccgtatcgatcaaatataattttagaactaaagctcttccaaacatccatgtctctacccatctggccatctcagtctcttcgtctattcttctgtattaaaataccttaaataaaaataagtgctacttgaggatcttcgtacctcaataacacaaaataaacaaaaaaaaaaaaaaaaaaaaataaataaatagaaaagcgtcc

SEQ ID NO: 92413 - DNA, 292 bp, Zea mays
  Clone ID: MRT4577_184274C.1
cttcctcccccgtctgcccgagcttctttgcccagccgatcccggggcgttgcgtccccacgcgcccctccccaggcgacggttctcacccagttccgccgccccatcgacgggttcgcaccagtccagccgcccccgcagcggggcgggagcggggccgtttggacgctttgccgctggcttctgccgaccgtgtctgggcgttctgacccctgcgctttatgcgcgcgggaagctcgggccttggtgcttggggcgctcgcgggcgccggcccgcctgcctgtcccgctg

SEQ ID NO: 92414 - DNA, 207 bp, Zea mays
  Clone ID: MRT4577_184275C.1
atcaccatgcgctgcaccgacaagagcggtccccagagcatggggtacttttcacatgatcgccccaagtatctaggcccgtactccgagcagacgccgtcgtacctgaccggcgagttccccggcgactacgggtgggacaccgcgggcctctcggctcgacccggagacattcgcgcgcaaccgggagctggaggtgatccactc

SEQ ID NO: 92415 - DNA, 293 bp, Zea mays
  Clone ID: MRT4577_184276C.1
ggcccatcacaatagtttggggttaaacagaatgggaatcgggacactaacactaggcggacccagagctgggggcttcccgcactgcgcggggtcttgggaatctcgatctttaagccccaagccttacccgcataatatgcataggctggggctcaaacccgggacctttcggttacagacgggagaattgggacactaacactagcatacaaaacctgattcgaggggaacaaggggggcaaatgaacacattacctaaactgagggcgccggctcaaaaaaccctaaat

SEQ ID NO: 92416 - DNA, 484 bp, Zea mays
  unsure (1)..(484): unsure at all n locations
  Clone ID: MRT4577_184277C.1
tgtgcggcgctcgagccgggcggctcaaacaagagctccacgctaccgatgccaagcttgtgggcgcgcaatgagactcgtgtcggcctccgcgtcctcaccaccgccgtcgcggcgctgcccaggaatgggcagtagcgggcgtcgtcgtcgttgttctcctcctcctcctcttcctccttcctcgtcggcaagacggtgatgaggcaggccgagggacgcagcctcgtagttcgacgtgcgcgccgcggcggattgggactgcccgatctggtctanctccagggcccctacgccgtggatcgagggttagcattgccggagactgtcggatgtgccggataacgtgacgtgtctcacgcagggagcgtggggggaaacgcggtggcggatgtggggagtggcccgggtgctgatcccggaggcgctgaccatggtcgggctgatcaacgcgccgaagtgggacgacgtccgcaagtcggag

SEQ ID NO: 92417 - DNA, 408 bp, Zea mays
  unsure (1)..(408): unsure at all n locations
  Clone ID: MRT4577_184278C.1
aacgcggcggaagcttgtatactctacaccctccctcctttttatctttttttattagcaatcacttcactttatataggccattgtcttacaaactgggcgcttctaacangcctaaactttataaataaataaaccaaactaagcacgaagctctcattacgttttccaaaaacaagacaccacaaactactaattacatttgcaaaccaaatagagatgctagctcgacacagaaacttttaaggttgctgctgcctacagaacatcaaaccccccaatccttaaaaccctatttaccatgctgatgcaaccaaactaaaatttctgtcaatgatttacataacattcattgctcgtaccatccaattccgcaaacagatcttgtcaatcaactcctcttggaac

SEQ ID NO: 92418 - DNA, 1370 bp, Zea mays
  Clone ID: MRT4577_184279C.1
aacacaggcaaaataaagggccattttttgattttttttttttttttatatttaatctttggcaaattattgagttggattggaaaacatgaaacatacatgcatgctgcatgtgtatacagaaacttcacaccctgatgagcagctagccaaatgacatcgaccagccaatgatgaacatgtcgttttctctgcacacattaattacgaccgatcgacttaattggatcagttgacccttctgcagttggtgcggacttctcctctggacgggtccgtgagcggcttgatgttccccatgttgatcatggactgcgcgaagctcgcgaagaagtcgtcttggctggccgcgaactggtcgacgatgggcgccgtggtgccctgcgctaggggcgacgacttgagctcctggtcggagttgaggatgcctcggttcacctcgatgttggtgtagtagttgttgtcgaaggtgtccggggtcgtcgggtccaggtcgttcagggctgtggggtcgccgttcctggggcatctctgtgtcaggaaggctcggtaggaggcgtccagcgtcgggtcgggcatgttcgtcccgctgaagttgtagagccggtccgtgatgaacttgcattggacccggccgaacgtgtgcccccctgaaagggcgaccaggtcgacatcgttgagactgaggttgctgaacttctgctgaagtatggtgaggttgtcggtgggctctgggaggtccagggatccgttgaagtcggaggtcttgctgtccagcctgcccagaagcacaccccagctggggcctcccgacagctcgactgagatctctgcggcgatggcgaggatgtcagcgcaggagacaacaccagggcaggcgctttccagggcagccttggcggcgtccaccaccccgaacccgcgcgctgagccgttgttgggcgccgacgtcttctccgacggcatccccgggacgctgtccagcagaagcgaggcgtcgcagccctggacgaagcagtcgtggaagtgcaggcggatgaggctggcgaagatgcgggtgtccgactgcactgcgtcgacgagcacctgcttcacgatgtcgtaggcgtccgggcaggtgctgtcatagtagtcctcgcacagctgcgccgtcgcgccatggaagcacgtcgtcgtcatcagggccaccgccaggaccacggcggcggcggtggcggaaggagacgacgacgaggaaaccatcgtcacaggccaggagcaccactgctagctaccctctactgtgtctcgtcgaatgtgagccactgcaggacacgacgtacgatcccggcccggccggcctcgaggtacccacgatctcagctatatgg

SEQ ID NO: 92419 - DNA, 393 bp, Zea mays
  Clone ID: MRT4577_18427C.1
aaaaaaaaaaaaaaaaaaaaaaaaaaaaaaaaaaaaaaaaaaaaaaaaaaaaaaaaaaaaaaaaaaaaaaaaaaaaaaaaaaaaaaaaaaaaaaaaaaaaaaaaaaaaaaaaaaaaaaaaaaaaaaggggcgggccggttttgagagagaaccaagagtttaacttcccgcgggcttgcgaacgtaataattttttttttggtggccccctaaaattaaattaattgggccggggtttaaaaacgtggggatgggaaaaaaccctggggttcccaaattaaatccctttgaaaaaaatccccttttccccagttgggttaatagcaaaaaggcccgccccgatcccctttccaaaaatttgcccaccctaaatggcaaagggaaccccccttt

SEQ ID NO: 92420 - DNA, 414 bp, Zea mays
  unsure (1)..(414): unsure at all n locations
  Clone ID: MRT4577_184280C.1
gtaatcccctgtcatgatctctctgtctgcaacttaactaactcttctggcgtatgtatgtaaaaaaaaaataaaaaaaaaaaatgttttttctcacggcacggccagtctagaaagtcaatgtaatcccctgtcatgatctctctgttgcaacttaattaactcttctggcgtatgtgtgtgaaaaaaaaaataaaaaaaaaaagtgttttttcttacggcacggccagtcgagaaagtaagtgcaatcccctgttatgatctctctgctgcaacttaattaactcttttggtgtatgtctgttaaaaaaaaaaagagaaaataaaaacgtcttttataacggatcggtcagctgataaagntagggcaatcccctggcatgatttatctgctgtaacttaattaactttttt

SEQ ID NO: 92421 - DNA, 370 bp, Zea mays
  Clone ID: MRT4577_184281C.1
acccccaaaaaaataaagcccttcacccccaggggtggttcccgaccaaagccctttggtccaggggaaaaaaaaaccgaacctttaattccctcccaggggggcaacaacaaaggccccgggaactaaagcagttaaagtcccaacattccccaaaggggggtaacggaccccgggtttcaagttcggaattaatccgcccagggaccaggcaccggggggggggtttttttttttcccccaatggggggggaaaaacggcccttgtcccccaattttgggggggggggggggcatttcccccctttgggctataaaaaaaaaacccgggggggaaatgggccccccccgggcgggaaaaacttttttt

SEQ ID NO: 92422 - DNA, 654 bp, Zea mays
  unsure (1)..(654): unsure at all n locations
  Clone ID: MRT4577_184282C.1
aacacaggcaaaataaagttccattttattgcacatttctggtggacttcgagaacaaactatatttaatttataatttggcaaattattgagttggattggaaaacaagaaacatacatgcatgctgcatgtgtacacagaaacttcacacgcaccctgatgagcagctagccaaatgacatcgaccagccaatgatgaacatgtcgtttctgtgcacacattaattattacgaccgatcgacttaattggatcagttgacccttctgcagttggtgcggacttctcctctggacgggtccgtgagcggcttgatgttccccatgttgatcatggactgcgcgaagctcgcgaaggcgtcgtccgggcttcccgcggactggccgacgatgggcgactgcatgctctgtcctagggagcacctttggttcacgatnngtcgtaggcnngtnccgggcagnngtgctgtcnnatagtaagtccctcgcacaaagctgcgccgttcgcgccaatggaagcacgtcgtcgtttcgtcatncagggccaccgccaaaggaccacggcgnngcggcgggcgatggcggngaaaggaagacgacgacgaaaggaaaccnnatcgtncacaggccagnngagcaccannntgcctagcta

SEQ ID NO: 92423 - DNA, 205 bp, Zea mays
  Clone ID: MRT4577_184283C.1
cctggtgattacctcagcgaagaaccgtaccagaacaactacattatcagatgattccaacaatcaatcaagccgttgcagcgaacctagctgcttaccttcagacacaacaatcttttgcatcaaatcaactagctggggtgaaccctgctgctaactcgccggcacaacctctgctaccattgaaccaacttgtaaggagctc

SEQ ID NO: 92424 - DNA, 441 bp, Zea mays
  Clone ID: MRT4577_184284C.1
atcgcactaacacacttttttattcaaggatccaacttttataaaaaacccattttcttaccaataccaaaaaaatttggtaatagcaattcggcgatgatttattcttcactcattttaaccaacatccgaagagggcttcactagagctaattttaccacacaaacaaaaattagcttaccacaagggggtttgattggtcctaccaaccacattattcgcttcatccatttaacaatttagctaacaagaataatagaccagtttaccgacccaaaccaactaaaaaaataacaacctagcttaccacaccttagggcagattttacaaaaaccacgacgatcacgggtttaagcttaacaccaaacacctaacaagggggacttactcactttactggggacaccatttagctttatatgccaatcgtttacttcga

SEQ ID NO: 92425 - DNA, 663 bp, Zea mays
  Clone ID: MRT4577_184285C.1
cgaggccggcccgcgttcaggcgcgctctctttagccggcgacgattgggcgagcggcgccactcaacgccaggtcttcgtgaaaaccatcgccggcgatgagtttcaaccaggaaccattgatgcaaaagagctcaatgttgccatgagagccttgggatttgagatgactgaagagcaaattaggcaaatgattgctgatgttgacaaagatggcagtggagcgatcgactacgaggagtttgagcacatgatgactgccaaaatcggagagagggatagtaaagaggagctttcaaaagcattccgcattattgatcaagatggaaatggaaagatttctaacattgatatccagaggattgccaaagagctgggtgtaaatctcaccctcgatgagatccaagacatggtgcaagaggctgatagaaatggtgacggtgagatagactttgacgagttcatcaggatgatgaggaggaccagctttggctactaggtgtatttatctgcgagtgcttgacgctgccagtttgtttatgactaccgtgcgtgtgttaatcgactggtgttgttactatgaacaataatgttgtgttctggtttcgcttttatatataattttaatttaattttaataaaaaaaaaaaaaaaaaagcgggc

SEQ ID NO: 92426 - DNA, 483 bp, Zea mays
  Clone ID: MRT4577_184286C.1
gaacataccccgcccacgaccacactgagcgagcaaataacacacgtgcgctcgcctaggactaccgactacgaacactggtcaggcacgcacatctcatcatggcgcgcatgtggctgctgcgacattcctctcggtatgctgtctctgtgtcatctgattaatttgccgattctttgagtaggcgtctcgtcacataatgcgtaggcggctagtcacatgcatacatgtacgagcaactcctcgacagatggactgctgacgacacttttggcaccgcgttctgctacatagacccggatacaactttctacttcctcgttgctgtgagtgaacagactgtcacatatcccaaacttcggaactaacaataccccccgtggatttatatgatatcgatagctcgacagctaagaatgctagctgaaaccaaaaccaaagcgaactacgagcatggaatcctcggtactgccggctttatcg

SEQ ID NO: 92427 - DNA, 991 bp, Zea mays
  Clone ID: MRT4577_184287C.1
gtcaagtactccattgaactcctcccttccgtcggccggtatgtcaatattttctcacgcgtcacgccgcccctccgccctcccttttacgcggttacccctaactcccagctctctcgttcaggcgcgctctctctagccggcgacgattgggcgagcggcgccactcaacgccaggtcttcgtgaaaaccatcgccggcgatgagtttcaaccagtctactgtcaaggggcaggccaggagggagaggcctagggctcgccctcatggcctgacgcagcagaggaggcaggaaataaaggaagcttttgatctgtttgatacagataactctggaaccattgatgcaaaagagctcaatgttgccatgagagccttgggatttgagatgactgaagagcaaattaggcaaatgattgctgatgttgacaaagatggcagtggagcgatcgactacgaggagtttgagcacatgatgactgccaaaatcggagagagggatagtaaagaggagctttcaaaagcattccgcattattgatcaagatggaaatggaaagatttctaacattgatatccagaggattgccaaagagctgggtgtaaatctcaccctcgatgagatccaagacatggtgcaagaggctgatagaaatggtgacggtgagatagactttgacgagttcatcaggatgatgaggaggaccagctttggctactaggtgtatttatctgtgagtgcttgacgctgccagtttgtttatgactaccgggcgtgtgttaatcgactggtgttgttactatgaacaataatgttgtgctctggtttcgcttatatatataattttaatttaattttaattattgatgcgcccgcttaggtatggtaacttttatatgtatgatatgccccagatatttggccgcagtgcccccccatccatggtgtggttgcaaatatgagattgatgcaaggtaaaatggttcatatt

SEQ ID NO: 92428 - DNA, 535 bp, Zea mays
  Clone ID: MRT4577_184288C.1
gctcaacgggctcggacgcgatcggagggtggcggccagcgtggccctgctgagcgacgatgtcaagctcgaggtcgcgaaccaccccttgatcagcaccgactacatgacctacatgtgcaagtacaacactgcgcacgggcagaggaaccaccatgaagtcaaggtgaaggactccaaaacccttgtctctggtgagaaggaggctgctgggatcggctgcacgaaccctgaggagatcccgaggggctcggtcgacgctgattatgtcgctgagcactactgcggtggacactgaccacgagaaggatagcgctcacttgcagggcggcgccaccaaggccgacctctctgataatatgaaggatgccgccatgtacgccggtggcggctaccacaaggagtatcatggtggacagtaacattgggtacaatgctacctgaagagccaactgacttgatgctgtagggaaggtcatcaatgacaaggtccatgtccgtgagggtctgatgaccactgcgcatgacattactg

SEQ ID NO: 92429 - DNA, 1040 bp, Zea mays
  Clone ID: MRT4577_184289C.1
cattgggtacctcgaggccggccgggtcccttcggaaaattccatattttctcacgcgtcaccccgcccctccgccttcccttttacgcggttccccctaactcccagctctctcgttcaggcgcgctctctctagccggcgacgattgggcgaccggcgccactcaacgccaggtcttcgtgaaaaccatcgccggcgatgagtttcaaccagtctactgtcaaggggcaggccaggagggagaggcctagggctcgccctcatggcctgacgcagcagaggaggcaggaaataaaggaagcctttgatctgtttgatacagataactctggaaccattgatgcaaaagagctcaatgttgccatgagagccttgggatttgagatgactgaagagcaaattaggcaaatgattgctgatgttgacaaagatggcagtggagcgatcgactacgaggagtttgagcacatgatgactgccaaaatcggagagagggatagtaaagaggagctttcaaaagcattccgcattattgatcaagatggaaatggaaagatttctaacattgatatccagaggattgccaaagagctgggtgtaaatctcaccctcgatgagatccaagacatggtgcaagaggctgatagaaatggtgacggtgaaatagactttgacgagttcatcaggatgatgaggaggaccagctttggctactagatgtttggctgtagtgcccgacgcatcgtcgtgtggttgcgaatatgagcagtgaagccaggtttatgcatccgggggctcaagttggatcatcgacagcgggtgcacaaaccacatgacaggggagaagaggatgttctcctcctacgagaaaaaccaagattcccaacgagctatcacattcggggatggaaatcaaggtttggtcaaaggtcttggtaaaatagctatatctcctgaccattctatttccaatgtttttcttgtagattctttagattacaatttgctttctgtatctcaattatgcaaaatgggttac

SEQ ID NO: 92430 - DNA, 707 bp, Zea mays
  unsure (1)..(707): unsure at all n locations
  Clone ID: MRT4577_18428C.1
cctataggggattccggccggggacgccggccgggagccagatcctcaccatcaccgcagctttctgtcactattcgcccgggctttgttagagatcccttctttgttaacaattccaatttcgacgtctgaaggttttcgccatgtctcgtcgttacgattcccgaacaaccatcttctcaccagagggccgtctttaccaggtcgaatatgctttagaggctatttcacatgcaggtaccgccattggtattctggccaaggatggtattgtcctcgccgctgagcgaaaggtcacctcaaagctgttggagcaggacacttccgctgagaagctctacatcttgaacgataacatgatctgcgctgttgctggaatgaccgccgatgccaacatccttatcaactatgcccgacaagccgctcagcgatacctcctcacctacaacgaagacatcccctgcgaacaactcgtacgccgactctgtgacttgaagcaaggctacactcagcacggtggtctacgtccccgttcggtgtgtccttcatctatgctggctgggatcctcgacgacaattccagctctaccttagcaacccttccggcaactacgnntggctggaaggccacaagtgcaggtgccaacaatgcaagcgcgcagagtctcctcaagcaagactataaagaggattgcacttttgaggag

SEQ ID NO: 92431 - DNA, 206 bp, Zea mays
  Clone ID: MRT4577_184290C.1
gaaaactgtatcatatttagtggcacctcagattgaggaaaaatcaaaccctggttgtcaaatactcctattgacagattcagattacaatgttaatgtcaattttcgaaggcaaaaaaaacaaaaaaaaaaaaaaaaaaaaaaaaaaaacgactacagctctaacaaatccaaggtcacaggactcctgcattcaagttcatata

SEQ ID NO: 92432 - DNA, 464 bp, Zea mays
  Clone ID: MRT4577_184291C.1
gaggaacccacctggacgcaccaccgtcccaaaagaatctacactccaacaccttttttttctcctaccccacgtgcgacagaggggagttatattaaatcaacgcccacctacagaccctcttccttacaatgcatccaattctttctacgccacgaacaaatataccgatacattctactgtgctactcaggtcaaaaaggctcaactttagaacccttctggatgaaggatcaactcaacattatgatacagctcacaacgatcatcactgttttatcttattcttaaaacacgtttgattttgctacatgaaaactgggggagtatatcggattttgcttcatgaggacttacctttgatgaatagtgtagggaaaactctagaaatgatatcatcatcgaaccatgtacgccattccaccacattgaagaaccatttgaggatactttaaaatatacct

SEQ ID NO: 92433 - DNA, 325 bp, Zea mays
  Clone ID: MRT4577_184292C.1
aggggttaatattataactagaaattctttaaacccttcgtacaaacaatcttaatataaaacctgtttcaagacaaaaacttaaccccaaaataaaacacatacccattacaactctataagatcaaatcataagcaatttcatgttcacacttcattagaaacagaactagcaaacaaacaactggggaacagaaacctactgtcaagcctaatctcccttgacaggccttttaagttctacaccaacaaccttttagtaaccaccgggaacctccatgagcattccaagatcgaacttggaaaccttcacccatattttacc

SEQ ID NO: 92434 - DNA, 559 bp, Zea mays
  Clone ID: MRT4577_184293C.1
aaaacacaaaagcggacaaaatatgttattaccatagcagaggggcagaaaattcttggaaccagaagacacaagacataaaggctcatcgaacaccgaccactacacctgtgtcctctctgtacgcgtgattccacctaccatgacgctactaccgtctggacaccctagcatttggcatggtcgactacaatccgcagcacacgccgctcttgggagagcacccaaccgtgcattaccaagcagcaaacaccatctccccattgtaacccgggtgctctactgtcacatgactcctatcatcatctactcctcactctagcaccccacttgtctataaaaccccaactatctgactcaagtactatatcggtcaaagcaaatgacacaactgataaaatgctttgtaccaaattgtacttaagattattacctatgttatcaacgactaacgagcaaatgacaacaacacaggtaataatctataagtaaacagtgagtgttacaacataaactgactccagcttgcaccatatgaatcaacgagaggctatctgcg

SEQ ID NO: 92435 - DNA, 1101 bp, Zea mays
  Clone ID: MRT4577_184294C.1
cgtggctggctttattcatcccgtttggtgctgctgtttcctgcatgtgtttatccgcttgcgaaaacgcaagtccttttcatgtctctgtccagtcgtgtggtactatctggtaaatgacaaattgttcgaaccaaaaaatgagcaagcggacggtccggccctgaggtcggacggtccgcggtccggacggtccgcgcctgtgggccggacggtccgcgcgtgcgcagaacagattagggttccgagttttgtgctacggttgttagctatattcgcgggattagctcggaatcagttgtgtaaagggtccagcccccctcctctataaatagagaggtctacggccgatttgtaatcatcaacaatcgaatcaatacaacttttattcgcatctatcctaggagtagttctagtctagtttagttttagcctctcaatccacaaattctgcgcctctcttcgactctacgccgattggaggagtctaggtcggccggtccgagcctagacaacccctaggatctctcctccccgacggggtccctcccgggagcgagatccaggccgccgccggcgacttccgccgcccctgcgcacgcgcggactgtacggcctcagggcgcggaccgtaccaccgtcaggtagaggcagaggatccaagctcctgcaccaggtcgcggaccatccggtcccaggccgcgcctgaccagagagcaccgccgcctcgcgccaggtcgcggaccgtccggctccgtgccgcggaccgtccgcgcctgaccagagagcaccgctgccggttcttctttagtatttgacgctcggaaaaggcgtcaacagctggtgagccaggaaatcagagagaagcggccatgggcgcggcaagctggagcatgacgtggtgacgggcgtgtatggcgtggcgtgacgagatcgcagtgacgcgccacaatgaaggtgtcgacgtcgtctatatccaagaacacggcgaggtaggaccagagcagcagcacgtcagggctgtaggcaaggacacccaacgagagagaagcacggccggcacaacgaggaagcaaggggatgcgagcgctgcaaataagc

SEQ ID NO: 92436 - DNA, 1078 bp, Zea mays
  Clone ID: MRT4577_184295C.1
ccgggattaaccggaagaagcagagtggttcctttaatatcgagcaatctgttgatctcttaagtcttgtctgggagcactggacaatgggaacaattgtggagatcatggatccatctctgagaggcaaagctcctgcagaacagatgctgaaaaatgtccatatcgggctactgtgtgttcaagataaccctgttgatagaccgaagatgtcaacagtaaacatcatgctcagcagtggcactatgcctctccagtctccattaaagccagcattcttcattcccaagagcggctactactcaactgttcattcagaatcatatcctatagcttcccgatccgtcgataatggcaagccaggggcgatatcaccaaacgaagtgtcaattacagagctggaaccaagatgaggccatagtagttggacatggttgtttgttgtagcatctaacacttgacgctagtggctaaggacttttttacccaggcacatggggtgacagtttagccttagaattgattgtcattagtgcttgagatcttttttcccttttgttcgaaccagaaatgagccggacggtccgcgcgtgcgcagaacagattagggttccgagttttgtgctacggttgttagctatattcgcgggattagctcggaatcagttgtggaaagggtccagcccccctcctctataaaaagagaggtctacggccgattaatcatcaacaatcgaatcaatacaacttctattcgcattttttccttaggagtagttctagtctagtttaggtttagcttcccgatccccaaattcttcgtctctcctcggctctacgtcgattagaggagtctaggtcggccggcccgagcctagacaacccctaggatctctcctccccgacggggtccctcccgggagcgagatccaggcgccgtcggcgatcttccgtcgtccctgcgtacgcgcggaccgtccggccccagggtgcggaccgtccggccgtcaggcaaacccggccgcgtacccccccgcggaccgtccggcccctggccgcggacagtccgcccctgcgc

SEQ ID NO: 92437 - DNA, 385 bp, Zea mays
  Clone ID: MRT4577_184296C.1
gagttcttaaggaatccatactaggaagtttattactacataacatcatagaagcacctagactatcgagtgcaatgaggccattttcccatgcgaaaagcatcagggttctcctccattgcctcctttgcatggtgtgcacgctcaagcttcttctccttaccctccctgcattcagcaacacacctcatttcctcctcttctacatgttgttgctcgcccacaagctcctctcgtcttttctctatcctctccttgtccactgcatcccacttcttaagattctccaatcactccttgtctttctagtagatttttatgttaattcacattaaattcatccagggctgagcaatcggtggctcaaatgcatagttagcacaca

SEQ ID NO: 92438 - DNA, 694 bp, Zea mays
  Clone ID: MRT4577_184297C.1
cctcgaggccggccgacccgtcatgttctactgctccttccgtttgtcgtctcgtggctcgcgtctcacgactgcagaatcgccaaacaccagcagcggacgaccacgctaactctaggtctacgatgaaggcatggggggagtcaggatgacggcatggacagcccatgacgccgaggaggtctacgtggccccctctggatccgtgcgtgccgaccggcgcgtcgggccgatgtcctgggacgacaccgtcgccgcgtacgcgcagagctacgcggcgcagcgccagggcgactgccagctgatccactccggcgggccctacggcgagaacctcttctggggctccgtcggcgccgactggtcggcgtgcgacgccgtgggctcctgggtgtccgagaagcagtactacgtaccacgacttcaacagatgtactggaggggcaggcgtgcgaccactacacgcaggtggtgtggcgcgactccgccgtacatcggctgggcccgcgttgtctgccactacaacgccggtgttttcatcgtctgcaggtacgatccgccggcgggctgactactacgtaagtctctactagactgctgtgcatagtactagtatgtcgatagacgcttcatattaacttcatgatgcatgcatattataaatagagttgtgaactctgtatagtattatatt

SEQ ID NO: 92439 - DNA, 2274 bp, Zea mays
  Clone ID: MRT4577_184298C.1
agagaagtctgcagaggaagaaaagagagcgaagggggttaaaccgcggcccgcggaggcggaccaaagcacacgccatccatccctggcccgtctgccgtcgcagtcccagtcgccctcctcttcgtctgtggtctccaccccgcgcacacgcacagttcgtcgacgcgagcgagggccagccgtccagggcacggaagtgggagcccgcagcttctcgtcggcggggggtgggggctgaggtgagccactcccctccccgcttattcggatcctctctcgcccaatcccccggtcgcgggagtgatctagtggtttcgtggtctgcggcgcggcggggcggggttcgagatggaggacttgctgaacacggagatcgggaagaacgactatgactggcttctgacaccccctggaacacctcgtgatcctacattagatgctgctgagaaagctccatcaccaattgtgactaaacatactgttaccagatcatcctcgacaactagagcatctaggctttccacttatgagacagagaatgggcatttgacatttcccactaggccagcacggagtatatctgtctcttgccgggcagttcaatctacaccaaacaacatcaggtcatcaatcctcaatgcaaacatttcctctgttaattcaagatctacaacccaaagcaagcggacagctactcttactgcatcaaagccatctgttgcatcgtcacgtccagtgccaacacggtcttctacacctgtcgaagcccgtctgtctacaccaacccatactcatccacctactccagtgaaaaagcgtccttctgtgtctaactctatggccaactccgctgttcccaagaacacgtcagcaccatgctcaagatcatcaactccaacctctcggtctcgaaccttgtccagtccgtcttcaagcagtacaagcacagtgagccgtcccagctcatcctctggtaaagttcctacaattagtcgtaccagttcttcatcaagtacagttccttctgtgagccgttctagctctaggtcatccacacccactcgtcagcctgcaatgcgttcatcaacaccatctgctgggcggatttctggcaaaagtaacatgacatctagtggcagacccttagccagcagtggtcggagttcagcaccttcatcagcgccatcatctcgtccaagttccccaaacacacgaacacgagctccagttcgcccattagatattccagattttccaagtgaaactccaccaaacttgagggctaaactgccagaacgaccactctctgctcgtagagtacggccaggtattacttctggtgtcaggtcaaccccaaatcctgaaccggtcctctcagtcactgtaaaaaagatgtctgtacctgctattactcgaagtaagttctcagatgtacaatcaaagacatctcttaccaatagtcaccaaagtaggccgagcgaaagatctcttttggaaggtcaaacaactagaacttcgcggtctgtcgcagctgcagacaatggattcggtaggacgatatcgcggaagtcacttgacatggctatcaggcatatggacattcgacaaaatttgggtggcatccgtggtgcatctctattccctcatagcattcgctctactactaccaagagccggccagctagagcctcagatccaggccattgcatctcaaatggtgaccgatgcttcacagataacggcagtagcaacgggcacttctctggagattctaatggcactctttcacacaacggcggcagctcaattggttcccctgatagtggaaaaaaagaggttctgagtgaactggatatatatgccaattcacgatacgatgcgatgttgctgaaggaggactccaagaacatgagttggttgcacagcgtggacgacaagtctgaccagagcccagtgtttgatcataggttcgagccgctccctgagccattcggtccgctatgagctgtttatactagtcataaagattccactcgctttgttcgtcacttgctgttaaaggttttatgcttgtctctttctgtttggcccatctcccccatcttttttatagatctgctagggcagataaagatcgtggggtttgtacttgttctcctttgatagctggagtctcgatttcgagtgacttgtgcgggaataacatatatactcaattcccatccttggctatcattttgattcggcctaaagtttaaactgaaaacaaaa

SEQ ID NO: 92440 - DNA, 1213 bp, Zea mays
  Clone ID: MRT4577_184299C.1
acgcccacgcgtccgcccacgcgtccgcccacgcgtccgcccacgcgtccgcccacgcgtccggcaagatcaacgtcgtcgttcaagccagcggtagtagagactacgaccgaggctagctaagctaagagatggcggatcaccagtactcggcgtggacgacttccgctgctcgtcatcgggtcttctcctgtgcgctcatggctcttgttagttttgtggctgcaggacgacccatggtgctcgccgacgccatcgtctttcacgtggcgaacaggtgcccgttcccggtgtggccggcgtccgcccctaacaccggccacccagtgctcgccggcggcggcttctacgtcccgcagggcaagtcgaggcgcgtcgtcgcgccggccaactggaacgggcgcttctgggcccgcaccggttgcaacttcaccgcgaacggcatgggcgtagcgggctgcctcaccggcgactgcgagggccggctcgcctgtaacgggtccgtgggcgccccgcccgccacgctagtcgaggtgagcctgcacgaggacgccccgaaagggagctcctacgacgtgagcctggtggacgggtacaacctccccgtcgccgtctccgccaagcccgccacgggcggcgcggacccgaacaagtgcgccattgccggctgcgccaagaacgtgaacgcggtgtgcccgccggagctgcaggtgaccgctaccggcagcggcggcggcaagacggtggtggcgtgcaagagcgcgtgcctagcgttcgggctcgacgccttctgctgccgcggcgcgtacgcgacgccggccacgtgccgagggaccgtgtactcgcgcctcttcaaggacgcctgcccggcatactacagctatgcctacgacaccgccgccacgacggccagcgggtgctacgcgcaggagtacatcatcacgttctgcccgtccagatggggcgacgagcccggggatcgtgctgctcagatttgaatttggtgtcgtcatcgtcagtcaggcaattaccaatcaccattgcgtcgagcttttcgcacgtctttatgtatgtgtgtacgcttgtgtctgcttctagtgggctttcacataaatttctacatacatatacacatacaacaataaaaaataaggtagtgctatttatcggccgcgtaaaatccgggataaatttgataaacaaaaaagcgtat

SEQ ID NO: 92441 - DNA, 512 bp, Zea mays
  Clone ID: MRT4577_18429C.1
ggccgacctttattttttgttttttttttttttttttaggctgaggaccatcggctgtttgtgtgtttatcttgtatgaaccaaatacacatcacgttgagagatagtgatcactgttaagtgtaactagacaaacgcttaatcagcttagggttggagtcacccatactagggggtgtaggtaacatgccatactgattaaacactgctaaggccctgaacaattgaaactctgaggatccataaattaatcaacctgatgcattaatgatacagctgatgtgtgttaaagatatgggggtttggtttggagtgtgataagttgtgcctcacctcatacactattgggctatggacagttttattttttaccatgcccggcgtaatagaaataggtgccccaggtcactgttgctgtcgttcttgacatacctacagatggacttgtccgtgaaggtgccctactccttgggccgcttgagggtgttggtggactccacccacttgacgtt

SEQ ID NO: 92442 - DNA, 1147 bp, Zea mays
  Clone ID: MRT4577_1842C.1
aaaaaagagcttgcttcgccacttgttttgacccattgtttaaacgagagcatcatcgtgtttatgggttaatgccacacaaatacattacgctcatgcctcatgatattttacacaattctgcttcacgtgataaacatttcttaacaactactaatgaggtcacaatattggaggaggctggtgatcaatcctagtggcaagcttagtttaaacgaattgtcgcgtcaaagcagaattctttccctggctcaaatgctgcttcaagttcttcgtagctctgctgaacactctgctaacttgatgcagttaggccctccttcaaggcaacagtggggaaaggaaatccggcatattccataatagttatctgatggccacagttggtgagcttgtcattcatgctgatctcatcaacattgtattcttgatcatggcgcttcaatagattcaaaagttgaacctccctacaagatgcaaattcaaacaaaacatcacagaagtacctcatgcagtccaaaatccaaatatttgaacaagaaaaagtaggaaaaggatactctcgatgcattgctacatctgcatgttgctgagcttagcgagcttgtcaaggagtatgtccttgctgaactcgatgttcatagccgcccgagtagcacgaagaatagtgatcgtcgcgcagatcttcggggccttggaggaagagggaccaacgaagcctagacaaaagagtcacaatatgatatcctcgcttacgtgctgcccgatggccatcttgacacgctacgtagttgttgtctcgagttttgctgcccccaaatggatatctaatcaaaataatttaaggttagtaaaatcattgatagaaggtataaacatacttactgtgtattttattccatcgtgaggatcatttagtcaggcaagtgcagaatctcccaaaaaaagggtgtgccttatttatgctgattctatgatgtgcctgattggcagaactcccagagcaacttccagactgaattcaataggcacaggtgtggtaattctatcctctaagaaaaataggaaaataatttaataggtacctatagcatcttgtcctctctgaaaaactcctccaatatatggcattttccggacgcgtggg

SEQ ID NO: 92443 - DNA, 404 bp, Zea mays
  unsure (1)..(404): unsure at all n locations
  Clone ID: MRT4577_184300C.1
tcccctcctaccttatcctctcagttgttcaccaccgcagacaagtccagtcctctccctcccctcaacctagcgccaccgcttgcgcccaccacgccgctgcaccgccgctggtgaacggattcgtccatcccatacatcggcctcggcctcctcctccctcccctcaacctagctccaccactcgcgcccaccacgccgccgcactggggggggggagcggatccgtccatcccatacaccagccatgtcctcctcctcactcccctcatcctagctccgcctctcgcgcccccctcgctggcacaccccgccgccggngttctctcctgcctctggggtcgnngatccgcgggctggtcctcttcggcctggcctcccgggcctccgcgggtgcgcctccc

SEQ ID NO: 92444 - DNA, 301 bp, Zea mays
  Clone ID: MRT4577_184301C.1
ccccctaggcggtcggctgtgccaagatgaagctgaatatctccttccctgccactggctgtcagaaactcatagaagtggatgacgaacgcaagcttcgtacgttctatgagaagcgcatcgccacagaagtagctgctgatgctcttggtagaagagtggaagggttatgtggctcccgatcagcgctgggaatgacaaacaaggttttcccatgaagcaaggcgttttgacccatggcagagtgcgcctgcttttgagtaaggggcattcttgttatagacctaggagaactggagag

SEQ ID NO: 92445 - DNA, 663 bp, Zea mays
  Clone ID: MRT4577_184302C.1
cgcttcatcgccatcaagaagtcaagaagcacggcggcgacgcgcccagcaacaacctgagcgacgaggagagccggcagctggacaagaggtcccggcagatccagtcggagatccggacggtggggtacatccggcaccgcaacctgctgtcgctggcggcgcacgtgccgcgcccggactgccactacctggtgtacgagtacatgaagaacggcagcctgcaccaggcgctgaaagccgacaacgccgaggccgaggacggcagcagcggcagcggcaccggcgccggcgccggcgggctgtcgtggcccgcgcggctccgcgtggcggtgggagtagcggcgggtctggagtacctccacgtctcccaccagccgcagatcatccaccgcgacctcaagcccgccaacatcctgctggacgacgacctggaggcccgcatcgcggacttcgggctggccaaggcgatgccggactcgcacacgcacgtcacggcgtccaacgtggccggcacgctgggctacatcgcgccggagtactaccagacggtcaagttcacggccaagtgcgacgtgtacagcttcggggtcatcctggcggtgctggccacggggaaggacccgtccgacaagttttcagcacacgcagagaaggtggtcg

SEQ ID NO: 92446 - DNA, 283 bp, Zea mays
  Clone ID: MRT4577_184303C.1
gggggggccacctggttttttaaaaaagggggacccgggggtaaaaagaccccgtttttgggaggaggaacgcaagcgctggccggaggactgccgagagctgccaaaacaaacgctcggcttgctaacaggctagggtccccttaggggtgcgcctgggggggggaccgcccagcttagggcttcttgcgagagacgcggcggccgctcggcttcctttccccgctgacccttgccagcgccttgccacctggggggttccggcgccgccttcttatccccc

SEQ ID NO: 92447 - DNA, 563 bp, Zea mays
  unsure (1)..(563): unsure at all n locations
  Clone ID: MRT4577_184304C.1
ggcactcccgcctctcccantcctagggtttctcgatccacccctccctcacaccccgccgccgccgccgccgccgtcgccgtccgccgcactcccgagggtttctcgatccacccccgnccccttcgcgccccgccgccgccggcccccgcccgcccgcgaagatgttggagctgaggctggtgcaggggagcctgctgaagaaggngctggaggcgatcaaggagctggggacggacgccaacttcgactgctccgggacgggcttctcgctgcaggccatggactcctcccacggcgcgctcgtcgccctgctcctccgctccgagggattcgagcactaccgctgcgaccgcaacctctccatgggcatgaacctcggcaacatggccaagatgctccgctgcgcgggcaacgacgacatcatcaccatcaaggccgacgacggctccgacaccgtcaccttcatgttcgagtcacccaaccaggataagattgccgacttcgagatgaagctcatgaacatcgacagcgagcacctcgggatcccagactctgagtac

SEQ ID NO: 92448 - DNA, 860 bp, Zea mays
  Clone ID: MRT4577_184305C.1
tacacttaacccaaacatcaaccttaatgcctatcaaaagttcggcactcttgagcacgctaccctgcgatacatcgcctttgccaaccacttgatgattctcatctcttccatcattgtcactggtcttgcctcttggttccttgccaagtatgactaccgcggtgtcgacattgtctaccaggaggtcattgccgttatcactctcggtttctggctcgttggctcaatccttcctttgattggccgataccgcggatacctggctcccatgaacctggtcttctcttacctctggctcacttccttcatcttctcttctcaggactggagcagcggcaagtgtggcttcggcaagcctggtcagggacactgctctcgcaagcacgccattgacgccttcaacttccttgcattcttcttccttctgtgcaacaccatcgttgagggcatcctcctccgcgctgagtacgccaacaaggctgctgtccccgtcaacaaggagctttcttctggcgccaacaacgcttaagcagcaacaccaaaccttttacatgaattgagagttgcagcggcgagcttccgctcctctacaccaccagtcaacgcgtgaacacctacagatgtctgtgcgagcacgaacgtttggggcagccagaagcggttacaacgatttacaaatagagtgataccagactagaaaaaaattggcgagattttgagtagtggagtgcatggagaaaaatggatggttccccatattaatgaggttgcgaatgaatggggagatgaagtaatgatagatagattcggtcgttaaacttgctttagtctttcgttaatgatacatgatcccttat

SEQ ID NO: 92449 - DNA, 891 bp, Zea mays
  unsure (1)..(891): unsure at all n locations
  Clone ID: MRT4577_184306C.1
cattgggaccctcgaggccggccgggaaaaatataaaaaaaaaacactgtccaaaccaagggcctcaagccccagggctgcgtcatggagaacgcaaactggtgtgccaaggaggtccaatcctacaccgatgagaagggatgctgggctgccgctgaggactgctgggctcagagcgatgtatgctacgactccgcacccccaactggtggcaagaactgcaagctctggcaggacaagtgtaccgacattggtgcgcagtgcaaggctggcaactgggtcggtcctcctaacaagggcaaggaccttacacctgccaagaagtccatcgatgtaggcctcatcatgcccaatcaggtccagcctggtgccccatccaagaacacgtcagcgccttcatccgaaaaggagcaggaggagccagagtccacgcctgcgcccaagcctgagactgagaccaagcctgaagactccgagtatcagcctgcgcctgcacctgctaagcccgttgtcgaggcaccaaagccaactcccacccctgatgcgcctgcagctccatccaacgatgagtacgacagccctccctttcatggagcccacataaaacccctggtggttcccccctccagccccctccaagcagcccactacccctcagcaaagcccccatctccaccatcaccgttgccccttcatcggtcggtggccccaagcctactcagcccccttgccccaagggatacaggtgcgtctacgtgactgacctcgtcgtcgtcactaccaccgtctacgtgactganggtgctgcccccactgctacccctacccctagctcgnggagctacatgaagcgtgctcatcttcccccgagggagcgtctgcacatggctt

SEQ ID NO: 92450 - DNA, 952 bp, Zea mays
  Clone ID: MRT4577_184307C.1
agtcttgcagaatcctgactatctcacgctacaaaccaccgctactctcgttggtgcattacaaactctggcacttttgacagtcattatcgtgtctaccctcaaaccctggggcaagcgaagggcagtgcaatcctcgacaaaatagatgtttcagtaaccagctcagagcatttcaagaagttcagtctcctattgtgcaatatacttgaattacagacaaagataaccgtacttttcatggcgatcgccaatcccctctcccgaaaaacggcatgttactaatatatattttatatatttccaatactcttttcttgataagctgatcaagacacgtttgagatgacccatctggccgattatctgcggggaaatcctcaccaacaggtttgtcgtccttcccagtctagttggggctataaaggtttccatgaatattggcttaacgataccaatgcttggatttatccccatttgcataaagctgctgagcgcatgattgaattaagccatcgggaagcggtggatgaactagaagaaaaagcattgaaccaggccgcccgggaattgctgttggcccaatcctccgactgggcatttattatgcggacaggaactatggtgccctatgcggtgcgtcgtacccgttcccatctgttgcgcttcgataaactgtttgatgatattcgagccaataaagtggatgcgggttggctagaaaaggttgaagttatggacaatattttccccaagattgactatcgagtttaccgtcctctgtaaaaatgtggactccctggcattatctcggtgggaaattgtggcggttactagttttattggttgccctattggttgttctgacaacggttttccttgggcagaattcctcagcttctcctaacaaaattcgaggagtttggttaaccaatgtggacagtaatgttct

SEQ ID NO: 92451 - DNA, 402 bp, Zea mays
  Clone ID: MRT4577_184308C.1
aatagcattggtaaactttctgcatttaacggcttttgcccccggagatccgtaaggtttacttaccacggtagggaagggggggggggcgacaagcaaattaaagaaatacgcccacctgtctaaaccaaagggaatacacaacaggccaccccctagcaaaatatccaagggaggggggggaccaatccactgccccctggccacttggagtcccacacgtaaaaatgtaagggcaaataacgaggactaaacactccacatccctaagggtagatgctggactaccagaccaacttcaattaacaccccccccttttaatggaaaacacctaccaaccccgccgttgcaccttaacggtcccaaaccagaaaaactacccttaccaaaaagtggttggg

SEQ ID NO: 92452 - DNA, 1156 bp, Zea mays
  Clone ID: MRT4577_184309C.1
cccacgcgtccggacacaggctgctgcgccgtgcaaggcacgatcgtcgaccaaccaccatgaatgcctgcagtttgcttgcgtccatttcgctgtcactctgctgcactgtcgccctaccatgtagtattattatgcatggtgctccagtttgtcattagtccatgacaaggggctcggttagtccacagccctagaggctgcagctgcacacttctcttctctgttttcgccggttaaactttccccacttgttgctggccttcgaatctgtggtttgtttgagcttgtaaggatctcttcttcttcactctagcagggaagcgaagaacagggaagcaaggacatggatgctttcagtgcagtgatggacaaggtaaagagccacccagaaatgatggagaaggtcagtgcagtgatggacaaggtgaagaagagccacccagaagcggtggaaaaggtcaaggacgaggtgatgagccttgctgatgctctccatctgcgtagacatggatccaaagataaagaacctgagtctgaagagaaggccgaagaaggcgaggcagcgcagagcgtcgaagaggaggagggtacctctgctgacaagactgcagaacctaatgtgttggagcaggccgtacaggagattcaggctgtcgccgcagctttgcagcagacagcacctgaaactgaaactgaaattccagttgagactgctgctgctgctgctcctgaaacttcggctgaaggagacaagcctgaagacacaaacagggaggtggagaaagatgacccaaagaagcggctcgatttcgccgggttcttcgccatgctgtttgagaggttctgctccccggccaacaagaagaaagactgagtgattgcaggtcagctgtggatttctcgttttgtgatcttggacgtggaaattacattttacttgatgtatttattgtgggtggtgtacagtctgcacttgtgttctattaagataaatctgctcttgctttttttactttcttctgtgatgacagggcaatgattacattttacttgatgtatttattgtcgcccttgtggaattgatttagtttatgtgaacgattgatttattttgggttaagataatgcagtgagtgtgtgatgccttgtcccc

SEQ ID NO: 92453 - DNA, 768 bp, Zea mays
  Clone ID: MRT4577_18430C.1
caatgggcagacacggactaactttcgttcccctttccgccgcgcctcccactaaaccctagatctctctctctagaatgccgacgtcttcggctctcagcaagcgcggcggcgacggcggggacggcatcctggccgccctctcccgttcgcaggtggcggcgcacgggcgagaggcggcggccgtggcgaagaagctgctgcggagcacggggaaggcggcgtggatcgcggggacaaccttcctggtgctggtggtgccgctgatcatcgagatggaccgggagcagcagctcaacgacctcgagctgcagcagcagacgcttctgggcggggcccctccgccgccgccgccgaccaagtagatagatccgtgcatcgaccctttcgtcccccctctccctctctagaggtatctgttactgtcaagttcatcattcgagttactatcaagttcatcattcgagtcgagctgaggctgagttaccgagtcgacctgttgtcggttggtcgtaatcaaagaggtcgaaactgctttgttgatgttcgttctcgatgcaacactagtttagtttcccttccatcaattgaaacggattgatcagataagttgagctcgttcgctgctgctgctgctgctgctgccacgcgttgcgatccgctgcctgcgcttttgcacgctgcagcttgttcttcttatacctgcatgtgttagcgtttttaatggataaatatacttcttgctgtcaaaaaaaaaaaaaaaacgac

SEQ ID NO: 92454 - DNA, 618 bp, Zea mays
  Clone ID: MRT4577_184310C.1
ggagagttggttatttgcttgattggtaacttgctgaataatggtgatcattctgattgacagccataatccaagccacagctgactatgaggcgctctgtaaatgagagtgtatatagacacggtccacgttacctaactcatggctccgccgacgaataactccttcacctgcaagatgctcaaccagtcgtccatgcatctgagcgcaccgcacgattccgcatgcatctcatccgacgtagcgcggaatgtgtgtgatcactcgtatgtacatagacgaaccagatgatgctatatgacatctagctaccgctcctcttctacacagccgactgctactacgtgctatggcagacctcagggaccaagaacctcatctacagcttgccactgctggccataatactgggaatactacattctcggatactacggctgcgtacaactaccgctagcttgtctttacggaaagcaacgtatagaccattgcctggcgatcttgtacacatatctgaacgaactacctggaacacaactacatttaaaactaagccatacagcagaatttcttctgtagagagacagctatcaccgcagacaactaatatgcgaata

SEQ ID NO: 92455 - DNA, 456 bp, Zea mays
  Clone ID: MRT4577_184311C.1
ggaatctcctttttttttccctggggggccagaacccaaacaaaggtttttaaaaaccaaaacctggctcgacggccaaacaaattcttgcaagcaaaacagttttccccctcctcggaaccgttattattgccgccctttggggggacctcctaaaagtccttttcaagggcggccaggtcctcgcgggcctgggaaaactcccccttttttttgccctccccgacaaaaaagggcacgaacgcgcccttggcttacatgaggtcaaacttgctgttgatgcggaaaaacaccttcccaaccctggtgtttttggaaaaaataacaccgggcgtctgaccttgtgaaggtcggaacccgaaaccacttgttggggcctggtatttgttgccgcacttgaaccccggggggcccctttccacgaactggatggggccccttcgtcttgaggggggc

SEQ ID NO: 92456 - DNA, 308 bp, Zea mays
  Clone ID: MRT4577_184312C.1
ggaaacggaaacgataaatttccacgacttaccactcacgggcgaatacatttggatcaaagcccccactggccacacatttctacatagaggggggccacaaacagaagcccacacatgggttcatgcctacgtactttggtggggggaacatgcatccacaatacaccgtttacaaactgggtagacgtttgctaaacaccataaatgacttgggacaggcccccctcgatctagcttaaaataccaggggcattactttattactttccgccatgcatgcattcctggcccggacgcccacagga

SEQ ID NO: 92457 - DNA, 186 bp, Zea mays
  Clone ID: MRT4577_184313C.1
attatacgcgaatgtctttgctgctgtattctaaggcatgtctttattctaatcctgaagatatcgctttgataccaccatgtgtgtggcagaagttcgaaaacatgcgaacatcaactggaagtcttggatatatggaagaagatctctgactagccccgtgacagctatcaagtgcatcagatg

SEQ ID NO: 92458 - DNA, 743 bp, Zea mays
  Clone ID: MRT4577_184314C.1
ccggccgggagacaaggcaccacggcatctatcgcaagctttgcatcccgggccacttctaggtctggggctggttatggccgacttgcatcgcctgtgcctgaagtccctccagtaaactatggagagcagcctctttcacggactactaccatgaattcgcaggggaatcatggccagtacccggcaaaccaaccgatggcagatccaatgcagttcatgcctggtcggtatacggaaagccctgctcccatgcatcccaataatgcgccattctaccccccaccagctcgcgcacccagtgctcgtccgatggatacttttacacaacccatggggtcgtttgcaccgacacaagcacctcctcctggcccgagaggttatcaagcttataatcctggaggacgtactagcactgcgacgtctgtaacctctcaccagaatggacctgcgatgcagcgtcagttcaaccctcccgtccgtagtgctacagggccgatgcctctacgagagcctccacgtagaaacctgaccaaccctatgccgccccgttcagcaagcgcaagaccggaaagggcacctccttattactacgatgttgaatcgcagcgaggaggatatggttggtgaaaggcagctatgtaagaataagctaaattaataatgacctacgaagcggaaggtcgaatgttgataggtggcttcgttatgtaatataactggatagacctgatgcatccgcc

SEQ ID NO: 92459 - DNA, 495 bp, Zea mays
  unsure (1)..(495): unsure at all n locations
  Clone ID: MRT4577_184315C.1
atatcttaacaaaccgggggggaagnngngtcgttccccaccactcgcctagctcctcgccgcctgcgagcgtcgccatctccgtcaacatgtggtccgacgtgcgacgcagcccttccacccgccgacaaatgatcccggctgtccctgacgaccatgaccatgcgagcgacttctgaccgaaggatatacctcgaggtgaacgcctgatgctcatgggagatgcctgccagagcactgtcttgcgtaactcgaataggctgtgaccagaaagggttccgcaacgaacgacggacgtctcactaccgccctcgtgacgcctctgctccataacggcactatcttcttgcgtgcccacggcatcaagcatagcctgacgcatcattcacctctgtccgcgatgcctaccccatccagagacgctctctgactgcgatcttcaacgattggaccccaacgatgacgacgctccggattggtacgactgacgctgat

SEQ ID NO: 92460 - DNA, 298 bp, Zea mays
  Clone ID: MRT4577_184316C.1
aacaaggggacctgcgcaaagcactgatccaaacaaaagaaacaacggggcgggggtcccttcctgcgccctggggagaccatacatagtcacacgcacaagcaggacatgatttttcctcatacctcaagaatttgctgctccttgggggcagtggaaatgcctttagcatgaacccaaccgatttggcaacaagattgaaaacagagccttacaggggctagcttctaggggaagccccaaggtaaggggggtcttcgcccggcaccatggggggaccccaaacgtgaccctcctt

SEQ ID NO: 92461 - DNA, 613 bp, Zea mays
  Clone ID: MRT4577_184317C.1
ctctgaaccaatgatttttcagcttgcgtttctcctgctccctatccgacgtagtgaatcccttcccaggcaccactcgccgacggaacgcctcccttcctaggcaccactcgccggagcgcatcccttcccagccactgatggccctgacccgccagcgcgcttccctccccaccgttgacggccccgacccgccggtggactgcgctcctcatcgaccagcgtggccatattttgcatttgttcctgtttcagcttgtgagcgactgatactactgtcccggcccatcgttactggaccaagaactttgagatgtggggacacgagaacggctttcgaggctaggcatgtggtttggaggaataatctcacgtggtaccacgctttggaggggcacgcgagatgcggtcgtgcgtgcagatgggtttcacatggcagcggtttcctggtctgggccagctcgatcaccgagttaagaagctgactgaagccacaagccactgaggcaccaaagaatacgcaaagctctctgcagacctgcagtctgagctactcattcaaagttccggcaacccaagcctccgtatgctctgatttgtatggacaaaaaca

SEQ ID NO: 92462 - DNA, 311 bp, Zea mays
  unsure (1)..(311): unsure at all n locations
  Clone ID: MRT4577_184318C.1
tgggtacctcgaggcgggccgggccccaacctcgtgtgttcgggcggaacaacacaacagattccccaaatcacccgtcggcacctccgcttcaagatgcagatctttgtgaaaaccctggactggcaagatatcaccctcgaggtggagtcgtctgacaccattggacaacgttaaggccaagaccaggacaggaggggatccccccagaaccagcagcggtncattctttgctgggcaaaaggcttgtaggacgggcgcacgcttgctgactaaacatccagaaagagagcaccctccaccttggtgct

SEQ ID NO: 92463 - DNA, 437 bp, Zea mays
  Clone ID: MRT4577_184319C.1
atccccatctattccagccacacctgatgaacttgatgagctgatatcctatcaaactaatcagaaagattctgaggccccaagaatctaataataatctgaagcgtaaagccaatcaagagctcgagccacttgagcttgccgtcccatccactggtgctgcgccgcaatcgacaggaactgccccaagaaaaccactcaggttgaggttaacgactttggggaaaccgaagccagctgaaggaacttcctgaatggaattgcccaggagccaacatacctagagcttgtttttccttgtattgaagcaaggatatgtggaagcgctcggcacatagcctgctttggcactgcgagttgaaacgaaatggaaaacggaggccgcctgacgtaaatgagtgcgattgtaataaattgtatgtagttcatagctgggt

SEQ ID NO: 92464 - DNA, 603 bp, Zea mays
  Clone ID: MRT4577_18431C.1
cctcgaggccggcctggccgggaactcccccatccgctgagctggacgatgtctaggtggaccctgcatcctatcacagtatgggtgcccgctgaaacaatgctatcctccccatgatagctgccagactccaggaagccatacaaagtcgtggacttgatcctggatctggtagacatcgtccagcacaccaacccaccagcgccctgtataaccccactgagccactcgcgtctcctttctcgccattatattctgcagacgcgacaatggaccgattattgatctccgcacaacgcgtgactctttgcaccaccatcggccagctgacgtaggtccacgaggtatcggaatgcgtagtaatacagtagctgtatgtctagtcacagaccgttccatcagccaagctattgactacaagcgtgacggtgtcacctgatacatgcacattaacacaaactccagctcggctgaacagacaacgtgtcgtcaaccccaaacatcatgaggtcatgtcgctggagatgagacacaagctgaacgaccacaactccctggacgaccaccatctgttgactttactcaggccgaatgtgcaccctc

SEQ ID NO: 92465 - DNA, 510 bp, Zea mays
  Clone ID: MRT4577_184320C.1
gattctatcagtggagccatcgacactccgtcgtgtagctgcgagcgtagcctatcgtgcatcgaaagggaaaggcgcgtcatgcctgtgccgcgccctgacacatgccgccggcgaaaccccaggacgcgacagacggaggaccgctggctgccattcgcgacgagctgccaagggagatctcctcgtcggctcccgctccattccgcgccgaattcggcgcccgacttctacaacgcggctgaggccccgcgcgcgaagaacacagtcttgcgtcgccgcggctgggcctacgacgacctcgggtctcctctgctcgtgccactgagctccatgcgctgagttccattgcccagcgccgggctcgtgaagggctacaatagtaaagcgggcgagacacccggactgcacttcaactgccgggcggcatgggtggggtaggacgaccaagtggctgctgactacacgatataggatgtgcgctagcacacgactcctgcagtgatggta

SEQ ID NO: 92466 - DNA, 1951 bp, Zea mays
  Clone ID: MRT4577_184321C.1
tctgacttcccagccagttgtagtgatttgtgcggagtaccatgttttggaaccaatcttagaattcataagatattggggaaagtgccgtggggtttactcaaatgtgatgggatttttgggtggtataaactgggcaattctcgtgggtcgcatctgtcaactgtacccaaatgcatcaccaagcatgctggtatcccgttttttccgagtctacagcaaatggaaatggcctaatcctgttatgctttgccatattgaggagggctatcttggtctccctgtgtgggatccaagaagaaattacagagacagggggcatcaaatgcctattattacacctgcttacccttgcatgaattccagctacaatgtatctgttagtactagatatgtgatgatccaagaattcacgcgagcgtttgagatttgtcaggccatagatgaaggaaaagcagattgggacgcattgtttgagccatatccattttttgaatcatataaaaattatctagaagttaatatcacagcgagaaatgaagatgatctcaggaattggaaaggctgggtggagtctcgccttcgcactcttgtattaaagattgagcgttattcacacgagatgatccttgcacacccatatcccaaagatttctcagacaaatccaggcccttacattgcttttacttcatgggtctttggagaaaacaaaccacccaagctcaagaagctgagcaatttgatatcaggggaattgtaaatgagtttaggaatactatttgtgcatatcaacattggaaagaaggaatggacattgaagtgtcccatgtaaaaagaaaagaaattcctttgtttgtttttcctggtggagtgcgtccttctcgttcttctagaacagcgcacaagaagagccgtactattccaacatgtgatgtttcagctgatgatcaggtgggaaacctattgggcgttgccagttgtagtgatgctcaacctgtaccatgtaaaggcagctatacgaaacagccagatccaaattgcgctggaggctttcagttgccaggaagtacttctgtgttgcctcctagcttacccaatgaagtagttttgaatgggtctgctaattttcatgaagaatctgttgagcgtgaacatccagaacactatcaggaaagtaagtttgcaactgtgcagaatgctgtgtgccatgtagccaagcagcctaacagtttgctgccaaattcaaacaacggttggcaattgtatggatctgattcctctctaaacaattcacaaagagaatgttcaggcagtgctgcaaacaacttgctgaacttatccccagctattccagccacacctgatgaactcgatgagctggtatcctctaatcaaattaaagctaaccaggaagatgtaaatgctgaacggagaccatctttggagatcggttctgaaaataatttggaacaaatatgcagtctgaggccccaagattctaatgataatctgaagcgcaaagcgaatcaagagctcgagccacttgagcttgccgccccatccactgttgctgcggcacaatcgacaggaactgccccaagaaaaccactcagattgaggttgacgactttggggaaaccgaagccagctgaaggaactacctgaatcgaattgcccaggagccaaaattacctagagttcgcttttccttgtattgagtcaaggatctgtggaagcgctttggcaccgcgagttcaaatgaaagggaaaatgaaaaaaaaaacggagaccacctgacgtaaatgagtgcaattgtaataaattgtgtgtagtacatagctgagttggcataaatgtacgctgtggtacgttttcttgacgacttagctacgcttgttaaacgggaatggatatcatcttcgaagcatataatcttctcatgtgtcaaaa

SEQ ID NO: 92467 - DNA, 663 bp, Zea mays
  Clone ID: MRT4577_184322C.1
tctgattcctctcttaacagttcaaaaagggaatgtgcaggcagtgctgcaaacaacttgctgaagttatccccagctattccagccacacctgatgaacttgatgagctgatatcctatcaaactaatcagaaagatgtaaatgctgaaaataacttggagatcggttctgaaaataacttggaacaaatatgcagtctgaggccccaagaatctaataataatctgaagcgtaaagccaatcaagagctcgagccacttgagcttgccgtcccatccactggtgctgcgccgcaatcgacaggaactgccccaagaaaaccactcaggttgaggttaacgactttggggaaaccgaagccagctgaaggaacttcctgaatggaattgcccaggagccaacatacctagagcttgtttttccttgtattgaagcaaggatatgtggaagcgctcggcacatagcctgctttggcactgcgagttgaaacgaaatggaaaacggaggccgcctgacgtaaatgagtgcgattgtaataaattgtatgtagttcatagctgggttggtatcagagttcaccatttcgtttttgctgtagcgaatttcgtttttttaaccaaagtttgactcttatattttttgaatttggaaccaaaatccat

SEQ ID NO: 92468 - DNA, 396 bp, Zea mays
  Clone ID: MRT4577_184323C.1
atcagcaagcatgagaagcgaatgaatgtacagtatacatgtcagtcgccaactgctagggctttatcgcgatccactatacatgcgtcagcatcaacggcgacggtcgcaaggatcgcgatgtaaactactgtaccagagattaacagatgatcccaatgactgctgaatatgtaaaactaacatgtgaacacattatcatatataatgacaagtatgttgctcactgcataactcctttaatctatctttgcactagctctatcacaagtcactgcggtgctaaaccatcattaatcaaatcgacgcctgattacaaagcttactatatgaccataaacacgtcggaactcatgtaccatactgtgatctatatgaatgctaagtacctacgac

SEQ ID NO: 92469 - DNA, 209 bp, Zea mays
  Clone ID: MRT4577_184324C.1
ggcagatccatcatcagggtaattgtctctaccgcatggcctttagactaatacgaaagtgatcttactgatctttcgtttcaaatctaaaacgattaaataaaatgtgatttgcaccttgccatgtactctaaaaaaaaaaaaaaaaccaaaaacaacaatacaaatataatacaaaaacatcaacaacaactacataccataacaaa

SEQ ID NO: 92470 - DNA, 212 bp, Zea mays
  Clone ID: MRT4577_184325C.1
gggcctgcgacgttttagtttttttttttgtgccccctaatttcggggcgcgggccgtctttttacaccccgggtgactgggaaacccctgccgtttcccatcttttttcgcctggccccacatccccttttcgccggggggtgtaatagcgagggggcccgggccgatcccccttccccccccttgttcagcctgtgtggcaattggccct

SEQ ID NO: 92471 - DNA, 152 bp, Zea mays
  unsure (1)..(152): unsure at all n locations
  Clone ID: MRT4577_184326C.1
aacccncncactttccaccttttttttccacccacagcaggggcaggccggccgcgtcttttaaaggaggaggagctcgataaggccgcttggcagagccgtgttatggcacgatgttctgagctgcgctggaaggatcgggatcctggcca

SEQ ID NO: 92472 - DNA, 259 bp, Zea mays
  unsure (1)..(259): unsure at all n locations
  Clone ID: MRT4577_184327C.1
atttataaccntaaaactgaggaaaggattatcaacattcatattgcatcaggtcattaatacacatatgggtatcatcacagtttatgctgaatccttctacttacatttaagttagtatcactaacaaaaaaaatgacaattaattccataatagcgacactaaagaataatcatgtgtatatttgggacctcaaatgtacaaaatattataatttgctctgggctgaaaaaacttcgataaacatgccaatttata

SEQ ID NO: 92473 - DNA, 229 bp, Zea mays
  Clone ID: MRT4577_184328C.1
acgcccacgcgtccggtttccctctttgaataacagcggaaacacatcaccatgaccagcatggtgccaggcatatttctgggagggaaacttacacaaaatgggtgctatagactatataacgatcctaaaccatcggatcaataaccaaaacgaggtctgtatggaggatacgccaaagatgcttgatgacgttaatggtggatctctcatattttacaaaggaata

SEQ ID NO: 92474 - DNA, 341 bp, Zea mays
  Clone ID: MRT4577_184329C.1
cggttttacccacgcgttcttggctgcggcgactgatggtgccgccggcggggggagcaccgccggcagcggaagctggtgggcggcggcggcggcgggtcagcgtcgtcgtccaggctgctggccgggctgccgaggtggaagcgcgtgtccatcggcggcgggtgggcgtcggcgctgctggacgccgccgcgttgcgggtggtgtacgtggtggaggccgtcgtgctgggcctcgcgctctcctgcttcttctgctgctgcggctgccagatatgatagcctaattactaggttcatttaccttgtaatctctctccctaattatatttgttattact

SEQ ID NO: 92475 - DNA, 877 bp, Zea mays
  Clone ID: MRT4577_18432C.1
gccggccggggtaggatccccccacgacgccgggttctttcgttcccctttccgccgtgcctcccactaaaccctagatctctctctctagaatgccgacgccttcggctctcagcaagcgcggcggcgacggcggggacggcatcctggccgccctctcccgttcgcaggtggcggcgcacgggcgagaggcggcggccgtggcgaagaagctgctgcggagcacggggaaggcggcgtggatcgcggggacaaccttcctggtgctggtggtgccgctgatcatcgagatggaccgggagcagcagctcaacgacctcgagctgcagcagcagacgcttctgggcggggccccgccgccgccgccgaccaagtagatagatccgtgcatcgaccctttcgtccccccccctctccctctctagaggtatctgttactatcaagttcatcattcgagttactatcaagttcatcattcgagttactatcaagttcatcattcgagtcgagttgaggctaagggagttaccgagtcgacctgttgtcggttggtcgtaatcaaagaggtcaaaactgctttgttgatgttcgttctcgatgcaacactagtttagtttcccttccatcaattgaaacggattgatcagataagttgagctcgttcgctgctgctgctgctgctgccaggcgctgcgatccgctgcctgcgtttttgcacgctgcagcttgttcttcctatacctgcctgtgttagcgtttttaatgaataaatatacttcttgctgttattcaaaaaaaaaaaaaaaaaaaaaaaaaaattcaagaaaaaaaaaaaaaaaaaaaaaaaaaaaaaaaaaaaaaaaaaaaaaaaaaaaa

SEQ ID NO: 92476 - DNA, 1121 bp, Zea mays
  unsure (1)..(1121): unsure at all n locations
  Clone ID: MRT4577_184330C.1
ngaagagaggggccagcaggatcactacggcatcttcggcatccaggactccatggtgagggacatcgggccctacaagaacctcgtcaggttcaccacctcggctggctccggctccggctccggctccggctccctggacctccacctcctcagcagagggttctcggcgtcgcccctggtaagcaaactgagggagatgctggaggcgctgcagcaggtggatgtgcgctccttgaatcaccaccagaggctggcgttctggctcaacatctacaacacatgcatcatgcacggcattctgcagcatggtttgccctcaaactcggacaagttactcgcactcaagaacaaggcaacaatcaacgtgtcagggcaaactttcaatgcgttggtgattgagaattttatcttgaggcagccgtcaagtgtgaaacaggagttgtggcaatgcgacgtggatgtggaagaagacaggcggtcggggaggtttatgggtcaagacttcagaacccaacattctctttgcactctgctgcggcatcagatcatcgccagcacttcgcatctacaaagcagatcgtgttcttgtggatctggacaaggcaaagcttgagtacctgcaggcatcgctggtggtgacatccaccaggaggctcatgatcccaagcctcctccactccnnnnnnnnnnnnnnnnnnnnnnnnnnnnnnnnnnnnnnnnnnnnnnnnnnnnnnnnnnnnnnnnnnnnnnnnnnnnnnnnnnnnnncgaggtggattgcctcgccnnnnnngccattaccaacaacaagctggaggaggtggtcgtggatgtcattcccttggactacgacttccaatacctgctgcccatgtgatcaactcatcatgcatcataaatattattaattgctcattccactaattcnnnnnnnnnnntattattctgtaaattaagtgatacagatggagtattattgtgtagtcttgtctatctcattagctactaggatggactccaacaaggaaactattcaaatgttgcttgctggtgatccttatattgtaaatttctagtgattacaaagtttcataactcttcaaaacctacaactttcaaa

SEQ ID NO: 92477 - DNA, 931 bp, Zea mays
  Clone ID: MRT4577_184331C.1
aggcaacaatcaacgcgtcagggcaaactttcaatgcgttggtgattgagaattttatcttgaggcagccgtcaagtgtgaaacaggtgagaatatttgatatgcatgcacatgcgattgcagtacgacgttgctacagcatatgcatgaacgaataatccagcaggagttgtggcaatgcgacgtggatgtggaagaagaacaggcggtgagggaggtttatgggctcaagacttcagaacccaacattctctttgcactctgctgcggcatcagatcatcgccagcagtaagtagtatgcatgtatgtattatattggcactcaattaatgcatacaacacaatgcagcttcgcatctacaaagcagatcgtgttcttgtggatctggacaaggcaaagcttgagtacctgcaggcatcgctggtggtgacatccaccaggaggctcatgatcccaagcctcctccactccaacatgcatgactttgcaaaggacacggagtcgctgcttcgatggatctgcgagcagctgcccacgtcctggtccatcaggaaatccatggtggattgcctcgccgccattaccaacaacaacaacaagctggaggaggtggtcgtggatgtcattcccttggactacgacttccaatacctgctgcccatgtgatcaactcatcatgcatcataaatattattaattgcccattccattaattccatgcatggattattattctgtaagttaagtgatacagatggagttattgtgtagtcttgtctatctcattagctactaggatggactccaacaaggaaactattcaaatgttgcttgctggtgatccttatattgtaaatttctagtgattacaaagtttcataactcttcaaaaccaacaatttcaaaaagggggttttttttccccccac

SEQ ID NO: 92478 - DNA, 691 bp, Zea mays
  Clone ID: MRT4577_184332C.1
agatcttcctctactaccgctacctcgtttctccccctctcccgcacggcagcgtcgttgcccgccaaactcctcactccacccgtggaatctcgcctactttcccggctcagatccgagctcgtacgcgaaatggtgatcctttgtgctgcccaacctgctccttcggttcattctgaatttctgtctcgatggttatcactcaacagccccaaaatgccttacgctctcaactcaaccgcaacgaaactcagaaagcaaaacagacgtcggcggataattacttacgcgaaaagttcttcgttacaagattcagtggcctctgtaaagccatctcgtcttctgcccacagtggaaccaaaaacatttcccaatagtgtccctgatgagatactattaaaactcagattggaagaatctgatgccttttacatactagagctgtgcacaagtagagaacttagttcctctttgctagataagaactccgcgatcttagtctgcttaatcgatgttgacggtgactccttgctacaaagagtaccagcaatctatggggaccaacctgcacatgtcaccaagccgttacaattccttccttttcaaagtggttcagttgatatcgtcacctttaaaggtcccaaattgcaaacaattaaagaaatctggatcggccttgaatcaggttcat

SEQ ID NO: 92479 - DNA, 505 bp, Zea mays
  Clone ID: MRT4577_184333C.1
ctttttcttttgccgccatccgacgcccatctgctgcaccctacacctagccgccgccgccgcctaaggagaagagggtccggtcgctttcttgccccgatggcgtccgagatgaagcagtccaacctgttgcgggagatcaaggaagattagtcatggtcctcatcatattcgtaggggggagcagcatcctcaacctcgacctcaagaaggggctaaaccagctctacctcaagaccgcggtctatggccacgtggggagcgccgaccctgacttcacctgggaggtggggaagacgatcaactgctacaatccgggtggctgcggcaggcttttgctgctgcctgagagcggactgaaggtcatggggtccaagctgcttacgaggaacttcagtgacaccggttgcttccggttcggcatccagaacacattttacctctggatcaagtttgatcccatcacaggcatctatgggatggacctttacgtcccgcttgagcg

SEQ ID NO: 92480 - DNA, 258 bp, Zea mays
  Clone ID: MRT4577_184334C.1
aaacccaagacacaaaacatttccataaatcaagggtccatttaatggcaataaaagcaaaaaaaaagaatttcccggcccttgattaataaccccccttaaaacattactttttttaaccgaaacaaaccatgttattgggcgatttctttttgggggggatgaacaatcaggaagctccaagggggttggtttgagcaaattttttaaaacgagggttccaaccacatattttgagcgactaggggccccaccaaa

SEQ ID NO: 92481 - DNA, 302 bp, Zea mays
  Clone ID: MRT4577_184335C.1
gggaagggaaacaaagtttcctttttcccataaaaaaaaaacccctgggaacccacggaaaattttcaggccccctaaacttaacaacctcaacatgggggggggtttaaccggggggtactaaaaccccgggcaatggaaaaaggttaaccccccccgctttgtttttgtttgtaaagaacccccccctcctggtccgggatccccggagaaggaattatttttcccccaagaccctttgggaggggccccctcgggggggggggaccgccaaacaacacggaaacccctttcctttcctt

SEQ ID NO: 92482 - DNA, 1306 bp, Zea mays
  unsure (1)..(1306): unsure at all n locations
  Clone ID: MRT4577_184336C.1
ttgggtacctcgaggccggccgggagccatcttcatctgcctgctggtgccggactgacggttagagatggcccacccctccgccgccgccgccgccgtatcctccacggcgcccgctgcaaaccctagttctggcgcccgcgaggaaggaggcgcccgctctccgccgtcgccgtctccgtctcagagggggcgggccaaggtggtgatcgttatgggcgccacgggcgccggcaagtcgcggctggccgtcgacctcgcggcccacttcgccggcgtcgaagtggtcagcgccgactccatgcagctctaccgcggcctcgacgtcctcaccaacaaggctcccctccacgagcagaacggtgttcctcatcatctacttagcgtgattgatccctctgtcgagttcacttgccgtgatttccgcgaccgtgccgtgccgattatacaggaaatagtggaccgcggtggcctccctgtggttgtcggcggcacaaacttctacatccaggctctcgttagcccattcctcttggatgatatggcagaagaaatgcagggctgtactctgagagatcacatagatgatggtcttactgatgaagatgaaggcaatgggtttgaacgcttngaggagatcgatcctgtggctgcgcagaggatccattccaacgaccatagaaagatcaaacgctacctcgagttgtatgcaaccacgggtgccctacccagcgatctgttccaaggagaggccgctaaggtgaggaatttttcgctgtacttgtctgctctgcttgtataatgtcctccctttgtcatgaacatgagcagacatttgcctcacaaggctttttgttttgttttgtttccctgattgagtataaacttgctgggaattcctggtcatcatgtcagaacagaaatggggtcggcctagtaactccagactctactgctgtttcctgtgggtagatgctgatcttcaagtcctggacagttatgtcaacaaaagggtcgattgcatgatggatggtggtctgctggacgaagtatgcagcatatatgatgcggatgctgtctatacccaggggctgcggcaggccattggggttcgtgagtttgatgagtttttcagagcatatttagccagaaaagaatctggtgagggttcctgtgcaagcctgttaggtatgcatgacgatcagcttaagagcttgttggacgaagctgtttcccagctgaaggcaaacactcgcagactagttcgacgtcaagtaagcacttagtatcctgtgtatttttttat

SEQ ID NO: 92483 - DNA, 366 bp, Zea mays
  Clone ID: MRT4577_184337C.1
aaatattttttttttatttttgttattgttacaacaaccacgtcactcttggaagaggttcccatggtatgccgaccgcgccacaccactccattaggggaacgggatcccgggggggctagggaatcccctatttttccaacgggagcggagaggcaaaaagggacccggtaaccaccttaaaacaataccctgtgctcggtggaaaattccgaaacgaatccttttttcttacaaatttggctaaaacaaaaacatctgaaaccatagcgaaaaacccaccatcttttgtttccgagagaaatgtttaacccgtaaaaaatcaaggcactatatgttccgggaggaaaaaggggaaaccctggg

SEQ ID NO: 92484 - DNA, 2013 bp, Zea mays
  Clone ID: MRT4577_184338C.1
cctcgaggccggccgggattcctgaaaccgaacggcgcctcagccatcttcatctgcctgctggtgccggactgacggttagagatggcccacccctccgccgccgccgtatcctccacggcgctcgctgcaaaccctagctctggcgccagcgaggaaggaggcgcccgctctccgccgtcgccgtctcagagggggcgggccaaggtggtgatcgttatgggcgccacgggcgccggcaagtcgcggctggccgtcgacctcgcggcccacttcgccggcgtcgaggtggtcagcgccgactccatgcagctctaccgcggcctcgacgtcctcaccaacaaggctcccctccacgagcagaacggtgttcctcatcatctacttagcgtgattgatccctctgtcgagttcacttgccgtgatttccgtgaccgtgccctgccgattatacaggaaatagtggaccgcggtggcctccctgtggttgtcggcggcacaaacttctacatccaggctctcgttagtccattcctcttggatgatatggcagaagaaatgcagggctgtactctgagagatcacatagatgacggtataggccttaccgatgaagatgaaggcaatgggtttgaacgcttgaaggagatcgatcctatggctgcgcagaggatccatccaaacgaccatagaaaaatcaaacgctacctcgagttgtatgcaaccacgggtgccctacccagcgatctgttccaaggagaggccgctaagaaatggggtcggcctagtaactccagactctactgctgtttcccgtggttgcatacaactccagactctactgctgtttcctgtgggtagatgctgatcttcaagtcctggacagttatgtcaacaaaagggtcgattgcatgatggatggtggcctgctggacgaagtatgcagcatatatgatgcggatgctgtctatacccaggggctgcggcaggctattggggttcgtgagtttgacgagtttttcagagcatatttacccagaaaagaatctggtgagggttcctgtgcaagcctgttaggtatgcatgacgatcagcttaagagcttgttggacgaagctgtttcccagctgaaggcaaacactcgtagactagttcgacgtcaaagacggagattgcatcggctgagtaaagattttgggtggaacttgcatcgtgttgacgcaaccgaagcattcttctgtgccactgacgactcatggcaaaagaaagttgtcaaaccatgtgtggatgtcgtaagaaggtttttgtcggacaattccactgttttgccaagcacaagcgcaagtgacccctcttcaagagagctgtggacgcaatatgtgtgcgaggcctgcggcaaccgggtgctgcgaggtgcgcacgagtgggagcagcacaggcaagggcgaggccaccggaagcgagtgcagcgcctgaagcagaagagcctgaggccatggccatcgctgctgccccaagaccgcagctgatggtaactttttcacagcagaaccggcgagaagtgggacggggacgttgacgtggacatggtcgtctcgtcccacccaaaaaagcgtgccagcctgacagcgacatgctttcccaatcccgaattcctggcacgtcgacggggggactacctccatgccttttagcagcggaaaaagcaggcaccaaagaactgcttatcaaaagtattgtaccacacgtacgacgggtctagaagccacagaaacgtagtgtggaagtggatagatacttgaacaatggtccatctttctatactgctaaagtttagcatatgctaaggaggtgtttaagattgctaaaatctctattttcaaaaccgaagtattgcaaatactgtagttattttaagctattctaaacttaggtctggaccttagtttgcaaaactgtattgaccacagtttgtaaaactgtattatttcaaactgtggtattgtaattact

SEQ ID NO: 92485 - DNA, 884 bp, Zea mays
  Clone ID: MRT4577_184339C.1
taggggccttttttttttttttttttcgcacagctcaaaattcaaagcccattagtagcagacacaacagtgatatcacaagggtttagtttctgtacggatcaacatcaggtttctaaagtaaactaaattacacaagcatgcgtgagttcctgaaacgatcagaaaaggcaacttaaagtcaccaaacctcagagctcgctatgctgcgtagaagtccttgaaacaccagcgaagaggtctttggcaatgacaagcaaaccctttaagtccttagctcccacttccaggcaatccttcagcaattccccttcctccacctcccacttaatatccatgaacacctctctcaatggcccctcttcggagaaggcgaggagaagcccgttcaggagctgcgcggcggcgtcgcggatgtcgccgtagtgtaggcgcatccactgcgcagcgtcagtggcggaacgtaggcgcgaggcctccgcggcagcggcgatgagacgagaagcggcggctgcgcaggagaggccgcatccggtggctgaggagaaggcgtagtggcggaggtagtcccagccgagtccccacgcaccacgggacgacagcagggaagcgattcgccgtacgcgtgcggccgccgcggcgtccccacgagcagcacgtgtgatggcgacgcgggagaggagcgaatgggagagggagacgagggttgctgcctggcggagcgggacgcggagcgccgaagtgcgtggggttagagtagagaaaagtaggacgaggacgaagagagggagatggggccgcggtgctcgccggcggcggatggctccggctacggtcattggaggaggccggtggagatcgaatgactgcccggccggcctcga

SEQ ID NO: 92486 - DNA, 377 bp, Zea mays
  Clone ID: MRT4577_18433C.1
ggtaagggtcccacctgtcatatcaggccctaacgggctgcgaggatggggggtggaacataccctcccccatcgttaatggtttttgcccgtatctttccccacggggagtattttctccccattctcatcccctaatggcttgtttggtaccatagtattcaccctaattcacatgagttaaggggatttgggtataaattaaactaatttgcacccaaatcctcctcaacccatgtgtattggcgtgaatagtagggtatccaaatatagcctaatggaggaattccccgccagagataggggaatggggccattgccatccctacttgttgatgtaatgtacatgatatttttaatttaagcttccattattg

SEQ ID NO: 92487 - DNA, 523 bp, Zea mays
  unsure (1)..(523): unsure at all n locations
  Clone ID: MRT4577_184340C.1
cccgggtcgtacccacgccgtccgcgngtgcccaacttactcggctaccgagcggcanctcccccccnacagcaggccccatcacatgnttggcannatggattgttctttcatttcccctggaagctgcagcnagagcccaaccctgcangatcgggnttcnngctcctgaacatatngaatannacttcatgccgacatgngctaccccnntgaagatggatctttgagggcaaaggaataaataaagatgcgatggccagcatcatctactactgcaagagtgacagtcatatatatatatatatatgacctagtttgtgtgtcgatgtgtcgaaacgcataaatttgtgattttgttatatgtaatgtataagcacaaacgaaacatgcaggactagttgcttgcttcgacgatgtatttgtgtgtatccgtgtaaaggccgtgcgccacagcatatgcgtgctgctgctttgtgcatacataaattaaaggcacggtgtaatgcctgcacatttcgtt

SEQ ID NO: 92488 - DNA, 597 bp, Zea mays
  Clone ID: MRT4577_184341C.1
ctcttttttttttttttttttttttttttttttttttttttttttttttttttttttttttttggcagaacttgaggctgttgaaaacctcaactttaagggcaataccccctcgggaggacgggattaaaagccacagcccgcctgttgcccgcccttaaacacttgcatcctcgaggcctggagggcactacagtttttttaaaaaaacataatcggatagctgctggcccgattactttatatatataacccccccccccctaaactacaactgcttagccattacccacgtatccatggttttgaagttcaaaaaaagcttccctttcgggagggggaaaaccacacaacctactgtcccaaaggacccgaaatatgatacagatcctgacacgctaaagctagctttaaaaaccataatttgggggctggaaaaatcaaatcccacccaaagtttaaaacgatgttcggcataaacccatagggaaaaaaggctggcaacaggcattatttgccccttttggccattttgctctccagcctttgggggcccagctaaaactccttcttttgggggctcaaaactgcttgcct

SEQ ID NO: 92489 - DNA, 716 bp, Zea mays
  Clone ID: MRT4577_184342C.1
ctcgaggccggccgggccgggctagctacatctccaccccctgctaccttcactcttcatggatccaatttcacttctcactcaacatactcctcaaatcattgctttggcaaagccagaagcttgtgatctcgcactcatcaagctgttactagtcgaggagaatttcgtgcacgagagccgagagccaagaattttgggggcgtgggcgtcgtcgacctatagacgatggcggcgtactacaacggcggcgccagcacggacatccaggccagcaccgatggcctgcagacgctgtatctcatgaacccgagctacgccgggtacgctgacgacggtggaggcgcatccacgccgggggcgaccagcatgatgctcctcaactcggccgtgaccaccatgacgccggcgtccttcgcacaccaccaccaccagcagtcgccgccgtcgtcggccgcgcagcgcgcaacacttcgtcggcatcccactccaggtccaggcgccgccgccgtcgggctattggcgtgtcggccacgtcgcaggggcaggtgctgctgagctccaagtacctcaaggccgcgcaggagctgctcgacgaggtggtgagcgtcagcaaggtcgtggtggacgacgccagcaagacggccgtcgccgcggccaggagcctggcggcggcgaaaaaagaggaggactgcgaaggcatttcccccgaggac

SEQ ID NO: 92490 - DNA, 654 bp, Zea mays
  Clone ID: MRT4577_184343C.1
aattccaaactgtgtatagatgatgaacatgcattgacatcatatgcgagcgcacgcacgtaagaaagttgtcgaaaggtctagttacaacaaacatcgctgcctgatcgatggctgtccaccttctcctctccgggcggcatctgctgggccgccccgtgcagtcgatcgtctctacgaccgcggacaggaaggtgaccttgcgcctgacggtcagctccatgcctccagccatgcaaggcgatgacaggtagctgtggatcccgtccatgcagtacctctcctacctcaatggcaagctgcccggcgtactatggcttccacccgatgggcctctcggacccggagggcaccgggaggtttcatcgacgccaagtggctgtgctacagagaggtgatcaacgccctgctacaccatgctgggagcgacggtagctatcaccccattgatcttctgaaagatgctgatcatccccccggagaccaatgtgtggatgttcaatgacggagatcatcacgacagtgctaatgtacaactactgtagcgactcctacacgcttttcgacttcaacatgatgctcatgagctacgccgagcaacgccgcctccaggactgtaacaacgcgggctgcatgcgcaagcagtacttcctc

SEQ ID NO: 92491 - DNA, 166 bp, Zea mays
  Clone ID: MRT4577_184344C.1
cgaaatctaccatccgtttctatttttttatgaatcattgtgtacatccggcgtttgagccacatgggaagacgctagccagtctgaccagcatggatctatgtctacatctgactatatggctgcatttaatcgcatgacggcagcagctcctgactatacgcgg

SEQ ID NO: 92492 - DNA, 819 bp, Zea mays
  unsure (1)..(819): unsure at all n locations
  Clone ID: MRT4577_184345C.1
caagtattcttctgaatatgatggtagaaacactcgttctttgccccctggatgggaggagcgctttgactctgtaacagggaaatcattttatattgatcataatacacgtactaccacatgggaacatccatgccaggaggctccacagaagccctggaagagatttgatatgacatttgatcagttcaaaggctcaacaatgcttgctccagtgaaccagcttgctgaactttttcttttggcaggcgatatccatgctacgttgtacactggctcaaaagctatgcacagtgatattctgaacatattcaaggaggaaacaggaaagtttagtaaattctcagctgttgagaatgtgaaaattacggtgctaagaaggtaccaaaattttatgaatgatagttcccgtcaaaagcagttagagatgtttcttggtttgaggctatataggcatctcccgccatccctatgttccctctcaaagtgctatcaaggccatctggatgcatgttaaaaccagttcctagtatcatcccaatggctgatggtggttccagtcttctgagcttcaaaaggaaggatcttatttgggtgtgtcagcaaggtgcagactatgttgaactttttatataccttgnggaaccttgtcacgtttgtcaactgcttcttactgtctcccacggtgctgaagattcttcatatccagcaaccgtagatgttagaagtggctcaagcatcgattccctcaaactcgtggttgagggtgcttgcatttccacatgctctaatgggacaaattactgattccagtcactg

SEQ ID NO: 92493 - DNA, 158 bp, Zea mays
  Clone ID: MRT4577_184346C.1
gtgcgccgctcgagccggccgggcctgcgagatgagcacagagagtggagtagttgcacagaccatggagctctgcgtctctacacccccatcctccgtccgcgccactttcgcgcccatatccttcgccccgccccgacggggcgcgtctgcctcca

SEQ ID NO: 92494 - DNA, 646 bp, Zea mays
  unsure (1)..(646): unsure at all n locations
  Clone ID: MRT4577_184347C.1
tgaatacattagcataactattctgggggngaaaagagtactagctagcacctagaaaaaattaaaacagcttggaataacaggcaaaacttgggggcagggctcaaattaaactggggagccgtaagtatagaaaagaagctgtagcaaatttccttggcgggggcctgcatatcaagttatcaacgatgtcgtccaacgtccacatgtccgcgagaccgcgaacagcagcccggagccggaggccaggatcctcctccagtcctccatcctcagcggcggcgactctctcgggctcctgatcgatgtgcatgcacatggcgcatgcgatgagactggatctcggacgagtcaaagggcatctgggagtgctgcgattgtacagggaggcaacatcgatccggacatccggtattttttgttagctaaccaactgtagtgtatatagataggtcatgtgatgagcacaagatctgatcgatctagccatctcgacacctatagctgcttacctaagaatttaatcttaaatagtacaaatagggcctgccgccggcctgcatgcatctgatgatatgatgatcagttagagcagttaggacttaggagtcctttcagtcactaatttattccactgcatctggag

SEQ ID NO: 92495 - DNA, 248 bp, Zea mays
  Clone ID: MRT4577_184348C.1
gggtgaatgggtcctcccggtaactgtttatacacctccattgcgcagacgagctactcatgagaggaatggtagatctgtctcacccggaaatatcttcaactcttgaagtgcactgttgccgaagtatagttactttcagctggaaaggatttacagactattctgactggtacaattgctgtaaattgttataggatttgcaatgtgatgcctatttttttaatagagaacaaatggagtgagat

SEQ ID NO: 92496 - DNA, 1195 bp, Zea mays
  Clone ID: MRT4577_184349C.1
aggccggccgggattggcgtccctccaggctccagccaaagcccagcacgaccaaaacccagaacctgagaatggcgcagttccttcgcggcaaggccgccgccgccgccaccggggcggcggcgctgcgcgcgtcgtctccggcgccatggcggcggacggcctccgcgtcgtaccaccacacgatccaggctgtaccgcgggagacagccggcccgcgcgccgcggcgcgcgagcgccgccacggccgcgtcccggcggtcctgctcacgctcgcgggcgccgcgccagggaacggaattgcccaccggcacctccttaccgccgacaggaggcagctcgcggagatgctcaagcagtcgccctacttcctctccacccccgtccgcctccaggtccgcgcgggcgagcgatccaacgccatcctccacgccggcaccgtcctccccatcaaggtgcatagagatgaaaattctgggaatatactgaatttggtaatggtgaaggcagatgaaggaacaatgctgaaggtggatttgcctgtagagttcaagggagaggatgcttgccctgggttgaagaaaggaggctttttgcagaaaataaggaccagcctggtgtatctctgcccagctgagcacatccctccaaaaattgaggtggacctgacaaatcttgatgtcggagatagggtattgatgcatgacattcccgtccatccatcgctcaagttgctgagtaaaaacgagaccatgcccgtctgcaagatcttggcctcaaagccagacgagtaggaggcgctgcaaatacttcagagctgataacattgtacctttaggtggtacagccctccagcagctccgtccctagttcttggcttgctttttggtcatctgtcccctaggtttcaatgtgatagtggattcagacaagctatgggcttcaagtaaagatacgaaggaacaaaatgaagaaatatcactggagagacattgtctgtaccaaccgctatagaataacatcctttctcattcagtttgggttcagggacacatgacatgtaagacgactatcctttgctgtggcctgggtgaattcattctctaagctactcttgcagcggctcacaattcatcgtcctgactgcatgcattgtactgtcatgattctacgtattgaatgttgtattcatgcc

SEQ ID NO: 92497 - DNA, 761 bp, Zea mays
  unsure (1)..(761): unsure at all n locations
  Clone ID: MRT4577_18434C.1
ccggccgggagaccgtcatttttggttgtctactatcgcgattcagagggttctggcatcccttcccgcaaacaaacttattacactcgaactctctcacgaacaaaacagcccctgcaccggtctgaactcttcgaactgtcccgcctgaagctgcccgtgatctcaaagtccgaccccaacctcgaatacagatttagtcttcctcgctacatgacccaacgacaacccacgcgccaacttgaattagtgctggcttaatatttcctcaagattcggggcctcctaccttccacgatcgcaagcatggccgactcttccctcgttgatctccatgatgcgtccatgtcggacgacaaggacgacctcgactctctcccctccatatcaaccgacgacatttactccgatgtttccgactcagatgcgcaggccgagtgggagcgcagtctggagcagctgcaattgatattgactatgatgatcgtcccctggatgggtaaatactttggtcgcaagtttgcctactggagttggtcgcgatatatggaatgggcacatanacgtcgatgttcgattaacagataaaaaggcatttaaggcggcgggtgtcgttgagactgccgcaacattatagacgacatatacgtccaagaacgaggggcattcgaaagacaaacacgaatgaagaaggatccttaggagcacgcatggacttcagtacggtgtttggggtattttctgatcgcatattttaaaat

SEQ ID NO: 92498 - DNA, 735 bp, Zea mays
  Clone ID: MRT4577_184350C.1
cgttcgcgacgggtgcggccagtgcggagcttcggctttgtgcatacaactccattcaatagccatggccacaaagtgtttgtccaaagcccattgatacccggtcatggcgatggatctaatgtgccagtcatggatgacacaggttgcgacatgccaggcaagaacagtgcccgaccaaggagtcccagtgatcacagaaaacgcaatgctggattttatgtacaacaaagatcaagccggtaatatcgacgccacagatcctagtgatgctacatacattgctagtcttcaagatgatgatgacatgaaagagcaagcatgaatggtacatacaaatgtgctattccatgcattaaggaatgatgctcaaaattttgcatatcctcctgaagggaaatattattgtgccgatacttggcaccatataagggtcaaaggtaccatgttcaagattggaggaggggacccgcaccaaatggtgaacaacaacactttaaccatttgcattgataacccgtaatatggtggagcgagcatttagggtattaaaatgaagtggagagttctactgaaaatgtcgttttacaaaatagaagatcaaaagatcatcgttgcagctactatgtgtttgcataactacatttgagaaaaccatgttttagataaggattttgtgaaatgtgatcggaatcctaaatatgtgcccacatttctaaaaaggtatgctatatt

SEQ ID NO: 92499 - DNA, 315 bp, Zea mays
  unsure (1)..(315): unsure at all n locations
  Clone ID: MRT4577_184351C.1
attatttatcaatagatattttacaataaataaacacaatgtaataagcttanaataatatgattagccatattaacattaattgaaattaagctttatatgtcattagtaataataaaatccatatactattattagctatagatgacttttaaatagtttaaacgatgcatattatatttttttgttgtattgacattgatagtgtttatattactagttagccatagaaataagtatttagatgcctttatggggggtagtctgttattaaatgatatggatgagatcggagattttaattttttttagtat

SEQ ID NO: 92500 - DNA, 557 bp, Zea mays
  Clone ID: MRT4577_184352C.1
ggtacctcgaggccggccgggttaaggaaggggaagaagtgtctctagagtcactgaaggcgaaaggtgtgattaatccatcaggaagagaaaggagacttcctttgaagatcttgggtgaaggagaactgagcaagaagttgacattaaaagcccgcgccttttccacatcagcaaaggagaaacttgagaatgctggttgttccctcaccgtgcttcctggccgcaagaaatgggttaagccatcagttgctaaaaaccttgcccgcgctgatgaatactttgccaagaagcgcgccatggctgcttccgagccagcctcagcttgaacttgagccagcctcagcacgcactagattttttttgacaaagttgcttacgtcaacaagatgattctgtaattctaagctatgggtattgtttgtaatgcttccccatttgtgttgattttgaatctattcctcttaaaagccactgccaaaagcaaaggcaaacaaatggtggttgtgtgaacaccaactttattttgggaccaaaaaaaaaaaaaaaaagcggcc

SEQ ID NO: 92501 - DNA, 365 bp, Zea mays
  Clone ID: MRT4577_184353C.1
tctatgggaaggatccattcttagtagcagatgctactcggccgggatcatatcgtctcactcaggtggactttcacggaaattgggaactcatggaacatagaacacctcaggaagttttacccctagctacatcccagaagctcttggaacgacgatgtattctgtaaatcgagaaatatatcatcaataaaaaaaggtttcaaaggcactcagattgttcgctgtcaattggcatacttacttaactcggggtgaccactatgccctactaatggagcaatcggcttatgtcgacaatgacttaaggcggtgcgacttgctcacgcttactttactcggtgtgaccactttgcccctactta

SEQ ID NO: 92502 - DNA, 267 bp, Zea mays
  Clone ID: MRT4577_184354C.1
cgcctgtctgaacggcctgcaatgcatgcgacagtacagaggctctaacgacgccgaacgcatcatacacctatgatgcgcgagtactgggcgccacaccgagaccccgaaacgcgagcgcagagaacagacgatcggacacgcataccaaaacagcaccgcctagctaaactaagggacctgaacctgcctctacaagcacaggcgaaacgacaggaagttagctgccgccatcgggtgctgctacccggagcccactggcaagga

SEQ ID NO: 92503 - DNA, 194 bp, Zea mays
  Clone ID: MRT4577_184355C.1
gtttaacctaataaaggacttgggaaatgatgaaatgatgtaaggggtggcagacgaagtttagagcgttacggaactttaagtctgaaaaacttaagaaaagacttatatattgtaaaacctaagttaactgaaagtccaaagacctaaagactatttctttttaatctgaatttgctcaagaacgattagat

SEQ ID NO: 92504 - DNA, 232 bp, Zea mays
  Clone ID: MRT4577_184356C.1
gaaaaccttcccctttcttccctcagaatatggggccctgtgctggtccactcggtgcacgtgcgtgaagtctggacctgtttgacatattgcgcatattgtgactagttgatgcatgcatgcaacctttcctgtgactttacgatttgatccctggggcccttggatctgaccctgacagcctgcggaggaacagtgcaggtggagttggtgcactgccggtgggcgatgc

SEQ ID NO: 92505 - DNA, 425 bp, Zea mays
  Clone ID: MRT4577_184357C.1
cgtgacgccacccgcccatcggctacacaccataaccggaacgttcctgccaccccgggggagcggctcacttgctgccgtcgccgctcggacgatggactggtacgcgtggctctgcagggtggggctgcacccggacgtggccttggagtacgcgctgctcttcgcgcgcaaccagctcggcgccgccgacgtgcgccacctggaccacgagttcctcctcagcatgggcgtcgccgtcgccaagcaccgcctcgagatcctcaagctcgccagaaaggagtcgttgtcgtcccaccgcaaggccgccgccgccatacgtcgtcctgccgtggcgcgccaccaggctgctcgccgcggcggtgcaccggtccgcgcgctcggcgctcggtcgccttcgcgcctgtcgggacctgaaccgggag

SEQ ID NO: 92506 - DNA, 749 bp, Zea mays
  Clone ID: MRT4577_184358C.1
atgggggggtttatttttatttgggggggtcaattcctgcacggtcctaaatctttcccaggtcaacagagtggcaagtacacgagtatgtacatgtacatatacgcatattaataagtgacagaatagaaaggtcttggcagtctgcataccactgctatgaagcattacattaccactcgttatttgtttctggcgcgtcgtacatgtaatcttgcctttgcatacacagatcacatacgcagagacgaacattcacgcatatataccatgcacgtagattgctacacgacgggatccatcacacattcacatgtcgacgttgcagctcgggtcaccaagaagcggcgccaggggcacaccgccggcgccgccgttcccgatcccggatcttgcggacgccgaggaggaggtcgcagcgggcgtagagcgagcgccacccccggtggaacggttcgtgcacgaaccggacgcggccgagcagcaccacccggagcggcagcacggcgttggccacgtccgccgccagcgccgccgcggcgtcgggcgacacgggcacgggcgccgcgacgcccgcccccagcacgggcgccgccgccacggcggtgccggcgtcctgcgccagcgggggcatgggcgtcggcgccgtcacggcctccccgcggtacgccacgtacgccgccagccggtcgtaccgcgccgccgaccgcccgctcgggttgccgagcaccagcgtgaactggaacgac

SEQ ID NO: 92507 - DNA, 190 bp, Zea mays
  Clone ID: MRT4577_184359C.1
aacaatccttgcacccctccccttcgtcaccccaccacatccggccagtccaacgaagatgtcgcgcgccacagctgcggtcctctcttaattcttggtcgtgcttgacttaagcgcggccgagcaacgggcagagtaaccgaaggcaggcagtcctgccaaggcaccggcgagtcaccgaaggcaggca

SEQ ID NO: 92508 - DNA, 397 bp, Zea mays
  Clone ID: MRT4577_18435C.1
ggccgcttttttttttttttttttcttttttttttatttgttttttttttttattttttttttttttttttttttttttttttttttttttttttttttttagaacaaaagaacaaaaccggatcccctttaatttttgctccggagaaacgatccgaaaaaggcattcatattcttggggggcgtattattgaaacatatgggcgaggttcaagctcattcctaatgccctatgcttttgccagtgacttggggggaattgctccgccgccgagaatccaggggcattcggggacgccgctgaggggggccaggttgcactcggcctccgggacgaggggggggggaaatcccctttgcacctcccgggggcagcccggaagggcctttaggcggc

SEQ ID NO: 92509 - DNA, 104 bp, Zea mays
  Clone ID: MRT4577_184360C.1
atagcgagcgcagaccagatatttctacagacgggatttaaggagtgatagccactcctctttgctggctaaagagatactgcagagaatagcatctaagagat

SEQ ID NO: 92510 - DNA, 256 bp, Zea mays
  unsure (1)..(256): unsure at all n locations
  Clone ID: MRT4577_184361C.1
gcccgttcgacgccaaacaccgactgaccgacacgactccccccttcgtcttccaatccgccgctgttcgagtagtcggaggccggggcggaggcgatgaatccactcacgcaggtgaaccggactcagattatcaaccagaaggaggcgctcatgggcatcggcgaggacgcgtcgtggcattcgangtntaaggactcggcctaagtctacgtcggcggcgtacccttcggactcaccgagggcgacctcctcg

SEQ ID NO: 92511 - DNA, 476 bp, Zea mays
  unsure (1)..(476): unsure at all n locations
  Clone ID: MRT4577_184362C.1
ctcactcctcagctcctcaaatcagaatgaatcaatccgcgcaaaattacttttccgtgcagaaaccttcagagacttcatcagggccgtacacaagtccgccaccaattggttatccgactagagatgcggtggtgggtgatcctccggcagcagcagtggagacaaactccaagggcgtcaaccccgaaggatgttgtgctgccatatgctgctgttgtgtcctggatgcatgcttctgagacttcggaattaacgatttcatgcaaattattgatgtaataaaagagtatttgatgctagttatgttacctactctctgtttggaatatactctgtggatggttgttactatgttttatgtaagtgattatatatatatatatatatattccgntgaattgggttgtcgaatagatccatcgatgattgaaccatcagtcagtaacgaaaggatgtgtttcagttcctcacgc

SEQ ID NO: 92512 - DNA, 233 bp, Zea mays
  Clone ID: MRT4577_184363C.1
ttttccacccgtctcgttaaaccccggggccataggccatgccgggggtggtttgaggaccaccaccggacaccttatctacaagctaggaggcatagacaagcgtgtgatcgacaggatcgagaaggaagctgctgtaatgaacaagcggtccctcaagcacctcgtgggtgcttgccaagcccaaggctgatcgtgcgagagtgatcaccatagttatctgctttgcggaa

SEQ ID NO: 92513 - DNA, 378 bp, Zea mays
  Clone ID: MRT4577_184364C.1
cggacgcgtgggaaaccctcatgcatctcgctatatttgctctccaaatgaggctgtggggttcagacctcacataggctgcacgcttggcgtaaagatggatttctaagaaaagaaaaaaaatggggcttactgcttacaatctattagttatcaaccacaaacactgtgagcttttgcagacagaaattgccttatttatatttacagatacagatcacactggttgccacctgcactgcatgatcaaaatgatgtctacgagagaaggggggaaacagaagaagaatctgcagatttagtgaaaccaaaacagaatggttcacactgtctgattgagattgagaatccatacctggtgaaattaaagaatattaa

SEQ ID NO: 92514 - DNA, 802 bp, Zea mays
  unsure (1)..(802): unsure at all n locations
  Clone ID: MRT4577_184365C.1
aattgaagctctagctagctagctactttgcaaagtttgcgtgcttcgatcgtctcgatggctgacttctcgtccagcaacggcgtcccgccggggttccggttccaccctaccgacgaggagctgctgctctactacctcaagaagaagatcggcttcgagaagttcgacctcgaggtcatcagggaggtcgacctcaacaagatcgagccatgggacctccaagagagatgccggatcgggtctgcgccgcagaacgaatggtacttcttcagccacaaggaccgcaagtacccgacggggtcgcggacgaaccgcgcgacgacggccgggttctggaaggcgacggggagggacaagtgcatccgcaccagctaccgcaagatcgggatgcgcaagacgctcgtcttctaccgcggtcgcgccccccacggccagaagtccgactggatcatgcacgagtaccgcctcgaggaaatcgacgaagcccagggcggcaccagcgaggatggatgggtggtgtgccgcgtgttcaagaagaagtgtttcttcaagatcgccggaggcggcgaagggagctcaagccagagcgcggacgccggcgccggccacatggccgtgtcgtcaccactgggtggccacgaccacgctgacagggccgccatggcatctcactacatgcacgggatgcacccgcagtaccacccccagcacgcctcttccttctactactcccagatgcaaccaccggaggcggnctactcgcaccacgtgcaggtccaggacctcctcacaaccaccg

SEQ ID NO: 92515 - DNA, 564 bp, Zea mays
  Clone ID: MRT4577_184366C.1
atggatcccccaccctcctcgatctctgctcccgccatcaacgcggccgccccgctcaccttccatcgacggggcagctccaaccaccgcccgccctcctcgatccgccatcgcgatccactcctcgacgcaatccatctacccaccgaactgctgtcggccggcgtggcagatctcctcctcggcgcgagcccgcccatcccacccgcgctgcccccaccacacaaccgatatgctctccatggaaggtcggggactccatggaaggtggtctactttcgatcggcctctcccacgtgctccttcgtcaaccccgtccgccgcgccgccgagcctcgagatcgcgcagatccgccattctcgcgccctcaccccgatacgcgctcaccaccggccctcaccaaccttcgcccgcgttccccacaccgccctccaccccatccgcgtccgccccatcccccccactcgcaacagtcgtcttgctcgccccgcgccgtgtccgcatctgcgatgaccgggatccacgaccgctacccccaccccggcttcttcctgccagtgtag

SEQ ID NO: 92516 - DNA, 1431 bp, Zea mays
  unsure (1)..(1431): unsure at all n locations
  Clone ID: MRT4577_184367C.1
attcggcacgacgatgacagctctctcacagtgcgaccatggtgaggatgcaataaaactgtttgtgcagatgttaagaaaaggccttgaacctgattcttttgtactaagtagtctcctaaatgcttgcgctagtctgtcagcctatgaacaagggaagcaagtgcatgctcatctgattaagaggcagttcacatcagnatgtatttttgcaggaaatgcacttgtgtacgcttatgcaaagtgcgggagcatagaggatgcagacatgccattctctggcctgccggagaggggaattgtctcatggtctgcaatgattggggggcttgcacagcatggacatgggaagagagcattggatttgttccatagnaatgcttgatgagggtgttgccccaaatcacatcacgttgaccagtgttctctctgcttgtaaccatgccgggcttgttgatgacgcaaagaaatactttgaatctatgaaggagacgtttggaattgacaggactgaggaacattacgcatgcatgattgatattcttggtcgtgcagggaaactagaggatgctatggagcttgtcaacaacatgccattccaagcaaatgctgcagtttggggcgcacttctaggagcctcaagagtacaccgagatccagaactcggaaggatggcagctgagaagctcttcaccctggagcctgagaagtctggtacacatgtcctgcttgcaaacacttatgcttcagcaggcatgtgggatgaaatggctaaggtgcgaaagctaatgaaagacagcaacgtcaagaaggagcctgccatgagctgggttgagataaaggacaaggtgcatactttcattgttggcgacaagagccatccaatgacaagagacatatatggaaagctagccgaattgggagatttgatgaacaaagctggttacgttccaaatgtggaggtcgatctgcatgatgtagacagaagtgaaaaggagctgcttctttctcaccacagtgagaggctggccgttgcgtttgcattgatcagcaccccatctggggccccaatcagagtcaagaagaatctgcgcatatgcagagactgccatgtcgcattcaagtacatttcaaagatcgtttcaagggagattatcatcagagatatcaaccggttccatcatttcacaaatgggacatgttcttgcggtgattattggtgaaaatggttcagcagatgataatttagattttagcagcttgttgagaattctgatgttttagagcagttgcatgccttcatggaggcttatagtttcacaagttttgtagccagtcagaggagcgatgcaatgcaattttttgtttgataaaaaaaaaaaaaaaaattttgcagctaaatctgcagtaaaaaaaaaaaaaaaaactcga

SEQ ID NO: 92517 - DNA, 770 bp, Zea mays
  Clone ID: MRT4577_184368C.1
aattcggcacgagggagagagagagagagagagagagagagagagagagagagagagagagagagagagagagagagagagagagagacttggcggcacggccctcgccgcctctccctgtgctcgcccaaatcgtcgcctctccctccctgtcgcccctgcgccacggtgcttcacgccgttgaagtcacttcactcatcccgccgatgcagtcgcccacaccgcctcctcccctcctccgctcaagccgcaccgcgacagctacacgccgcgatgtcagctgccagcagcgcccccctcttaacaacgtcgcgacgtcctcgtgggctaaaccccctccatcacttcttcccgtcgagatgcacaacaccgcgagatccatccaccttctccagcacccccacccccgctcaaatggtgtcgcgatgtccgccaccaacagcgccccttcccccctctcaaacaacgtcgcgacgtctgcgagttctgtaaggaatgatgaataactcccagtcgtgattattcttcttcagccttctatccttccgagttctttttggtgcaggtgcatgtggggtcatcttggcacgatgtgcgaccatcgatgaagtagcagctgccttcccacaacgtcactatccggctgctattttggccgtcgggtgattgagctttgaaacatcatgctaatggccatgatcaggcatgtccggtaaaaaaatttagccggacacgttaatcccaaaatcccgagctgcaaaacacaagg

SEQ ID NO: 92518 - DNA, 416 bp, Zea mays
  unsure (1)..(416): unsure at all n locations
  Clone ID: MRT4577_184369C.1
acncaanaaaaccaanttttaggttncagtttaaattaaaaatccaggacctgcctattaccctttttttggggggaaaaaaaggtgtttcaaaccctttgaaattaaaaatttctacccaccccaaaaatactaacgggcccttgtgttatgttgcttccagataaataaaatttggagtttttgcatgggaatttttcttgaacaaatccattttttttttcccgtttaatgcgggcgtgcccccccaaacaataattattttggcctggggcctggggtcaatcgtccccaaaacactatttaagggccgaaaccggggccgttttttttacatgttatttcgacaccgttttttttggcaccttaccctttcccaacaccattttttttaagggcttttcccggattatttt

SEQ ID NO: 92519 - DNA, 487 bp, Zea mays
  Clone ID: MRT4577_18436C.1
ccgcaaggaacttttttttttttatgggcggagatcgactcaaacccgatctcttcgtctatctgcttgtcaccttcatgggcaacatcaagatcgggatcaatgggtttggactaaccgacctggtttccgtcggcgcgagcctgtgtcttagcccgccgagtactacaaatcggttccacctataaataaggaaccgggaacattgtgtttttttaccaccgggctatgtccactcccgatggaggcaccatgatttctttacttagattaccccaagctgtgcaacatgttcgaaagagggaggctattgacgcggcacgaacccctggcaccactatccaggaaactcggtattcgccttatgatgcaatccacggggggtgtcacgttgcaacaagaggatcacacaaccagactggggctttcttatggatgatgatacatggcgcaatctcactaccggcgtaggctattattcgcccta

SEQ ID NO: 92520 - DNA, 328 bp, Zea mays
  Clone ID: MRT4577_184370C.1
caagggccttggtttccaacacagtttcttccacatcccctgacctggctagtggggagtgggatgcctggctgggccgggggtcagggagaggtgggtggcacatgttgtcatctcctctcctcccctccccactttcggtgctgaggctgcacccagaccctgggccaggggtgctgaggccgctaatggcatgtgctctcattcagcccgcccccttcagagggaagtggtgttgcccgctgtccttttgcctccacaccgaggttggtgctgtgatcttgtgggatggaccttttttcctcccgttgctttttatttaatgact

SEQ ID NO: 92521 - DNA, 242 bp, Zea mays
  Clone ID: MRT4577_184371C.1
gcgtccgcgccaagatgtaggccggctcgggcttgataaaaccatttttaaatcttcgaactgcaacaactggggggggggcgtcagactttatggcccaaggataaatctcttagttgaacactctgacgtgatgaatctggagcgcctatggtgctttaatatgcgcataatctacttgaccttactttttgtctagctgatctttctaatctataagtataaatgccattccccttcat

SEQ ID NO: 92522 - DNA, 605 bp, Zea mays
  unsure (1)..(605): unsure at all n locations
  Clone ID: MRT4577_184372C.1
gtaacagacacacatagagccatgagagcaaagcagggaatggaatggacaatggagatcctctccctccctgccttgctatttttcgccgctcgtgagatggcggcgggtgaaatgccctgacctgcgtgcgtgcatatgcccggggaacggacccgccggggctgaccgctgctagggcccggcgtcgtgtccggtagcggttggggcggaacggcgacgccgtcggagtcgcagtcgcggtcccggcttcctcctcatctccattgccttcggacgggccaaggcgccagtagcggaagcgtggacgtgagcgagcgcatccgcgcggccattgagagcttgtgcaagacttaaccgtttcgtggtgcgtcatgtcgtctaattcttcgaccggcccgcgcccacggccgtctccgtcgccgccgccgccaaaaagcagcccttctccttcgcactcaactgcgccgccgccgtcagcggactcgtcgtctccgggcccatcactgcccagcgactcctcgccgncaccggcggcgtccaggtcgcatggcgctcangcctnctcaccagccaagccccactcttcacgggagcaaccgtct

SEQ ID NO: 92523 - DNA, 452 bp, Zea mays
  unsure (1)..(452): unsure at all n locations
  Clone ID: MRT4577_184373C.1
ccttcgaaaaggatngggtantatgcctatataacgaaaaaaatcacaggtgaaaggagaagttagctgagttagaaaaggaacacttgatccacggtgaccaggaagttccagaagccataaaacaagatagcacagaaatttgtctgcgtgacattgaggttgagccttgcacgtcaccgagaagatcaaatgcgaacgattcaaggtatgacgaacttgtgaaactagactcaagcttagagcaaacgtcatgtgtgctcaaggaaatgaacaacaaaaatatggatcgcagtagtagcctcagtaggaatgagcaagagaagcagctggagtgcatcttagtatctatcatgaaactatcaaaagattttgtagagatcgagaaaaagatgtcagcggaaagaactgaaaacaggtcaaaagaactgagcgatcactgcaaccacatg

SEQ ID NO: 92524 - DNA, 360 bp, Zea mays
  Clone ID: MRT4577_184374C.1
gggaacaaaaaatttcggctgttacattacaggggacccctggccagacaaaccacccgggagatccatgggcgcccgcccagggcaaaaaaggggcccggaaaggaaaaaaaaccccccaagaagggttcaaacgagccctgaaagctaccattccaaaccatacgagttacattggggagtggcaaagggaaaagggaaagcaaactcgcaaaggccgaccgagctaacgcacataattaaacaagttcccggctggctaacatcaccaactcaaacttaatctgacgcgggaggcttaaacgctggaattctacaacacaggcttggggcgcttttttagtctttggcgcccctccc

SEQ ID NO: 92525 - DNA, 267 bp, Zea mays
  Clone ID: MRT4577_184375C.1
ggctcgagcacggtcaacccgcaccgcgtcgcgcacacgccgaagaagcgcagccgaaccctagctccgccccccgctcctccctccccggcggccgccgtccccgccgtcctcgcgccatggtacacaaggccctcaaggtccccttctccttataagggacgccaaaagcaaatgtcaaggtcaagatcacctgtagtccaatcccagcctagatctccatcgcctgatcctagagctcaggcgaggtcaagatctcgatgccct

SEQ ID NO: 92526 - DNA, 234 bp, Zea mays
  Clone ID: MRT4577_184376C.1
atgaccgtacaagctaatattatagccttgcttacaccattcagagaacaaaattcatatggccgaagtttgttggaggctaaactgggtagaaggatcctgacggcggccaccataccggagcggatgcgggaggacgtcgacggcgcgtgtcggcgtgtccggagcatgggcgggttcgacttcgactccgacttcggagaggttggaagtgtgtcaacgtcagcggcgtga

SEQ ID NO: 92527 - DNA, 499 bp, Zea mays
  Clone ID: MRT4577_184377C.1
gagacccgaacgaaacgtcgtccgcttccccaccttcgacactcaactactaccatccagcgaccaccggtcctccaatcggaagcaccaaccatggcggcggcggcgaagatagcgccgtccatgctctcgtcggacttcgccaacctcgcctcggaggccgagcgcatggtccgcctcggcgccgactggctccacatggacgtcatggatgggcacttcgttcctaatttaactattggagctccagtgattgagagcttgaggaagcacacaaaggcatatttggactgccatctcatggtcacaaatccttccgattatgtagaggcatttggaaaagctggtgcctcaggattcacattccatatagaagtagcgagggataactggaaagagctcacccaaagcatcaaagcaaagggcatgcggcctggtgtatcattgaagcctggtactcctgtggaggatgttttccccctggtggaagcagaaaccc

SEQ ID NO: 92528 - DNA, 179 bp, Zea mays
  Clone ID: MRT4577_184378C.1
ccacgcgtccgaagtcaagaaggaaatttattgccccctttttttcacctccaaggggggacttaagggggcatcataagtacctcagaagaaacctgccaaggtcgtcccaatgaaggaaccggttgaagagagaaaggatgctgctatgtatttggtgttattgatgtaaccaatga

SEQ ID NO: 92529 - DNA, 666 bp, Zea mays
  Clone ID: MRT4577_184379C.1
tctattctacgttttctctcttttatttgcctcgcgctctgctcgtcaggggatcactcggctaagtatactcaatttcttcacctcctccacggtcgacgcctaccacaaagaggaggagccgaatctgccctgccggtgcagattccaatatggtcagcggaaaaagatatgaatgaacaacaacattactgcgtaaaggagctaataatcgatgaatctgccgcagacaacgcttggctgctgctgaaagtggctcatgaaggatatctggacaattatataacgactattgaacttgatcatgaagaacgcaccgaacgacttttttttttacacgccccgccacagatttgagatactgctggacaagaatcgcttgaggaccataagaaaaagctattaccgtggagctcatggcattattcgagtgtatgatgcaagtgaacagcacacgtataacaatgtctagtaatgggtgaatgaaattgataggtatgccagcgaagatgagaacaagctattgcagctaaactagtgtgacctgggtgagaacaaaggattttcttaagaggatgacaagggcctagctgatgacatatgaatacgattccttgagaatagtgtcatggatgagacacatgaggagaaagaattaatgaacat

SEQ ID NO: 92530 - DNA, 160 bp, Zea mays
  Clone ID: MRT4577_18437C.1
agaacttccagaagtgggcagctgtggtggtgccttctggagaagagcagagatacacatgccatgtacagcatgaggggctgccgaagcccctcaccctgagatgggagccatcttcccagtccaccatccccatcgtgggcattgttgctggcctggc

SEQ ID NO: 92531 - DNA, 372 bp, Zea mays
  Clone ID: MRT4577_184380C.1
tatcaacacacgctaccaacaatcaattaagctgctgcagcgaaccttgctgcgtacgtgcagcaacatctgttgcttccattcaatctactatctggcgtgaaccttgatatctacttgcaggcacaactgctactaccatataactaactcgactagagccctcatgccttcttactgctacaacagctgatgccatttcatctgcaaactgtggcacacattgacgcttacttgagacatcaacattcattgacctttcaccaacaagtagtgttaaacatttatgccttcatgcaacagctgcaattgctactattctacccactaaaatgtgacatacattgtaccactgcttacaacagctgccat

SEQ ID NO: 92532 - DNA, 249 bp, Zea mays
  Clone ID: MRT4577_184381C.1
caactattataccctccacagggctacagagacggtggagatgtatttgaagtcacaaagttatggcctggccgagttgcactaattggatgatccagtgctggcaacgtgactcttgtaacgatgttgacagggacacattttgcagctgcatgatatgacttcacatcacttacttgcattcctggaattgttcatcgcagggactcgcaaagtccagctgctttaactagctggtatcattgaacg

SEQ ID NO: 92533 - DNA, 342 bp, Zea mays
  unsure (1)..(342): unsure at all n locations
  Clone ID: MRT4577_184382C.1
tcctgaatatcgggcgcgaagggggggtccacgctgattctagctgctgctcgcgccgctcgccggggcgggggagatgtcaatcgtctgctacgagggagcggatcgagcatgatgcgctgatgatgtacgccgatttgatggcggagcacggccggacctacaactttttctgcgaggaggagggcaagttcgaggtgttcagggacaacctgcagtacgtggacgcccacaacggcggctgcgactggggcgtccactccttncgcctacgggctgaaccgttggggccacctcaggaacgacgagtaccgggccacctaccttagagttgggagcatg

SEQ ID NO: 92534 - DNA, 332 bp, Zea mays
  unsure (1)..(332): unsure at all n locations
  Clone ID: MRT4577_184383C.1
ggcggggacccgggggactaccagctgagtttaagcatataaataagcggaggagaagaaacttacgaggattcccctagtaacggcgagcgaaccgggagcagcccagcttgagaatcgggcggcctcgccgcccgaattgtagtctgnataggcgtggtcagcnagggaccaaacccnttttntctgnaaaggnacnccngnnanggagagagccccggggggccgggaccctccccccccaccaggcgccgnnaacgagnggggnggggngggaaggcagnccaaancgaaaaaaaaaaaaagnccaaggcgaagggcaggcgagagac

SEQ ID NO: 92535 - DNA, 306 bp, Zea mays
  Clone ID: MRT4577_184384C.1
acccactcctacccaccactcctcccacacctcataacaagaactctaccaacactacacactcaatctacacttcgcccactctgatccctttaaccatcactaaccacccgactacatccatatcctcctctcctaccacactaacaatatctaggacaccatcgacgcctccatcatctcactccactccaaccatctctcctattcttactatttctataacaatattaatgatctctataaccttttcaaccccattatatccaaaatttaccaatgctctttttcctacattttattctc

SEQ ID NO: 92536 - DNA, 230 bp, Zea mays
  Clone ID: MRT4577_184385C.1
ccttgggggggggtgaacgtgaagttcccgatcccggacgcgtttgcgatattcacgggccggaactctccaggaaatggtttggggcgtactgaaaatacaccggtctaggcaccaggaaacccggggccttacatggtgtccacaggcctcatggcctccaatagtggggctttaaattccattagtggattggtctgaacaacagcttatagcgtggctaaggttgc

SEQ ID NO: 92537 - DNA, 412 bp, Zea mays
  Clone ID: MRT4577_184386C.1
gaatcgtgaagaaacatttgaatcgtgatccattaccacctctaattgtggggctaataaattcatatgaatataaataatgtgcacgatgtgactcaagtaccctttgagcacactcaactccgaacctctgcaaccacaccgttgatttgttagagagtgatttgagcacgttcttgagctatgactgtgtcgttttgattcgtgagctctctcttactccagatttgagcacgttcttgtgtgtgttttctactcccctccttactccaaatttggttgtaatcatttgtgtaaggtgggagagacttcaatttgttgagatttctcacaacaggatattgatataaggaagacatctgtggcactcaagtttgatatttggatcacttgagaggggttgagtgcaacc

SEQ ID NO: 92538 - DNA, 425 bp, Zea mays
  unsure (1)..(425): unsure at all n locations
  Clone ID: MRT4577_184387C.1
gtccggcgacgcgtgctccgcggtggccgcacggtgcgcgcgggtgctcggggaggcgtcgcgctccgtcgccaccatgtcgacgtcctcctcccgggccctggacttcgcggtggcggacatgaacacggcggtgcatgtagcttcaggccgacttgcgggcgctcccgtgcatgctggccgtgaagctgggagagacgtccctcatggacaccatgcccgtcttcaccgtggcgtcgctgctggtggagatatccgngagggtcgagggcgtngttgacgccgtngacgcgctggcgacgcttgccaacttnaagcaggtggacgacgacgacgatgatgacgataagaagggagaagntgagatgacgattaaagtgtannngtttgaagaaatggtatatatctgagtagttattgggtaa

SEQ ID NO: 92539 - DNA, 826 bp, Zea mays
  unsure (1)..(826): unsure at all n locations
  Clone ID: MRT4577_184388C.1
ctgccagtgccagccattatagaaccccgtgcgccggctgccaacgaaatacacctaggactgaggcgtcacgtgactctctactgatgatagcatatactccctatctacccctcgtatgcgatactctgacataccgatagatctcgaccggcccgactgggcgaggcgtgcgtcagcaagccctcagctccgcgaatgatggcgcgagcgcccgctggaaggtcgaaccgctatgctcttagccttgtgttacctgttcgctgcctagctcatgtgaagcgcaggacgagcganagcctactgnctgtcgcgttcacagttacacgtctcagtatgccaggttgatgatagcagtcatgagctaaaccgccggaggaacccgcaactgttgaccgattcatctgtaagtcgacgacgctgtctacagactactataaagacgatcgaaccacctctccggagtaggatgcattgacaggtcacgtatcaagatactagtacgagatatgcgacaagaccctgaaaatgatattcttgctgaggaaggcatttatctacttccaaccaggagacccaggaaaccatcagagaaaggccctgccagcatgataaggacagagaacaaggctatgatggatctgcagaattcatgcgatagcagactttgagcagcatgatggatctgcatgaggttatgttcgagagataatcacgctactaaggacgccgatgatattccttctgcctcacatgtagacaaagacgagcgtgcctaagcaccgagattgctgactaggatctcccattccgagatgctgggatt

SEQ ID NO: 92540 - DNA, 525 bp, Zea mays
  Clone ID: MRT4577_184389C.1
acaaagtaccggtcattcaaaatatcagcagtgtcagtactcagtaccggtaacatggtcagaactcagacactgagtcttttgcatttcaggtagtgtatttactccaagttacaaaccatggaggtgcatcctatagcatataatacagattatcttttgtcgagctgctttgaccatatataatctccaagcaggaaatgcacaattcattgacagtaggaaagattaaaatgaatctagccaggtagatgacactggaaactatgcagactctaccattttgatgacttattagcgttgaccccgccgctgttttatcgagtgtaatctcttgaaggtgtgaatgttccaatgtttcagtggtcttgcaaaacgtatgaggctcctgtgtacctaaacagtcgttgcttaacattttattcatccttaatgcaagtatttgcaaaaagcatgtccaaagtactgcagttccagtaggcaaaaggccaactgttgaaacatttgatatcactaaagacatta

SEQ ID NO: 92541 - DNA, 401 bp, Zea mays
  Clone ID: MRT4577_18438C.1
gcgcagccatctagtgggtgggctccgggggggggacaggggatgcgtgcggatcggggggggtggacgcggcggtggggggcgcccagccaaacacgacttactggtcggatcgggacgactacatggtctgggacatggtacatcctacgcaggcaacaaatggacggggggggggcggcatcttctacgggccggaggggtgcgcggatcccatcaactttggacaggtgggcggtggcacaggaaatggtgatgatgatataaatactggtatggccggagggggctatgccggcatatgataaacactatttatggctattggcatgcagctgggacatggcactacctgaggactatatacgtaattcagggggaataatgtgcgtggggtgctt

SEQ ID NO: 92542 - DNA, 418 bp, Zea mays
  unsure (1)..(418): unsure at all n locations
  Clone ID: MRT4577_184390C.1
gggtcgcccagcgtccgatccaattcagatcagcaaagcggcagtgcgtagaaaggatcctccaacaaaacaacctgaagaagggcatcggtctcgtcgtgtgcccggctctgtcagcttccaacgcctcttcaatgcaaatgccctgcccctgcgcggggcttcagggcttgtacagcgcttgcgcccgcctggggacgataataggcgcccgcgggctgtacccctacgcggagtacctgaggcagccgcagtgcagcccgctggcggcggggccctactaccccncgtgtggggcagccaacgccatgtttcaacccgtccggcaacaatgctgccagcagcanatgaggatgatggacgtgcagtccgtcgcgcagcagctggagatgatgatgcagcttggagcgtggccgct

SEQ ID NO: 92543 - DNA, 636 bp, Zea mays
  Clone ID: MRT4577_184391C.1
atctacttccccacccccatcgccgggaagataccgctgccgccggcactcaccgcgatcgcgccgtcgcggccgccatgatccgtctccgcagctgcatcctcacccatctcctccattcgccccccgcctctcccatctctctccgccgtctcctctcaaccacagagccggtgccccccgttccggcaaatccgggcttcgccgtcgaggactacctcgtcgccacctgcggcctcacccgaccccaggccctcaaggcttcccttaaactctccggcctcaagtcaccctccaagcccgactccgtcctcgccctcctcgccggcctcggcctctcgagcgccgacgtcgccgccctcgtcgccgctgacccgcggttgctctgcgccaaagtggacacactaacctccaatgtcgcggggctcgccggcatgggcatgtcgcgttctcagatcgctcagctcgttatgctcggctgcactatcttccgctgcaaacccgtcgtctccaggctgcactactacctgcccctcttcagatccccggagaaactcctttccgttctcaagaagaactcctacctcctgtcatccaacatcgacaaggtgggtagagcccaacgccgtattcctg

SEQ ID NO: 92544 - DNA, 267 bp, Zea mays
  unsure (1)..(267): unsure at all n locations
  Clone ID: MRT4577_184392C.1
aaaacaacgggnggcacaaagggaaagcccaaccggagaggaagaaaaggccccacacnnnngcgaccaccaaannggaaccccacccgaggggggcgggggcaacatttttttttaaaccagacanagcaaaaagccccaagcagcacggggaggggcccaaagccgcccccgcgcccccccccgnncnngangacnccaacacgcccggggggccncccgccagaaaccaagaccacggagccaacgggaggggggaggaaaacc

SEQ ID NO: 92545 - DNA, 483 bp, Zea mays
  Clone ID: MRT4577_184393C.1
aaaccccagacaaaaaactttttttttggaccttaacccaaaagaaatctaaaagggggccccccccatggggggggggggggaaaacaccgcgggggttggcaaaacaaggggggtgaatggcagcaattggtgcagttggaagagggggcccgcgttaggcccaacgggctgggagaacggcaacaactgggggtgggtcaaaaagggggcagggctcaccccacctagctgggtgaatgggagaagttggtgccgctgtaaataagccggagagttcaatgccgctagttgggtgaaaggaaaaaattgctgggggggggcaacagggagccggctgaaagggagttggtggtgttgcaaataaaaagccgaggtcaatgaacccaggtgggtgaatggaaaaaaccgctgttgctgaaagtaggcaacaagggttgctagcacaaattgttgtagttgttgggccccgatgttttgggc

SEQ ID NO: 92546 - DNA, 462 bp, Zea mays
  Clone ID: MRT4577_184394C.1
tcggggcttctttgaaaactggtggaagattgttttttttctggccctttttcttttcggggtccttgtaaggttttctttttgcttgcttgcacatgggattcctacatccatgaatcgtgatatccgtcgtctaacctagtacgcaattctagctagtaaccagcaggatcaaatatacttcctttttcttcataaaaaaaaatatatagattcccattacaagtgctagctagtgcgcatgcactaactggtatagaatagatagatacaatattattctcgttggtgggcggagatgaaatatactatcgatcacgttgtatttgagaacgtagagaatatgttagtacacaacgactatatatagctaggcagcatgcaggtggccacgtactcattatcaatcacgttggattatgtctttgtcattatatataactctataaaaacctaatatga

SEQ ID NO: 92547 - DNA, 2632 bp, Zea mays
  Clone ID: MRT4577_184396C.1
aagacgcttgggtggccattacaccaacctccacaactccatcagggatgaccgctatatgattggccgaaggctgcacaactttggtgaggacacacccgagccgagtgaatctggagcaactatagggtcagatgaccaggaccaagctcttgtcctgcgagatcaggaagaggaagtggggttgaggatgaggcgcaataatatgcgtgcaaaccaacaacccaggctggctttttaagaaggagatagttttggatatagagctcataaccatggtataagctttggcctgcagcttctgcttgtgctttgtaatgggcgttgtagagggggtttatgtggttgcgataggaaagagtctaaggactgttctacgacaagtctgggagaaagctaaagtggttagtgattataagaactggtggcaactccctttcctgtggtagtcttggctgactgtaaatatcgtttgacagacactaccaggccaactcagtttgttgtttcttgtaatgactaatgaattaagttgaactgttgggtaactctttcctatcgcaaccacataaaccccctctacaacgcccattacaaagcacaagcagaagctgcaggccaaagcttataccatggttatgagctctatatccaaaactatctccttaaaaagccagcctgggttgttggtttgcacgcatattattgcgcctcatcctcaaccccacttcctcttcctgatctcgcaggacaagagcttggtcctggtcatctgaccctatagttgctccagattcactcggctcgggtgtgtcctcaccaaagttgtgcagccttcggccaatcagatagcggtcatccctgatggagttgtggaggttggtgaaccagacatggaacctctcgacagcagcgctgattgggcggaggctgctggcttttcgcgatgcttgctgccaacctgagcggagtgaagtgggcaggagtatagggtcggcagggcaggacagagatataggactgctggtgggcaaaaagtaggtgcggatgagtataacgcccaatgatacgacatcttgccgcaaaacataatgacaggggaaatgcaaatgaagccaatgatgtcactgaagaatctgatgtagatgatcagggagactctgagtatggctttgtgcttcgcatcgtgctcctgcttgtactggcatggatgacactactaatattcaatgctggaatgatagttattcctatctcgcttggccgtctggtttttgagggtgttccccgcctgccaatcacacatggcatcaagtgcaatgatctgttctcctttagcattgggtgctatattctctggagtgtggcagctgggaccagatatgccattgattacatcacatcacgacagctggggtttttggtacaacagatctgcaagtggtgctcaattgttttgaagagctctgttctcttgtcgatatggatctttgttattcctgtgctgattggactcctttttgagctgctggtcatcgtacccatgagggtgcctattgatgagagccctgtcttcttattgtaccaggattgggcactggggttaatattcttgaaaatatggactagactggttatgttggatcagatggcacctttggttgatgaaagctggaggtcaaagtttgagagagttagagacgatggcttctcccgtttaaagggtctgtgggtcctccatgaaattataatgccgatcgtgaccaagctccttactgctctctgtgtcccatacgtccttgcaaggggcatcttcccgttgctgggttacccactcatcgtgaactcagcggtgtaccggtttgcctggcttggaagcctgatcttcagcgcactcttcttttggggcaagagatttcatgtctggttcaccaacctccacaactccatcagggatgaccgctatctgattgggcggaggctgcacaactttggcgaggactcacctgagcggagtgaatctggagcaactatagggtcagatgatcaggaccaagatcttgtcctgcgagatcaggaagaggaagtggggttgaggatgaggcgcaataatatgcatgcaaaccaacaacctaggcttgctttttaagtaggaagtagttttggatatagagctcataaccatggtataagcttcggtctgcaggttctgcttgtgctttgtaatgggcgttgtagagggggtttatgtgttagtgataggaaatagtctaaggactgttctacgataaagcctggagaaagctaaagtggttagtgattataagaactggtggcaactccctttcctgtggtagtcctggctgactgtaaatatcgtttgacagacactaccaggccaactcagtttgttgtgatcctcttgtaatgactaatgagttaagttgaactgttgggtagatacgagatactaggttattatcgcgttcaaaaaaaaaaaaaaaaaaaaaaaaaaaaaagtactctgcgttgtgaccactgcttaaggcagtcttttttttttgggtcccatcttgtttttttagaaactgcaattgcattctgtttatatcatggagcatctagcggcttg

SEQ ID NO: 92548 - DNA, 502 bp, Zea mays
  Clone ID: MRT4577_184397C.1
cccacgcgtccggtggggttgaggatgaggcgcaataatatgcatgcaaaccaacaacctaggcttgctttataagtaggaagtagttttggacaaagagctcataaccatggtataagagctcataaccatggtataagcttcggtctgcaggttctgcttgtgctttgtaatgggcgttgtagagtgagtttatgtgttagtgataggaaatagtctaaggactgttctacgatagagcctggagaaagttgaagtggctggtgattataagaactggtggcaactcccattcctgtcgtagtcctggctgactgtaaatatcgtttgacagagcattaccatgccaactcaatctgttgtgatcttcttgtaatgactagtgagttaagttgaactgttgagtagatacgagatactaggttattatcgcgttcactcttttgtttttgggtcccatctttgtttttttagaaactgcaattgcattctgttttaaaaa

SEQ ID NO: 92549 - DNA, 697 bp, Zea mays
  Clone ID: MRT4577_184398C.1
agtgtatcgctttgcctggcttggatgcctgatcttcagcgcactcttcttttgtggaaagaggttccatgtctggttcaccaacctccacaactccatcagggatgaccgctatctgattggccgaaggctgcacaactttggtgaggacacacccgagccgagtgaatctggagcaactatagggtcagatgaccaggaccaagctcttgtcctgcgagatcaggaagaggaagtggggttgaggatgaggcgcaataatatgcgtgcaaaccaacaacccaggctggctttttaaggagatagttttggatatagagctcataaccatggtataagctttggcctgcagcttctgcttgtgctttgtaatgggcgttgtagagggggtttatgtggttgcgataggaaagagtctaaggactgttctacgacaagcctgggagaaagctaaagtggttagtgattataagaactggtggcaactccctttcctgtggtagtcttggctgactgtaaatatcgtttgacagacactaccaggccaactcagtttgttgtttcttgtaatgactaatgaattaagctgaactgttgggtagacacaaggtaaaaaaaaaaaaaaaaaaaaaactaggttgtatgacttccaccacttccaccatttttttgtcatctttgtttcttggcaaccgca

SEQ ID NO: 92550 - DNA, 576 bp, Zea mays
  unsure (1)..(576): unsure at all n locations
  Clone ID: MRT4577_184399C.1
naaaaaaccctagnatatatatcaacataactgagtaatgatccgtgtttgcaacaaatactcaagagtatgacattctgaacatatttcactgagtatatcaacataaactatggttagttatttatgctcttccatcttttaaggtatggctttgtgcttcggatcgtgctcttgcttgtactggcatggatgacattactaatattcaatgctggaatgatagtttttcctatctcacttggccgtctggtttttgaggctgttccccgcctgccaatcacacatggcatcaagtgcaatggtaatttgcatgtgattctacctgaattggtgttatataaatttaacttgctatgtttatgaatgacaagatcagtcatataacacatttgctgacaccttttggaactatcagatctgttctcctttagcattgggtgctatattctctggagtgtggcagctgggaccagatatgcgattgattacatcacatcacgacagctggggtttttggtacaacagatctgcaagtggtgctcaattgttttgaagagctctgttctcttgtcg

SEQ ID NO: 92551 - DNA, 158 bp, Zea mays
  Clone ID: MRT4577_18439C.1
ttcgcctcattgctacacaagctgccgaggcgtatgtcaacgcgcacctcaccaacaccgaaatatacattccccaattctactccaccaggcgcgctctgcagaactcatccggattcttccgctctgatcgagagagtagatctggactcagtgcc

SEQ ID NO: 92552 - DNA, 423 bp, Zea mays
  Clone ID: MRT4577_1843C.1
ggccgcttttttttttttttttttctttttttttttttttttttttttttttttttttttttttttttggggttttttttttttttttttttttttttttttttaaggccaaaccttactaattcaggattaaaccaaaaggccaaaacacgggttcaagattaaaacgggggcggaaacccccatttttattacaggaggcaaactggctagggggctcacatttgaacactagaaaacgacgggggggcaactggtagcaaaccgccaaggggccattcatttttaaaacggggaaaacaacgggggggcagtctggggccatatatgggaaagggcggccgaaaacaaaacaaaaggcacccctgggatatcctcggaaaattttggggggggagaaaaagctatttttgaggctccctt

SEQ ID NO: 92553 - DNA, 1040 bp, Zea mays
  unsure (1)..(1040): unsure at all n locations
  Clone ID: MRT4577_184400C.1
ttgggtacctcgaggccggccgggatacnacacttttgatgttttaaatagagacactcataaatcattactgagcaatttatatgacgatgaatctagtgacacgaaccagtgttgatgatgagccaagctgaagaatttgaacgaggacccctaaaactttcctttaaacaacgagaaacctaaaacgatttagaggtgcagtggattggttacccagagttagtttgatttagatttgctctattgagctcttaagatgctttgtcatcaactcatcatttggtggaaggctatacaagtggaccgcatgttgcttactaatgttgagttagttgactgactcatctgtatttaccaattgcagattattgatttggcaacgctgaccggcgctcgcgttgtcgcactcgggcctagcattgccggtaagctcgacgaaagtttagcccatgcatcccataatcccacctgcaccatctggcttctcatgctgtgaacatggagcgctagattaatctgtttctgcggcgtactgaaagacttgttttcgataggaattttcacgccgagcgacgagcttgccaaggaggttgccgctgcttccgaggtatccggcgagaagttctggagactcccgctggaagagagctactgtgagtcgcgacagtctggcgtggctgatatggtcaacactgtccccacccagggagggtgtgttcaagacgcgctgttcctgttgaacaaaaaacatacccccctcgtatcacaatgcctttccatgcgtttttttttcctcctcttttgtgctaccattccatagttgcaaactgcagagcgcctcttggcatgccaagtgtgcgtgtggtaccgttgcgatagaataatcagcatgggtagtggtgtcgggtcctttccctgaaactgaaagaaagcagcggcgtgcctgtcgccttccggctgcccctgtggtcatgttgtgtaacgcgtctctgccgagtgaaataaggtttgcccctatgtgtttgtgccccccccaa

SEQ ID NO: 92554 - DNA, 380 bp, Zea mays
  Clone ID: MRT4577_184401C.1
gacattcaattattataattttttaaaaaaaatcaaggtctacgatttctttaagatcttacctcttatgaggtaaaggggtaccatagcaaagcccaatataatatgacgacaaagctcttgtcgtcccttctaaaaaaacaaaatagatgtcgatgtctctatgtgaaatagtcagagaaaggagtttaattccctagttatcttggtgtcttggcggttgtggaaacaaaggaatgcttgcgtgtttgatggggtacccgcagtatccgcaacattttgcaagagattcatgaggatgttaagctttggggaattagacagttgtggccttaatttagatggtgtggtggagggtcgccctttccctattgattcta

SEQ ID NO: 92555 - DNA, 693 bp, Zea mays
  Clone ID: MRT4577_184402C.1
aattcggcacgaggctctcagccatggaagtggtcgatctctcccccacgtcccgccccctctctccgctcctctccaccgcacccgcccgccgcctccgcctcctccctccccgctgcttctttggcctgcgcgcctctcctcggacccgaggactcggctgcgttggaggtagtctcagcagaaggcattctttttgtaagaacggattcttcgcaacaagcagttcgtcagcctcagtagaacccgctacccaggaattgggaacagcggatgcagtggagtggagtggggatgccatacgtcggcgtttccttgaattttatgcagcccgtggccacaagatccttccgagctcgtcgcttgtgcctgacgacccaactgtgttccttaccatagcgggaatgcttcagttcaagcctatattcctcggcaaggaacctaggcgtgtgccacgcgccactacctctcagaagtgcatacggacaaacgacattgaaaacgtgggtcgcactgctcgacaccagaccttctttgaaatgcttgggaatttcagttttggtgattacttcaagaaggaagcaaccacatgggcatgggagctggcaaccaaggagtacggattgcctgcagaaaggctgtggattagtgtttttgaagatgacattgaagcattcaacatctggcacaatg

SEQ ID NO: 92556 - DNA, 1714 bp, Zea mays
  Clone ID: MRT4577_184403C.1
ccacttcgtccgagatttcaccgggaagacggggcagtcggtggtcctccgcctcgcggggcagggcttcaagagggtgggcctgatcggtcttggtcagagcgccccgtccaccgccgccgctagccgaggcctcggcgagtctgtcgcgtctgttgccaaggccgctcaagctagcagcgctgcaatcgttcttgcctcccccagtgggatccaggaagagttcaagctgactgctgcagcagcagttgcttctggaaccgtgctggggttgtatgaggacagcagatacaaatctgaatcgaaaaaggtgcacctgaaacaggttgatattattggactgggttctggtgcggaggtggatcagaaacttaagtatgctaatgatctttcgtcgggtgtgatattcggaagagagcttgtgaactctcctgcaaatgtccttacccctgctgtgcttgcggaggaggcgtcaaagatcgcttctacttacagtgatgtgttcactgccacagtactagatgtagagaaatgcaaagaactaaagatgggttcctacttgggagttgctgcagcttctgctaaccctcctcacttcatccatttgtgctacaaacccactgatgggaacgtcaagagaaagctggctattgttgggaagggtttaacttttgacagtggtggctacaacattaagaccgggccaggctgcagcatcgagctgatgaaatttgacatgggaggctctgcagctgtatttggtgcagctaaagctttgggacaaatcaagcctcctggagtagaggttcactttatagtcgctgcctgtgaaaatatgatcagtggcacaggcatgagacctggtgacattgtaactgcttccaatgggaagacaattgaggtaaataacactgacgcagaaggaaggctaacacttgctgatgctttggtctatgcttgcaaccaaggtgttgaaaagattattgatttggcaacgctgaccggcgcttgcgttgtcgcactcgggcctagcattgccggaattttcacgccgagcgacgagcttgccaaggaggttgccgctgcttccgaggtatccggcgagaagttctggagactcccgctggaagagagctactgggagtctatgaagtctggcgtggctgatatggtcaacactggcggcaggcagggaggttctattaccgccgcgctgttcctgaaacagttcgtcgacgacaaggtccagtggatgcacatcgacatggccgggccagtgtggagcgacaagaagcgggccgccaccgggttcggcgtttccaccctggtggagtgggttctcaacaactcgtcctcgtcgtgaacaaaacccatacctcccctcgtatcacaatgcctttccatgcgtttttattttgttcctcctcttttgtgctaccattccatagttgcaaactgcagagcgcctcttggcatgtgataccgttgtgatagaataatcagcatgggtagtggtgtcgggtcctcctttccctgaaagaaagcagcggcgtgctggtcgcggtcaagccatgcctgtcgccttccggctgccgctgtgggcatttgtaacgcgtctctgcccagtgaaataacgtttgttccttgtgtttgtgcccccgcccaaaagaaagctgcatcgaaaaaaaaaaaaaaaaaaaattttatatttttt

SEQ ID NO: 92557 - DNA, 601 bp, Zea mays
  unsure (1)..(601): unsure at all n locations
  Clone ID: MRT4577_184404C.1
cggtagatgctactagatggaagtggaatgagtgaggaggaggagtgggagagaaggggcgtggctgatatggtcaacactggcggcaggcagggaggttctattaccgccgcgctgttcctgaaacagttcgtcgacgacaaggtccagtggatgcacatcgacatggccgggccagtgtggagcgacaagaagcgggccgccaccgggttcggcgtttccaccctggtggagtgggttctcaacaactcgtcctcgtcgtgaacaaaacccataccccccctcgtatcacaatgcctttccatgcgtttttttttcctcctcttttgtgctaccattccatagttgcaaactgcagagcgcctcttggcatgccaagtgtgcgtgtggtaccgttgcgatagaataatcagcatgggtagtggtgtcgggtcctttccctgaaactgaaagaaagcagcggcgtgcctgtcgccttccggctgccgctgtggtcatgttgtgtaacgcgtctctgccgagtgaaataacgtttgttccttgtgtttgtgccccgcacaagcacaaaagaaagctgcgtcggaacaaaaaaaaaanaaaa

SEQ ID NO: 92558 - DNA, 2327 bp, Zea mays
  Clone ID: MRT4577_184405C.1
ttttctcatgcgaacaggtgctccttaggagccgccccgcccgcggcatccgccgccgcgttctcgtgaccgccccggtccctgaatccgtccgccggcgccgcggccccgtcgagcctcctcgacctggccgggccagggtccggcgtcttgtaggggggcgcctccggggacgcaaccgcggccgatatataccaagcctccgcgctgcctctatggccaccgccgccacctccaccaccacctccgccaccgtgctcgcctccacgctcctccgccgcctgcctcgccgcctcagcgtgtcccgcgcgacgcccccggcagcctcgtcgtcgtcgtcgtcgcgcagactaccgtccctcgcccgccacccgctcggtcaccgcacccggatggggcacacagccgccgctgcggccgcggccgccgaacccgctctcggactcaccaagcccaacgccgtcgagccgcctcaggtcaccttttccgcgaaagacatcgaattctccgagtggaagggcgatattctcgctgtcgccgtcacggagaaggatctgtccaaggacgcggactccaaattcgagaatgccgtcttgaagaagctggacggccagctcggcggcctcctgtcggaggctgcggcggaggaagatttcaccgggaagacggggcagtcggtggtcctccgcctcgcggggcagggcttcaagagggtgggcctgatcggtcttggtcagagcgccccgtccaccgccgccgctagccgaggcctcggcgagtctgtcgcgtctgttgccaaggccgctcaagctagcagcgctgcaatcgttcttgcctcccccagtgggatccaggaagagttcaagctgactgctgcagcagcagttgcttctggaaccgtgctggggttgtatgaggacagcagatacaagtctgaatcgaaaaaggtgcacctgaaacaggttgatattattggactgggttctggtgcggaggtggatcagaaacttaagtatgctaatgatctttcgtcgggtgtgatattcggaagagagcttgtgaactctcctgcaaatgtccttacccctgctgtgcttgcggaggaggcgtcaaagatcgcttctacttacagtgatgtgttcactgccacagtactagatgtagagaaatgcaaagaactaaagatgggttcctacttgggagttgctgcagcttctgctaaccctcctcacttcatccatttgtgctacaaacccactgatgggaacgtcaagagaaagctggctattgttgggaagggtttaacttttgacagtggtggctacaacattaagaccgggccaggctgcagcatcgagctgatgaaatttgacatgggaggctctgcagctgtatttggtgcagctaaagctttgggacaaatcaagcctcctggagtagaggttcactttatagtcgctgcctgtgaaaatatgatcagtggcacaggcatgagacctggtgacattgtaactgcttccaatgggaagacaattgaggtaaataacactgacgcagaaggaaggctaacacttgctgatgctttggtctatgcttgcaaccaaggtgttgaaaagattattgatttggcaacgctgaccggcgcttgcgttgtcgcactcgggcctagcattgccgggattttcacgccgagcgacgagcttgccaaggaggttgccgctgcttccgaggtatccggcgagaagttctggagactcccgctggaagagagctactgggagtctatgaagtctggcgtggctgatatggtcaacactggcggcaggcagggaggttctattaccgccgcgctgttcctgaaacagttcgtcgacgacaaggtccagtggatgcacatcgacatggccgggccagtgtggagcgacaagaagcgggccgccaccgggttcggcgtttccaccctggtggagtgggttctcaacaactcgtcctcgtcgtgaacaaaacccatacccccctcgtatcacaatgcctttccatgcgttttttttgttccctcctcttttgtgctaccattccatagttgcaaactgcagagcgcctcttggcatgccaagtgtgcgtgtgataccgttgcgatagaataatcagcatgggtagtgaaagaaagcagcggcgtgctggtcgtggtcaagccgtgcctgtcgccttccggctgccgctgtggtcatgtgtaacgcgtctctgccggagtgaaataacgtttgttccttgtgtttgtgcccgcccaaaaaaaaaaaaaaaaaaaaaaactcgaggctagttct

SEQ ID NO: 92559 - DNA, 305 bp, Zea mays
  unsure (1)..(305): unsure at all n locations
  Clone ID: MRT4577_184406C.1
cagctttccactctcgattactactgcggatcgcaatcacaaccacagggccgggagtgnagtgctctttggcgacctttctttgcatgttaaccctgacataaagaacagcgtcgtcggcttcactaccacgccggtcgccgagcctattcttactatccaggtactgttactgcacttgcttatggttctagctgctgtttggttctatcctgtttcacacgcttccaattgcaattggattgaatttctctccattttcaccacatcacgagcgttacaaaaaacaacttaccccgtttttc

SEQ ID NO: 92560 - DNA, 439 bp, Zea mays
  unsure (1)..(439): unsure at all n locations
  Clone ID: MRT4577_184407C.1
tccgggccgggacgtagccccagccccacgcccagcccgcgctcccacctcctctcctccgtttccaccccgtcgccgcctgtcatgatcaaggagctcgccgcctgctgcaactccgccgtggccgacgtcgaggccaagatctccggctccaacgtcctgctgcgcacgctctcccgccgcagcagcatccccggaggacaggccgtcaggctcatcgccgtgctggagggcctccacctggaggtgctccacctcaacatcagcaccatggaagacaccgtcctccactccttggtgctcaagatcggcctcgagtgccagctcagtgtcgaggatcttgcctacgaggtgcagcagatcttcggtcaggacacggccgagcagaagccgcaggcggaggagaantatcatcatctcatatactctgcagccctgg

SEQ ID NO: 92561 - DNA, 392 bp, Zea mays
  Clone ID: MRT4577_184408C.1
gtggagggattccaaaataaagtttttcaaccccgccacctcggggggggggcccgggcccaaattcccccaaaaggggggggattaacccgggtccatggcccgccttttacaactttcttaatgggaaaaacctgggggttccccaatttaatggcttgggggaaaacccccctttccccagttggggaaaaaaggaaaaggccccccccattcccctttcccaaaattgggcaaacctgaaggggaaaggcaatttgaaacggttaaatttttgtaaaaattcccggaaaattttggcaaaaccactccttttttttacccaaaaggggaaatcgggaaaaatccttttttatttcaaaaaataacccaaaatggggttatgggttttt

SEQ ID NO: 92562 - DNA, 385 bp, Zea mays
  Clone ID: MRT4577_184409C.1
ccgggggcgacccacgacgtccggaccggcgatgtcgccggcctgtatcatttcgacttccatgcaccctacgctgcggggcgggggtgttccccactggggaaactatgtgctgtagtatagccgctggctagctagctagttgagtcatttagcggcgatgattgagtaataatgtgtcacgcatcaccatgggtggcagtgtcagtgtgagcaatgacctgaatgaacaattgaaatgaaatgcaacaaaaaaaaatagaaaaaaacatactaataacaaccaatcgtctaacattaacaacacaccatttggggggctggacttagaaccacatccctttatgtcacaacaacaacacttaggggcggcccctttggggga

SEQ ID NO: 92563 - DNA, 493 bp, Zea mays
  Clone ID: MRT4577_18440C.1
ctaaaacaaatctgacagattttcacttatttgagattaaacctatcctatcccagtcaacccacatggattaagagcaaaacggacatgccctaacccaacaactcaatgagtgaaagaaacttccagccactgaatcaccaacggttcctgcgctgctcacacgataaaatcaaatgaatattaactgtatttaacccacctcaacaaacaaatcgcaagtacataatcgaacaatctagacgcctaacccaccctggcacacattatttcttgccgtgccccgcacaacggaatttgaatataaacatgcaaaagcacagctcaatggccttcactgcatcgcactgggcctgcttccaaatcacctgtggcctgatcacccatcctgaggcctgcattctatctaagcagccctagtttgatttcgccttgagggccttattcttgccaccctgtcgcttatggatcagagttcttcatgcccagaaag

SEQ ID NO: 92564 - DNA, 340 bp, Zea mays
  Clone ID: MRT4577_184410C.1
ccgcatctccaccaaaaaaaaaagaacaacacaaaacactaacttattttagacagcgaagatcggagaggcaagctaaaataacggcgtttgtgctcatggaaattcactctacttctcaacaaagctgctccactctccatggcactcgaccgagttttctattgtatgtgctgctaaacctagcttgtttctctattatgccaacagactgccctacaggaagttagtaagtattgtgaccccctctttgccaacgcccatcgccctttaactccaactggcgagatggttcaggactttgacgacacattactctttgcggtcagaaggctttgat

SEQ ID NO: 92565 - DNA, 185 bp, Zea mays
  Clone ID: MRT4577_184411C.1
tgacaatgaacacatatatttccttgtcgagtgaacattaattaacactcgggggacaaacctgaagaccatgcgttgcgctgcacatgcatgcaggacacctataaagtcacacgacggcgccttcctcacttgccaaaggacgaaggtgtgtggcctacgcccaagcgttgctgtttacgggg

SEQ ID NO: 92566 - DNA, 191 bp, Zea mays
  Clone ID: MRT4577_184412C.1
ccccaaaaaggggatttacacaacaaaacagttttcctggggaccttacccagatttggcccgggaacccaatcccaaaatgggccttccaagattcacaggccccctttcaaatgaaaaaaaaggggagggggaaaaaacaccccttttacccccaaataaagagaatttatgcgccatgctctcccccc

SEQ ID NO: 92567 - DNA, 615 bp, Zea mays
  unsure (1)..(615): unsure at all n locations
  Clone ID: MRT4577_184413C.1
aattcggcacgaggccgaccgccaccattgcccccgtgtcttaacacggggcgaaaattcctttcgagatctcgcttctctaagcttccgcggcggcacggtgatgactatgacccccgctccggtggcgaacggcgcagcggccggcgctggcgggggcatgaagcggcggggcggtaggttgtggtacgcggccgccggtgccctcctcgtggccctcctcgccgtggccgtgagctaccgcagcttcccgggcgtcccttcctccccctcgtcacctggaagctgcggctgccctgctgcgaggaagtacacggggatggtggaggactgctgctgcgactatgagacggtggacgccatcaacgaggaggtcctgcatccaatcctacaggaactcgttaagttgcccttcttcaggtacttcaaggttaaattgtggtgtgactgccctttttggcccgatgatggaatgtgcaagcttagagattgtagtgtttgtgagtgtccggagaatgagttccctgaaccattcaggaaaccttacaatggactttctccagatagtatgatgtgccaagaaggaaaaccacangctgcaattgataaaacact

SEQ ID NO: 92568 - DNA, 369 bp, Zea mays
  Clone ID: MRT4577_184414C.1
tcgtaaacgccaagcccacccagaccagcgggccgtattgcttgaacaccgggggccataacaaacaggaaaccgcgaccgaccaaagaccgcccacacagcgggggagaacacgacagagccaaacgcgccaaaagacctcccctgacttcgggagacccggcacctccgcagcacgaggaaactcacgcatggccccacgagacgccacaaccaagagagcctaacgccaggcaggcacggatgacatgcgcccagagctcgacatgaaacccaccgaacccctggtcatcactgaaacacacagtaccgaccaacccatcaccaccaccatcaccaccaccccgcacaacccccaagcacaaccaa

SEQ ID NO: 92569 - DNA, 1415 bp, Zea mays
  Clone ID: MRT4577_184415C.1
ctgtcactgaaggacagggagccctcgaggccggtcgggagtcctgcagcggcggctggggtttcgcggtgctgtggcggccgacgcccgtcctctactatccgtggcgaccatcgtcggctatccgcggagctatggcgatcggcctgtgctcctatccgcggttgccgaggaaagtactatgttgttgatgctggatatccaaatagggatgagtacttggccccgtacaaaggacaactgtatcatgttccggaatgaagaaatgatcctccacctaatggctcactcgaaggtgatgcatgggaagtgtgacacaggtccaacgtcctccatcagggttgagcacttggcttcaagtgagtcgcaagtccagtcgagtccatgaaggtgaagcttgggaggtaaaaaggaatctggaaagaataacggtggaagtaggttggccttataataggggaggagtagtagaaattattttccgcgtagtctggattttgattatttagataagattgtggtgtgtgaagaacaaaaagactcgaagaaagcgaaggagacattggccatcggaatcaggagtcaaaaccggtgcggtttggttgtccttgccttaggggtgtcgggctagaatttatttgcagccttccctgggttttatttgttgagctgtgcttgtggtctgtggagagaacagaggctagaatccaccggaggtgacattggttatcggaagtgacttttatgggtgatagtgccgattggaatgaagataacactgctctagtgtgtgaattgttctccgaacaagtgaagtcgcacaaccgttctggtacccacttagataaaacagggtacaaaaatgtgatggacaaattcaaagaaaagactgggttgtcctacaccaaaatgcagttcaagaacaaatgggagaagatgaggattgagtacacaaattggaaaagactatcgaaggaaactggtttgggatgggacaccgcgaaaaaaaacctggagtgcgacaaatgaaagcaatacaaaggaattgctatgtttaaagatgggcctctgttgcatgaggaagaaaaagccatcatgtatgaagatattaggaacacaggagatgatcattgggctccatctagtggtactacaccacaaattctggagggtgaaaccactaagaacactgatgacaaggatggagactatgaggccaatgatgacaaggatggagactatgaagaatgtgaagaggttcacctacaactgttaaaggaaagcgtcatgtttctgttggtcgaaaggacaagggtaaaaagcccaggtcattgggaggacattgggtgcaagatcaattgagcaaacttgtgacagcaagtgagaagagcacaacatcccgttgagtctttggc

SEQ ID NO: 92570 - DNA, 447 bp, Zea mays
  unsure (1)..(447): unsure at all n locations
  Clone ID: MRT4577_184416C.1
aatattgctgccgaccctgtcaaaagggccggccccagaccgtgcgggccggccggggaagggggggggggggggaggccgccaagcgtgaagtgaaaaaaggaggccattagggactagaagaatagcaagtaaaaaacaaaaacaactggcaaccaaaaaaccaagccgacccccgggcaaacggggggacccggggcgggcaccggcaggcgggcccgggcccccgacggggggccgccccagagaacgggggagcgatggtaagagggggtgcctgtgggaaatgggtgggcgctgtcagaggcggacttcatcccggccgcacgcctnaaccggaaaccaaggggtgccaaatgaaggacccaacagacaaaaaggggggagaacaaacagaaaaagctgggggcccaaaaccgggcgcccatccagaaaaaaagacttgcc

SEQ ID NO: 92571 - DNA, 914 bp, Zea mays
  Clone ID: MRT4577_184417C.1
gtgtccggcgctgctgctggcggtgctcgtcgtcctcctcctgctcaccccgccgtgttcatcggccgaggcgccgcctgagctgaaggctgcagcggtggtgcgacggcggatgctgctgccgctgctggcggtgtcgcggccgtccacgagccggcaggaggccgagcagcagcagcagatgcgggtcggcggcgggaccactcccttcaagcaggccgccgcgagcttcggccggaagatacccagatccggccggaatcccatccagaaccgatgacagagagagagggaaccggcctcgacatctatctgaagggctggtctggatcggaagagcgttccgtctcggtcgatgagctcagaaaccacacagcgcgatcgatccatccatccatctttggatccttggcgttgcgtcagcggctttttgtgtgtgtacaagcagctggcctggtgctagctagcttccagcaggagcaaaaccgcccagtcgatcagctccaaaacagataccagggcatatggcagctactactgacgaccgtgcgcgaggaagagggcgttccggtggccggcaggcagagagaggagggatcggatcgagagagtcacgacgaactcggcttggaacacacgagctgggcccagccgtctcggaagaaaggcggccttggatcggattctgatggggggtggcgctctttaactttctcggcagtaatgtttttgtccgtgcaaccctggctcacagagttgcagaacacttgtaccgttcgttgtacgacagcagtttcgactgcctttccttttttttctaaaaaaaagagcaggaataatgtaacagattgttcacccccgcaagctgtaatttggaaaacgacgacatgtatgaacgaagggtttaccttgtt

SEQ ID NO: 92572 - DNA, 738 bp, Zea mays
  unsure (1)..(738): unsure at all n locations
  Clone ID: MRT4577_184418C.1
cgagggccggccggggattgggacaaaaacatagcgagcccctccgccaccctccacggcgcccgtcctctgtcgttgaaggacagggagcggcggctagggtttcgcggtgctgtggcggccgacgcccgtcctctactatccgtggcgaccatcgtcggctatccgcggagctgtggcgatcggcctgtgctcctatccgcggttgccgaggaaagtactatgttgttgatgctggatatccaaatagggatgagtacttggccccgtacaaaggacaactgtatcatgttccggaatggagaaatgatcctccacctaatggagaatcaggaggatcagatcctcaggaggatctggagctaaagaagcaggagctggagctttgtcaaacgggccctaagctcactcgaaggtgaagcatgggaagtgagtcacaggtccaacgacctccatgaaggtaaagcacatggcttcaagtgagtcgcaagtccaatcgagtccatgaaggtgaagcatgggaggtccaagtgaatctggaaagaataacggtnggaagtaggttggccttataataggnggaggagtagtagaaattattttccgcgtagtctgggttttaattatttagataagattggtggtgtgtgaagaatacagaggctagaatgcacctgaggtgacattgnnttatncggaagtgacttttaacttttcataaagctcacatatttgtcc

SEQ ID NO: 92573 - DNA, 741 bp, Zea mays
  Clone ID: MRT4577_184419C.1
ctataataatacatttattaagtttcaagaagttcaatacaacagcaacactttgcacatacattatattaatatagcagcaacaattatacataacttaatatagcagcaacaattataacttaagattggttttgattgtagcgttcccacatttgtatggcaatctgatctcgaagtatgcttccagcatgatcttgtaagttaagagactccacatcattttgatagttcccatctccttcaggtaggtcgatatgatcacttggttggatataagtagattgctcatctagccacccctcatctccatttaagcctctaattatgttatgaaagacagttgcagctgctggaatttttatctgagattctatgggatgatgtgtacccactttcaggatttgaaatctcttctttagaaccccaatagccctctcaatatggtttctaaggattgcatggcgatgattgaatatttccttgtgattagcatattcacttgcacgagatgagcgtcgcctcctaaattcactcaaatggtaccgaactccacgatatggtgcaaggaattctggtgtgtttgcatatccaccatccacaaggtagaattttccttctggcacatgaaaacccttactaatagctgatcgaagaactccagcgtctgaagcagacccttcccatccacaggatataaatgtgaagttcagattaaagtcacatgctaccatcacattc

SEQ ID NO: 92574 - DNA, 343 bp, Zea mays
  Clone ID: MRT4577_18441C.1
acgggcgccagactagcttgtattgctgatgactctcaccatctcctctctcttattctttgctctctatgtgagttccaaccttctctcttaacacagcttcagagactcgcttgatcctgccaaccttgaaaaactgatagatacacttctcatatagagcaaacccatcaacctatctgtatcatacccctgaccatacacacctctctactatgatttcccctaccggggactcgggcggataagcacctcgctctagccgacgacatgacccttgttgatgccaacgaagaggaccgactttgactgcgagcggatgccatgagtacctcctgtcgat

SEQ ID NO: 92575 - DNA, 1240 bp, Zea mays
  Clone ID: MRT4577_184420C.1
gctgcatatatttttgatagcattccaatcgcaggagtaccctctaacagaatcacaatgaacagagacattataagcagcattcctttttgatagctgcatatatttgttttagattttatttttttacagcaatatgggtgatagtgccgattggaatgaagataacactgctctagtgtgtgaattgttcgccgaacaagtgaaggcgcacaaccattctggtacccacttaaataaaatagggtacaaaaatgtgatggacaaattcaaagaaaagactaggttgtcctacaccaaaatgcagttcaagaacaaatgggacaagatgaggattgagtacacaaattggaaaagactatcgaaggaaactggtttgggatgggacaccgcgaaaaaaacctagagtgcgacaaatgaaaggtggaagaacttgaataagcaatacaaaggaattgccaagtttaaagacgggcctctattgcatgaggaagaaaaagccatcatgtatgaagatattaggaacacaggagatgatcattgggctccgtctagtggtactacaccacaaattctggagggtgaaaccactgagaacactgatgacaaggatggagactatgaggccaatgatgagaaggatgaagactttgaagaatgtgaagaggtttcaccaacaactgctaaaggaaagtgtcatgtttctgttggtcgaaaggacaagggtaaaaagcccaggtcattgggaggacattgggtgcaagatcaattgagcaaacttgtgacagcaagtgagaagagcacagcatccgttgagtctttggcaagaaaggaggacaatgggtgctccattagagatgtcatggcattggtgaaggagtgtggtgcagttccaggaacaaaagaacacttcatagcatctcaagtttttatcaagagggcagagagggaaatgtttatgactttggacacactggaagaacgcttcaactggcttacaatgaaacatgattgggtcactaggatgattcactaggatctataattttttgtagcactatgtcccattttcagtgctattatgtatctgtttaatcctttttactgcggtttgaacttgttgtgacattattgtggatggattgtacctccatctattattgcaacatgtttggaacttgttatgagaattatgtttagctaaaaaaaaaaaaaggagaaaaaatttaaagattcaaaa

SEQ ID NO: 92576 - DNA, 668 bp, Zea mays
  Clone ID: MRT4577_184421C.1
tcctgaattgcatggtagcaatgtcaaattaggtacatacaaccaaaggatcctaatttccatacagtgcatagaagaattaccaatgatcaaagaatgtggcctcactttaagagttgtattggagcaattgacggcactcatataaatccaacgcctccaaagaaagacttgatcaggttcatgggaaggtctggtaaacctactcaaaatgtgatgggagttgttgattttgatatgcgctttatatatgcatctattggacaacctggcaccatgcatgatactactgtgttgtaccatgcgcttgaagctgatgaagatttatttccacacccccctctaggaaagtactatgttgttgatgctggatatccaaatagggatgagtacttggccccgtacaaaggacaactgtatcatgttccggaatggagaaatgatcctccacctaatggtgagcaagagctcttcaatcatttacactcaagtctacggaatgttgttgaacacacattaggtgtatggaagatgaaatggagaattcttctaaagatgccaacttatcctatggacaaacaaaaaatgattgttgctgctacaatgtgtctccacaatttcatccgtgagaataatgcattggatgaggattttcagagatgtgatcg

SEQ ID NO: 92577 - DNA, 294 bp, Zea mays
  Clone ID: MRT4577_184422C.1
aacaaaacatttaaaacacacagcatgcatacaagggcttaaggacattattgacccatgcacaaagctcatcgaaagccaaatggactggaatcgtataaaaacacgcccttactctccactaacgggtcagagcacaccttggtaaaactactaaatgcactaaatcggaggctggggccaatccaatcgaccttcgcctgacaaacactacatgtgagcgactctatagcgaaaacacgtgggaacggaacacataacgagcttgatcaccactccctcatgctgatgaca

SEQ ID NO: 92578 - DNA, 444 bp, Zea mays
  Clone ID: MRT4577_184423C.1
gggggggggaaccctgaattatggggattttgttaaaattaaggggaaaaaaccctcccctgttaaaaggaaattatgctttgggaaaaaaaaaaggggaactccaaagaaaaaaaaggggggggggaaaaaattaaattttgttccaaagggaaaatttgggggttgggattcgttaaagggggagctaaaaaagggggggccaggggaaccccccccctgggaaaggggggataaaaggggttttgggataaccatccaaaaattctttttttataaaggggggggggggccaaaaaaagggggaccccccccaggttgttgaggaaaaaccaacggcccttaaggggcgggaaccggggctgtggaaaatgccgcaggctgggggaaactttggggggaaaaaacccgggcaaaatttgtggggggaaaaaccccataggg

SEQ ID NO: 92579 - DNA, 342 bp, Zea mays
  Clone ID: MRT4577_184424C.1
tgcgaacgcccactcccacaaccgccgggggggactttctagtcaggggagggtttgcacctcccgcaccacgagtcacagggaggtacttaatgctaaaagactggcaggcaaggagcacgagacatatcggcctgccgtaccaactactgttaggcccgcagatcagccaaagaaccacaccacagaccaagactaataactagacaaaagcaggtagaccaggatggaggcgtagaacatagggagcttagtcaccgcatagttgaggaactgctcaaacccaaccaagtggcacccctagaaaatctacacgcacgctctgcagctggactaactgca

SEQ ID NO: 92580 - DNA, 324 bp, Zea mays
  Clone ID: MRT4577_184425C.1
cttgggacctggggagcgaccacaccttttatggcatatagcagcgagccgacgccaaccaggggtcagggggagttttaagagctggtccacaaaatacccacccgaccagaacattcctgacgagcaccatactttggtgccctacaagccgggcgaggaccgcaagctcggctcccttgcctgtgggagggtgaaatgagcggacgacccagcggcggtcgtcgctttgttgggggagaactcccgggacgccatgattgacggcggagccaactcagggtgcgggggctcacgcgagcacgcactctacactcatgggga

SEQ ID NO: 92581 - DNA, 503 bp, Zea mays
  unsure (1)..(503): unsure at all n locations
  Clone ID: MRT4577_184426C.1
ataaaaataaaacattcgagttcttttggggttggggttcttttctacacgcgttcattcatacaattatattttcacgcacatattcatgccatcgactgaatcataaataaaacgaaatcacaatttttttaaagcgaacaacctggccgactcgtgtcgcgcatgcctgtgtgctggtttggctttctgtcgaaatgacgcgcgaagcgcgacaacgacaagaggcgcggattgacggcatcacgatagggtctgcgtatatcgacaatgggtggcccgccctggcaagcgcgacacagcgaanggcgatcctgctgctacttgttgcggaattacgtcaagcacgccgagggcgcgacacggagggaatccacgtggctgcgcaaactggcgtcgtggctgctgcgcgaggtcgacggcgttgacgaccatgaaggcacgagcaggggcacgcgccggccatggggatttgcgtcacggtatccatggagaggagccac

SEQ ID NO: 92582 - DNA, 339 bp, Zea mays
  Clone ID: MRT4577_184427C.1
ccctactcctacggaacaatccatttagtttcaaactaatatacgtatacaaactcgatgggtctttcacaaaatctttatccttctcaacaacaagctcgttcattatcaataccattaagaactcatagtagtaggcccgtttaattaataaattatttactccggcatgccttgggcggtaggttttgtctcgtgtcttcaatgactgctatcagatcgttactcctttcctctcgctagcaaattctatggccccagatggtttactttcctgctacatttttgctctcctattgtcaaactactttacttcttacatgcacttatgtctttctt

SEQ ID NO: 92583 - DNA, 372 bp, Zea mays
  Clone ID: MRT4577_184428C.1
ccgagttatttatgtaattatgtacctcatattgaaaattgagctaaaaaaggcatgggagcatgttatccaatcccattctgtttgatttgttatatgatgcaaaatttaaattcgtccgcaattgtgacaccctcatcagttccttttttttctcgaaagcgcaagagagctgcgcgaaaatatattaagaaggagataaaggtccaaaaggaccccaagatacatggtacaaaaaaggctgccctacgaccctcatcagttccttgattgcacagatcaattagtgtttgcatcttacgccattgtgaatcttggttattcatattatatcctgtcatgcaaaaatttaatatcaatttgttcaaatgt

SEQ ID NO: 92584 - DNA, 290 bp, Zea mays
  Clone ID: MRT4577_184429C.1
cggacgcgtgggtagcagttttgtaacttgagagctctagagtggttactaagatgtaagatcaaaggaacataattaccgtgtgaagaagttcctttgcaaaaaaaaaaaaaaaaaaaaaaataaaaaaaaaaaaaaaaattataaaaaaacaaaaaaaaaaaacaaaaaaaaaaaaaataaaaaaaaaaaaaaaggaaaatatgatttaaaaaaaaaaaataaaagggcctccttttgggggggtctatttatgggtccccctttttcgaacgtaaaatttttcttat

SEQ ID NO: 92585 - DNA, 370 bp, Zea mays
  Clone ID: MRT4577_18442C.1
acgacgaaatgcatttcacattttacgggggcattgatgaccaccgtacaaacacattatcacatgaaataatttactgttcattatccaaactttattcgatatgaagctaacaatccaaagttcccatcatgatctcatattacaaactcgtttttactgactaacaaacgacacattacacattatggccaactacatttatatgataaaccacgggaagcacagattaaactagtggcagggaaggtggtggaatatcttacatgccacgccccatggtttgttccatgggcggcattatgacaaatactgagtgcccatttgtgaatccagggtggtgaacccttgcggtgtatatcgctaccct

SEQ ID NO: 92586 - DNA, 294 bp, Zea mays
  unsure (1)..(294): unsure at all n locations
  Clone ID: MRT4577_184430C.1
ccacgccatgggcgcgtcagcaaggaagcaaggcagccaggcactggatgcagcaggccccttgctggnatgctcagcgtgcnnagctctggcaccccacaccatcgnncttttgtcaagtccatgggcgctcangggccgccgtntgacctccgcatatgcggacgccntccacctgcacggggggtggggggccctctcgcngntngtccccnnggtcacactccacccgtgcgggcttccgtgcctgcgncgcctgntgcgcgtgctcnctgtcaccggtgtcttctgcgt

SEQ ID NO: 92587 - DNA, 1018 bp, Zea mays
  Clone ID: MRT4577_184431C.1
tttttgttgttataatttttaggagacaactcggtctattgtccctgcaaagaatgagaagaaagaatcctcaaacactggcaagcgagaaactaggaaatctataaaaaggactggtgatttaatctcttagccttgacacaacatatgcatagtgtgttacttggtgaaaacttatgcacaaaatttatgttgtcgctttcatgaaggaggcaggttacttggttttaccctttctgcatattatgcaaataattctcaaatgaacatttttcttaattttgtatcaacttttatattgtgttattctttcacgtgtgacctggctgtacagagatttatgcctctgcttctctatgctatggagtatcaaatctgttgattttttgttctgataatatagaatgataatggttcatgttgtgaaatgggtagatgatatcattccagatgcaccttatgccataactgaacaatacttattattgttttggtttcccacgcgtccgcagttggagtgagggatctgcttgtcaggtcatgaggaacatgcttgcaaatgagggtgtccggtcattctacaagggtttgtccgctggtttgctaaggcaagcaacgcacatagactgctcatcttggatccttcagctatggaatgtttgccaccagagggtgtgatagatttgtgaatgtgtgggatgacattaacaagagaatactatatcagtactcaaaagtgcgcatcaagcattgttgcactgtcattcggtaaggatggccatctgcttgctgtggcatccaactacacttatgaagagtgagaaaaaacgcactttgtctgacaaatctctgtttacgcaatattaaccgctcatgattctcctcacacttgtcctctttgtcgtcttgagttttatttgctgtgacttagcaaaagtgaattccactgatgggactaacgatacctcaatatgttttgtcaataccttaaggagtctattgtcctatttttctttca

SEQ ID NO: 92588 - DNA, 347 bp, Zea mays
  Clone ID: MRT4577_184432C.1
catctcccatatgcccacatgacacatccgggctcactatgccaccagcctccttcatccctcctgaaggaccctcctaagtctccaaccccatcccacagtgctcctgagaagagccgagacaatggtgagcacgatggccatgtgctccaagtcaggggtggtgtctccatcaaggaggggcccgaagcccttgtgggcgggcctcccctgagcccgtctgtggtgccagcccctagtgcattcaggcttaggctcccaggcagggacaccatccccctctctggaggacatgccttcttctcactctgtccactggcatctctcgcaccccatctgcccaataa

SEQ ID NO: 92589 - DNA, 202 bp, Zea mays
  Clone ID: MRT4577_184433C.1
tctgcgggtatctatgctcagtaacaatgtctcagtttatgtactatatagacacgctaacattagtggaatattgagcattttactgccttaactatcactgtatttccacttaatcacctcacaaaatactcttttttcatgactcatacataatttctgcttattaaacttaaaataatacggcctgccgctcatgcac

SEQ ID NO: 92590 - DNA, 230 bp, Zea mays
  unsure (1)..(230): unsure at all n locations
  Clone ID: MRT4577_184434C.1
ggattcaacacaatccacaagggaataaattgagtttacatgtccgatttaaccacaaaattggactgggtcctgcgcttaagcattttagccccacaagccttcttgaggtgtggcantgaaaggcgagcttagcaacaaggccaccgaataacacgttttaaaacaggtggcacagagaggtcaatggtttgacttccggtcacgggtccactggttaattttgggcc

SEQ ID NO: 92591 - DNA, 537 bp, Zea mays
  Clone ID: MRT4577_184435C.1
gggtacccgggccccctctctcgagtttttttttttttttttttttttttttttttttttttttttttttttttttttttttttttttggggcgggttcaaatatacttacttaaacaaccttatttaggatggattaaggggacacaaaacacgtttcgaaatgccccggggcgcgtaggccagggacgggcaaaatgctcacccctcacgggctttttgccagcgagggcagttgttgcaagaaaaaaaaaaagaaaagaaaaaaaaaaaagaagggggcccaactttggtaggtcgtttctagtttattaaacttcaaatttccgaacaatggatacaacaaccggtacattatccagtttgccgccggggtagcccaggtacccacccgggaaaggggagtccaaaaacgggcttttttcaaacccacaccggcccaccttttttgttggggcaaccaataaaagggggatttccgggggcttcaaatcagcttttaatgatttcaagacgaagcctgccactttttcctcgg

SEQ ID NO: 92592 - DNA, 548 bp, Zea mays
  Clone ID: MRT4577_184436C.1
gtccgcccaccagtgtgccgttgtcgctgaagaaagccagcaggcttaaggattgcatgcacatatgctagctgctagcttggtagtgtgacagaccataaaggtgtgagttccacacaggtacctcaaagctagctagtagctgccatggcagcactcaagctgaggctgagacatttgtgctgcgcggttgtgcttattgcgttgtccatctcttgttgcagaggacaaggaggaggaggtgctgctggtgcagcagggggcgcggcaggtggtgctgtggttccagggacacaggatgccatccagatcgtgtcacaggctgctctctgctttgacaatagacaggtgataaacgggtgcctccaagcaatgggcaacaatgtcaacagcaacggcggcaacagcaacggtggcagtagcaatggcagtggcggcggcagcagtggaagcggtggcagtagcaatggcagtggcggcggcggcagcagcaacagcgggtcaacggcaaccatgtgccaagggccgtgcttcgggcagatgatgct

SEQ ID NO: 92593 - DNA, 1484 bp, Zea mays
  Clone ID: MRT4577_184437C.1
acccggccggccgcggacgcgtgggaattaaactactggcatccctccctcgtccctctagggtggggaccttcctggagttcttgccatcagccgaccaccggttccgaattccgacacgacatcgccaaattcctggaggccaaaacgcgatggaactcccagatgaaagagtacaagtagatgcactggagagacacttactagctggtttatcttcaaacgactataatggaagttttgaggatgaggtcctctatgatgcatcatttgcagaaatggaagataattttgtcaagtatcaaattgctcagtggactttattatctctattactaatcgtagcttggggagtaggtgtgctcatgctactttacttacctattggggtatatgtatgtcgaagagactttcactcgaggaagctgtacttgacacctcatgctgttatttacaaggtaaacaagccttttgcttttccttgttttggagttttcaaaaaggagaaatattggatcctcccttcaatttccgatgttgttgttgagcaagattatctccaatccatttttggtgtatattcgatcaggattgagaatattagtgtcagaaagcctcctagttgtgatgtaaaaattactggggttgctcatccacatgatttcaggaaggccgttgtagtccatcttttgaacactaggaatcaaaaaacatcatcggatgaccaacagagcacaaatttgaattatgcagctagttcttcggaggcttctcttggagatttgatgctagagaagcttgatgaagttgaaatctctgtaaagaaaatgcaagcactgctacaggggcctgaaatttccaagtttaagaccacatcaggttgactccatgtatgttgacattttcacaggtgattgaagttgaaattgtttgactccttgggaaatgagaattgcgttctttttggaagtactagggagtacataccaaaattttgggcatgtccagctattggctgcggcagcagctgtacagccattcaacaactgtagcacatgcagccatccaatcagcagctggcacctcagcaaacagccgcttatacgcacagggaacaggccttactgcagaagtcccatttgtgcagaagtcatcaggttatgaaatgtaatgactatgtgtttttgtttctaataaataacgacgcaactgtaactacaaaaaaaaaaagttctgttaaagaatgcagtaaccagcaaaaaaaaaaaaaaaataaaaaaaaaaaaaaaaaaaaaagaaaaaaaaaaaaaaaaaaggcccctagatgtggttgcttgaagaactatttggagctttttgacccagatgctagctccacagtcaaaaggtttcgaaacatttcagtggttaatgtaacaggtgtttcctttggtggatcttaatctgatgaacgacagttcccccctctggttcattgatcctcc

SEQ ID NO: 92594 - DNA, 424 bp, Zea mays
  Clone ID: MRT4577_184438C.1
gtacgatatcatttttatgcactgggtttcgtcatgatatttttgctatcctgacgtgcaggaaattctcctgtacccgggatttgagaatacccctgtgaagtccggtatgtcccttgcgttaatttgctgtgtctttttttttttggattgcatcgtcggttttccccaccacagcaaaatgtcaagcatggtatcacatttgctaaccctgaaaagggggctaacaattattgacatattattgacgccatgtcaggtttttggcctctggtgccatctgatcgtcccgttggttatgttccggtcataccatcctggcagcaggcgtacatggttgacaggtgaatttcttctgcctttgcgaatccccctcaaagtatatagaggaagaatcctgttttgtgctatacagtttaacaag

SEQ ID NO: 92595 - DNA, 830 bp, Zea mays
  Clone ID: MRT4577_184439C.1
ggttcggccgggaccggttccgaattccgacacgacatcgccgaattcctggaggccaaaacgcgagtgagatgtcattaaaggttgcagtttgtttcaatgtgaacttttgcttcgactaatatggtgttacatccacaaatacatatgctgaagatgtatacttaagtcttggtttagtactcgaaacatggctttagttgcagactgcagcatggaactcccagatgaaagagtacaagtagatgcactggagagacacttactagctggtttatcttcaaacgactataatggaagttttgaggatgaggtcctctatgatgcatcatttgcagaaatggaagataattttgtcaagtatcaaattgctcagtggactttattatctctattactaatcgtagcttggggagtaggtgtgctcatgctactttacttacctattggggtatatgtatgtcgaagagactttcgctcgaggaagctgtactttacaccacatgctgttatttacaaggtatttgcatgttaaatggtatatggttttatgctcatgctattggtttattattttgctccatgatctaatcctaatccaggtaaacaagccttttgcttttccttgttttggagttttcaaaaaggagaaatattggatcctcccttcaatttccgatgttgttgttgagcaagatatctccatccatttttggtgtatattcgatcaggattgagaatattagtgtcagaaagcctccctagtgtgatgtaaaaatactggggttgctcatcacatgatttcagaaaggatcaaaaacatcatcgat

SEQ ID NO: 92596 - DNA, 335 bp, Zea mays
  Clone ID: MRT4577_18443C.1
acgcgtccagtggaaactgactggtgtcggggtagggcgaggtaatcatccgtcagcgcgttgttgacaacgacgacaactacggttctgtacggatggagattttggtgacatagtcgcttgattcatgatgactccactgacttattacacagttggtatggtctacgtggttcgcatcggaatcgacaggagtacttgagaaatctagatgagaaagttctatagctctgagacgtaatccatagtatgagtaccatctcctcagctactgctggagccgtcatgagagttgcatcagattagtatctacaagagaagaagctggtcctctc

SEQ ID NO: 92597 - DNA, 255 bp, Zea mays
  Clone ID: MRT4577_184440C.1
gactggcttaataatgtattggagccgctgtctagcttcctatctcgcttgtttactcatttttcggtgttgagttccgttgtgtcgcccatctccttgggcggccgcgcgcgcgctgtcctgggggcgcctttcccctggggggggggggggtgtccgggcccctgtcgctcgcccccccctcgtggtgcgtggggcgttctttgttcctggggggggttcgtttgtctcccgcccccgcggccccccctccgg

SEQ ID NO: 92598 - DNA, 214 bp, Zea mays
  unsure (1)..(214): unsure at all n locations
  Clone ID: MRT4577_184441C.1
cccacgcgaccgccagcgagcggcagagaaagcacaatagtgtactcaacaagtcatattacatatttcgccttcttatgctcctnggtatttctgcaagtgctgctacggcgacggggggggcgaatgttcacaagctcctatagcttcccttctccaccgaccattacagcgggtctcggatgtgaacccaatctcaaccacagaccacagc

SEQ ID NO: 92599 - DNA, 1117 bp, Zea mays
  Clone ID: MRT4577_184442C.1
tctcgccgccaccaacagcgcctcgccgtcggcctcctcctcctcgtcgctcgtctcggtggaggaggcacgcacccgagaagatggcccacgggtacctctccgacgggctcatgggcagggcggcgcaggagaggaagaagggcgttccatggacggaggacgagcacaggcgattcctggcgggcctggagaagctcgggaagggcgactggcgaggcatctcccggcacttcgtgacgacgcggaccccgacgcaggtggccagccacgcccagaagtacttcctccggcagagcagcctgacgcacaagaagcgcaggtccagcctcttcgacgtggtggagaacgccgagagggcggcgacgagctccatcaagggcatggagcgcctgcggctcaaggacgccatcacgaccgcgaccgcgactggctccgcagaacccggaaccggaacgacggcacagctcccgccggccctgtcgctcggcgtcggcaggccaccagcgaggcccgaccacgccgcgctgcctccgagcagcctgctgtccctgcagctgccgcggtgctcggcgggaattggccgcacggcgccgagcctggccctggcgccgccgaaacacagccacccttcttcgccgctgacggcggcaaaggctggtggcctggcgccggacctggagctgaagatctcgaccgcccggcagagcgagcaccagcagcaggtccagatggggccatcgctgccgccgccgccgccgccgccgcagaggacgccctttctggggaccatcagggtcacatgacatgaccggcaaagacggcggcggttagtagggaatatcctgctggtaggagaagagcttttgcccatctgaagctggagaaggttgcttcaaaagataggacggggtgggaaaactggaaagaaggaagcttttggcagcgtgtgcgtgtgtgtgtgttgctggcacctggcagtggcagccgagacgacgatggcgtcgtgtatcatgtgggtgttgtgtatatcatatcatcatcatccgaaagatggaaactttactggcctaaaaaaaaaaaaaaaaaaaaaaaaaaaaaaaaactcgaggagggg

SEQ ID NO: 92600 - DNA, 314 bp, Zea mays
  Clone ID: MRT4577_184443C.1
ctcacgacatcaccgagacgtgcatggatttctgcagatagtctcagctgatgctcacgccaagcatgtgctcatggtggggctacaagctagaggaaacccaccataccagtacgtggattagtacccgactggcttcaagtgcgtcagcaactagcagcctcctagcgttgtgcctggtggcgacctggccaatgtgcagcgttctgtgtgcatgatgtccaactccaccagtgttgtggaagtggtctcccgcatcgaccacaaggtcgatctcatgtacggcaagcgtgccttcgtgcactggtacgtcg

SEQ ID NO: 92601 - DNA, 281 bp, Zea mays
  Clone ID: MRT4577_184444C.1
tatgaacccctattgcatgaaaaaaattccgggatctagcttgttactgacaaggctggttttttacctacactaacttgaaagtaaagcatgcacggatccacgttctagatttttatgtgattccactatcacaattagcgttcttaagggcacccgcaaccgtgagatagtgtttggtcccagagctaggtgagatggagcgagctgactctatgtcaggagtagctctatccataagattttagggagctggataagacataattttcctttttaaa

SEQ ID NO: 92602 - DNA, 395 bp, Zea mays
  Clone ID: MRT4577_184445C.1
aaaaaacaagcctgggaaaatttttttataagggaaaaaacgggacatttttggcgtttaacacacaagcaaagcccaggggtacaagcaagaggccggcgggcacgtacatttttattctagcgggttcgattttttttccaacaacccaacccaaaaaagttggaggggaaaagggcattcgttcatgcactggttcactcgcacgggcttgttgacaacgtttttataagctagggcagggggtaatctccgcacttggagcccacggggcgggcggccatgttgcaacccttggggaaggaaaagggaacccccggtttgatcccggaagccctgggggggccggacaaaatgacgggccacaggcaggtggggctctgcccgatgggggg

SEQ ID NO: 92603 - DNA, 414 bp, Zea mays
  Clone ID: MRT4577_184446C.1
aaaaaaaaccaaaaaaaccctcttattggggggcaaaaaacccttccggggtaaaacaatccccctttttggggggccaggtttaaatccccccaaaaaaaaaactttggcccccagaaaaaacttttgggggcttttaaccccaaccccaggggggggcctaagggaacccaaccggggcctttttgccccccaatttacctttcccccacccaaatttagccccttcgggaaaccccaacctactttagggtttaccttggggcccaaggaaaaaaacccaagttcccggaccccaaaacctgggggccaaccgaccgggcccccagggggcccccccaaaggttttttttaacaaaaaaaaggtaaataaaaggccccgcaaaaaaaaaaggaaccctttaaatggggggg

SEQ ID NO: 92604 - DNA, 692 bp, Zea mays
  Clone ID: MRT4577_184447C.1
attcctcatcgctcagtcgctgcctcgcaccaaaacacaactaccaccagcggcagcagttcgactccggagaggcaaacatgggctccaccgcaaccgacatggccgcctccgccgacgaggaggcgtgcatgtacgctctccagctcgtctcgtcgtcgatcctcccgatgacgctcaagaacgccatcgagctgggcctcctggagaccctggtggccgccggcggcaagctgctgacccccgccgaggtggccgccaagctcccgtccacggcgaatcccgccgcggcggacatggtggaccgcatgctccggctgctggcctcgtacaacgtggtgtcgtgcacgatggaggagggcaaggatgggcgcctgtcccggcggtacggcgccgcgcccgtgtgcaagttcctcacccccaacgaggacggcgtctccatggcggcgctcgcgctcatgaaccaggacaaggtcctcatggagagctggtactacctgaaggacgcggtccttgacggcggcatcccgttcaacaaggcgtacgggatgtcggcgttcgagtaccacggcacggacccgcgcttcaaccgcgtcttcgacgaggggatgaagaaccactccatcatcatcaccaagaagctcctcgaggtctacaagggcttcgagggcctcggcaccatccgtcgacgt

SEQ ID NO: 92605 - DNA, 161 bp, Zea mays
  unsure (1)..(161): unsure at all n locations
  Clone ID: MRT4577_184448C.1
ggtccggtttccgggtcgncccagcgtccgcccagcgtccgggnaagtggnaattctccagttcgttcacctattctatccttnattgtggattctgcaaaacaacagatggagaagccatgatgctactggaagagaggatgaaagggtttccctcctgt

SEQ ID NO: 92606 - DNA, 277 bp, Zea mays
  Clone ID: MRT4577_184449C.1
tcggctcgagagctgcacatcgtggacggcgactgctggaacgaggcgctgttccacgaggccatgacgaaggccgtgcacgacgcgacctcgccttcctcctcgccctcctgcgccgccgtggcccccctcgtggccgcagcctaagctcctgcatatgcatgcatgccgcggatcttccgccaagggtcgcatggctgtgggctgtgagagccgaccggttcagccgcgccatcgatcgtcatgcgtgcgtcagtcgcttcagcctctcggcagc

SEQ ID NO: 92607 - DNA, 261 bp, Zea mays
  Clone ID: MRT4577_18444C.1
aaagatctaacacgtcatcgcgcgcgtcacacaaactctgaaaattcatctagaggtactatcttatgcggccatcagcatctgctctttcggagagatctctacctggcgtgggacgccatgcactcacgctcaagactgtcaacgccaacaaagtaagagatcgtagttcgcacctggagtattagaataccgaccgctatcatattaaaattacactcgaatgctactgtgcagcaaccttcacatacaaacgggtct

SEQ ID NO: 92608 - DNA, 366 bp, Zea mays
  Clone ID: MRT4577_184450C.1
ctcgagccgcacaaaatgcacgggaggacccagggcgccgccgtcagcgacatgacccaaccccttattctcgccctctcgatcatcagcatcatcgaccgccgtgcccgctgacatacgcacggtgctggacgaccccaccgatggctcctctggcgcggcatacgccgcggacgctctcttctgtgacagctggaggctgtatgaggagactgccaacgcggccccatggagcgccgtgccctagcgctacagggctatggcgcgggactacatggagggaccttggtacgcgtctgactccgccttcagctgacaccgacgccctagtcttcggcttctgagccctgagcggagcccagtggg

SEQ ID NO: 92609 - DNA, 367 bp, Zea mays
  Clone ID: MRT4577_184451C.1
tttttttttttttttttttttttatttttttttttggggtttttttttgtggggtggttttttttttttttttttggggaattttgcccaaattttttttggttttacacccaatttatttggaataccattacatacccgcaaaataaacctggtggtgttaaaaattttgggcgaacaccttttttatttaaacggccgggacggtaaaaaaaaggccgggagcaaaaagctttgggtttttttttcctcgatcggttaacggggacgggtgggtgcaaaaaaagaggggggtccctttttgggtaaaaggggccttttattattttttttcccatcgggggttttttttttgggggtgggttgg

SEQ ID NO: 92610 - DNA, 169 bp, Zea mays
  unsure (1)..(169): unsure at all n locations
  Clone ID: MRT4577_184452C.1
ctttgccggaccgcatccacccccccgagctgagcttgctccctccgctccatccagtcgtgaccgagcgcgagagctagcagagggccgtgaaaatgccgatcataggatcgccctggggagccaccaggaggtgtaccacccgggcgccctcaaggcggcgntcgct

SEQ ID NO: 92611 - DNA, 266 bp, Zea mays
  Clone ID: MRT4577_184453C.1
gcagctagccgaagcaaatacaatgttccatgagctgaaaggcaaggcatttgcactgttccatgcatggaacattcttaagaatgagccaaagtggtcagaagacaagggatcgaaagtaggcaattcaaatggcgaagctcattcaaatgtggagagacctctaggaaggaaagctgaaaaggaaaaagccaaagggaaaaagcgtgttgacgatgaacctgatcctcttcttgaggaagttaaaaaaattagagaatcaaggg

SEQ ID NO: 92612 - DNA, 847 bp, Zea mays
  Clone ID: MRT4577_184454C.1
cattgggtacctcgaggccggccgggatctcgttccgcctcctatcggcccacctccaaaccctagcccaccgccgtgctgactcccctagccaggcacgacgtcgaagagagcagcggcggaggcggcaacctgatgcccagccccccgtgggggccatggagctcgtcctcgtcaagcccgcggcaggagctctcgtcgaggtgggctccgggtccgttgccggcgcgggctcgatcccggcgatggtggcggcgcagcaggagattttgcacgaacaggtggaccagctccaacgcctcgtcgtcgctcagtgccgcctcaccggcgtcaaccccctcgcccaggagatggctgccggtgcattgtctatcaagataggtaagaggccaagggatctgttgaatccaaaagcagttaaatgcatgcagtcactttttgccttgaaggacatccttggcaaaaaagaaacccgagaaattagtttactctgtggggtcactgttacgcaggttagggaattctttacagttcaacgatcgcgagtgagaaaatttgttcgtctgtctcaagaaaaagcgctgagaatagagacacccaaagagcaggacaattcatactccataaacactgagcagataccgccggacatagaagcacaagctgaagttattgaacctttgagaactttagaaccggtggtcctacagagctctttgcaaccaacgtgtgtctctcagatctcttcgcaatcaatggagctccaacaaagcgatttgcagcacatggaagtcttcccaaactctttgcaacagcagaggcacacataacattgcagctcctatat

SEQ ID NO: 92613 - DNA, 329 bp, Zea mays
  Clone ID: MRT4577_184455C.1
ctttctcgtccgagcccggcgtactgcagatcgggttaccagtctacttgtacaagcagggatccgaaactgattatgaggtgtcattctaggacgagcgttgggcgacacaagcatttgagcttggctgtggagaaaattagatgacatctcaaagggttgcgcgtggagctagtgttacacacacacatgaccgggagtacaagatcacaggtgcatgtgtgagggagcaccacttattattagggaccggggatccgacaaagactgcttttgaggaggcctactgaacacagattttgccactggatattcacagctgagagact

SEQ ID NO: 92614 - DNA, 604 bp, Zea mays
  Clone ID: MRT4577_184456C.1
tccttcggttagcttcagtcctcgctccggtctttcaagtacgcaggattcgcttcctcgagaacgccgccatgctagagtgagcacctcgtcctctccgtttgcctcctcctccttctcctcctgtccaccgcctcgtgtgccaccgactccgactactgcagctcgaacgactagccggagaaggtgagcggtgtgcagatcgcgaccgatccggtcgaacccggcaagtgcgccactttcaagatctccgcttctactgatactaccatctagaaggtgaatttgctcatcgacatcctgtatttcttcttctacgtgtactcctagacccgcgacatctgcgtcagagacttcctgcccagcgactggtgagttcatgctgtcccaccagacatcacgttgctcacggcttacgctccgcgcgggtctcgctacgcgatctacatgaggataggcggggacgacaaccaggagctgacctgcatctcgactctggctcgtatgcggcttcctggcgtccagctgaacgcgtccaagaccgcacacgagaggcagcctgcccatggatgtaattacgtgaagcgcactctgtatccgtatg

SEQ ID NO: 92615 - DNA, 135 bp, Zea mays
  Clone ID: MRT4577_184457C.1
agcatttttacctgcagaaaaactttgtatggtaccactgtgttggttatatggtgaatctctacgtacatctcactggtataattatatgtagcactgtgctgtgtagatagttcctactggaaaaagagtgga

SEQ ID NO: 92616 - DNA, 383 bp, Zea mays
  unsure (1)..(383): unsure at all n locations
  Clone ID: MRT4577_184458C.1
actaaagnnanngnagananaaaaananaacanncgggcgggcgggggagagaatggtttctgctgaacctccaaacagcaagcgatgaatggagggacgcaagcaaaaaaccagaggtgcaccgggctccgccatgaatctgccttgcaacgggggcagctcgggaccagcgccacaagcatatgcgaatgtgggtgcagcaggctcgacactgagagcggaggacatgaaaaaaaacttaagcaccggttaaacagacccccggcgagtacaagagctccaaaaactcccgccgtgctggcttgatgagcaaagcgcggggcaacaccagcgggatccccgcgctggtagaagaaaacaacccgggcgcgctcgaatgggg

SEQ ID NO: 92617 - DNA, 160 bp, Zea mays
  Clone ID: MRT4577_184459C.1
tcgaggcggccgggatctccgttctcgtcgatgacgccttcctgacaaagtatcgacaacaagctgaacaatgctattactcatgaggagaagtagttgcctatgcatgactacgaggctacgaagagcaacgctgaacacatcgcggtaggagccaccc

SEQ ID NO: 92618 - DNA, 452 bp, Zea mays
  unsure (1)..(452): unsure at all n locations
  Clone ID: MRT4577_18445C.1
tttggggaaaggagggcacgggggaggggcacgaacaaaaggcccacacaggacaggaccggaccggagaacccccaaaaggggaggacagcggacggaggcccccccaaaccgccaccaaaacaacaagcaaaagggcaaaacaaacgaacaaaggtcaaacggaccgaaagaaggggaaactgtgttttgtgcaggcaggcaaancgaccgaccgcggcccaaaccatattaaaaccgaccccccccccaacggggaagggcaacactgcacggggagggggagcgaagcgagcgaaaaaaaaaaaacaaccaccgcaatgcagggacgggccaagcggccaagccccccggggaccgggcgacgcaatccaaccaagggccgcgcgcggggcggcgcaccccgcggacggcgcgccacaccccgccggggcgccggaagcccgacccca

SEQ ID NO: 92619 - DNA, 349 bp, Zea mays
  unsure (1)..(349): unsure at all n locations
  Clone ID: MRT4577_184460C.1
cggcgcccctcttttntttttttttttttttaacacaaacaactttttgggtttttttgtaaattgaaaaggaaacttcttttttagggccaatttttcgaaaacctctttacccaaaacccactacttcatggtcgctgactcccctgaatgtttttccccatgcccttaaatttataaacaaccacaactttgtgctttttttgcaacccccactatttataaagcgtacacaacgttaggaaaccctaaacaaaaacaaaactttttgctttccaaaaaacggtatttttacaatttgggcaaaagaaaaccccccccaatggcggccttaaaaatgtttttttta

SEQ ID NO: 92620 - DNA, 343 bp, Zea mays
  Clone ID: MRT4577_184461C.1
gacgactcgtttggacgatttgacggactactctgccgtcgtcgcggggggcgctctcaactacgccgccagggccgaactggctgccgtgccgggcgacgagctacttcacaatcatatgttccttgcaagagtaaacggctacggcggttacaagatcttactgccggacatagagaagtggctcgatggcagggctccggagctgcacgccaggctcgacgacgaggtgcgcgccgtcgtaccaccggtctgtggcagtgcccgcgacgctatcaccctatcccacgtggagaagatgccggtggagacttcttctgcctgggagacggtgggcacgaac

SEQ ID NO: 92621 - DNA, 340 bp, Zea mays
  Clone ID: MRT4577_184462C.1
cccacgcgtccgttcacgcacacgctatctttcaacttcaaacatgaccctctcacggaggacgctgtgcacaccttccatgtcacacataataaaccaccacgagcagattgctaaccgctctacaccacctctgttctaacactcctgacacattgccgtcaagagcacgtagctgatcaacaatatcgataggcagtctctcatagaccttgtcatgcatcacatattcctgctcaacgacgaagctcatgtggtgaatatcttttccactaatcccacatgagacaataactttcctgaatatgctacagaaagtcgcttttctctacgatacatg

SEQ ID NO: 92622 - DNA, 540 bp, Zea mays
  Clone ID: MRT4577_184463C.1
taggggccttttttttttttttttttatttttttttttttttttttttttttttttttttttttttttttttttttttttttttttttttttttttggagggccccccaacgcccttttaattattggatgggtggcaaaaagaacacaaaaggggaaggggaaaaaaacccaattttgaaccggggaacaacaagaaaaaaagatgttccctggagattgggacggatccaccggggctaggagtaaaaaggaaggtactaaaccatggaaagggggaagctggggttaaattttggcccgggggcccgggtgggggggctcctgggggcccttcttgatcggcaggagggccggggacccccaccccctgacataagccaaaaaggagcccccccccacaaaaaagaacttgggaaaaaaacccctcttggggaaaggaacccccaacctttcaaaaaaattggtccgtaaagggttggaaggggagggccccttaaaacccaaaaagtccccctggccggggggggtgcccaaggcc

SEQ ID NO: 92623 - DNA, 462 bp, Zea mays
  Clone ID: MRT4577_184464C.1
ggcaggcacgcctgcgggagccgggccggagtatattgcggggacgaccagctcttttatcggcggtcgacctgaagttgaatataaagaggaagatgggcactggcacaaagaactacaatcggattctatccatagatacacacatgactcttaaaagggctgactccagctgacaagaggggaactcactggcacttctatgacgcatgcacctatatgttcaccgaaagtgggaacacaatagtggactaactacgtacaccttggattcggtttgaagaacctgataccttttatgaacagagcgcgcgagtccacttactttgtctggaagtcgcatacaccagatcgggctgcaaacttatatacgttgcgttccatccacctttacaccgacttatccttggccacgagctacttacatagtgaatctcctgatgagaccaagaactggccata

SEQ ID NO: 92624 - DNA, 412 bp, Zea mays
  Clone ID: MRT4577_184465C.1
ctaactgctctgccccgtccgccccatgccgctcgttaaggttctgggatatgaaccaccatctcacctcaacgcaccacaagcttttacctcgttgtctttcctctctaccatcccatggatctcaggtgcagaaaccacagatttctcatacatactagtcgggagattaaatgaaacattcttagacctccaatcaatcgaggatccacaccaaattttgtcgtgttaagtaccctagaacatgtatcgctaaacctactcctaatcaccttcatcagtgatagttctatggcaagagacacatagatattaaacctatacaccttatacatgatcctcttcctgcttattgtcttctagaacaggataagaacactctgttctgctgtcaaccttattccatctgtta

SEQ ID NO: 92625 - DNA, 712 bp, Zea mays
  unsure (1)..(712): unsure at all n locations
  Clone ID: MRT4577_184466C.1
gccggccgggccggaacctcagaaatgcgcaaatggcctacagaagctacttgcccaatgactcctactgtccactgaactctgactgtacagactctcacaattacttggtatgggacacaatgtgtgtcgtaaggatacaaaaggcggtcgaccactgctagagcatgtctgaaaacctgcgacaccatgtgcccttccgtcgtcacggcggcgacctccaccatgtctgacactgccgcctgcgccactgccctgatccatgtgcaatgacaatccacactcatgtgtggtcaatggcgaactcccctatcacgaaagtgaagacgtcaaggacaagagacgaaaacggcaacatgctggtcatcactctacaactaaggaatcacaaggagtacaggactacaatgcacctatcaacccacaccgtccaggtcgtcacgggcttccaactgccgctgtaacggcaaggtatatcacgcgaacgctggccttgagaatgcaacgctcacactgaccgagcccaangcggtacgagaataaatctgacgtgaaggctattgacatatctgcatgagcatccaatccaataaggacctgaaaggaaggcgtactgctgctgctggtacgcggatgtcgctatgtagagtgatagctcctgtgtcttctacgatatataacgtacttctggttgaatcagctcatatgtaca

SEQ ID NO: 92626 - DNA, 489 bp, Zea mays
  Clone ID: MRT4577_184467C.1
gctctctggatgtatccacgtcgcccataatattttcacacttggatttctgatcaacggtaagggcatcgttttccctactgcaacttcgttctccacgcctctggaactttcttgaccaagtattccctctctcgtcaactgcgctcacccccgcgctacggaacctggtggccgtcgcctgttccgtcagctcttcctcccccaagctacagatcttcctcctagcgccctgcgcgaccccgagctacaggaatcttgtcctttcttggtgataccggtacacgcaagaattatcatctacccaccatctatccaaggaggaagtgccagatggtacaaaagagagtcacgaaggaccatgatagctcattagcctcctgccactttgtgcccccatgccatgatagtgcagggccacttaatcttgatgtcaatgacaagatgattacaggtgatcaacttgctattgggaaaggaaacaacacg

SEQ ID NO: 92627 - DNA, 141 bp, Zea mays
  Clone ID: MRT4577_184468C.1
agcgaagaaagaagccggttagggtctccacatccagttcccctcctctcctgcagcgtacgaccgcgggcctcaccctcgatatgcttcccctcggagccggtagagaccacctgcctccaatgcccgcgacgcctgccc

SEQ ID NO: 92628 - DNA, 1340 bp, Zea mays
  Clone ID: MRT4577_184469C.1
ctctgatgcaatgtatccgtccctcttcttcctccgtcctccgacctccgagatttgaaaccgtgctgcgaatcccccactcataaaattgaccactcgtcctcccccctgcccgtcatcatgcttaatctctctccagtttcccccagttcccgtttccatctccatcctcccccccgggagcaggagctgcagccaggagtcgagtcggcgtcgtcacgggagatatcagcttcgctatcaccggatccccctctgctccctccgcacctcccatctgcgctctctgttttcttccgcgcaccccggctgttggtgtcccgtccggcagcgttgctggtggctgaatccgagcctttgaggggtctgctgccgccgccgccgccgctgtcaccgctcttgagatctctttattgatctggagagattaaagagggattcttgccttcctactggagcaagagaaaggggagaacgtgtttcttcaggcgtggttgaacagtgaggaccggagaacaatgcgaggttcgggatttaagatgttctggctttaggggcagttcttctgaagcaggggacgggcgattcgaccaccggagctcagatctgattacaaaacgttcagaaaacacaaggcgttctcacaccgcctttcacttcttgcttactttggcaaccactcactgcgactggtctccacctccacctacaccaaagaacacatggcaagccgatctagcgcgatggaaggaggggcggcaatacaaaggaggaatgccgtgaagcggcatctgcagcagcgtcagcaggaggcggatttcctcgacaagaaggtcatcgcgtccacctacttcagcatcggggcgttcctcgtgctcgcctgcctcaccgtctcgctgctgatactgccgctggtgctgcctcccctgccgccgccgccgtcgctgctgttgtggctgccggtctgcctgctcgtcttgctggttgtactggccttcatgccgacagatgtgcgcagcatggcctcctcttacctgtaaatagataaataggtcttggccagattttctgtgttttgcagctgcaggattcgtcctaagacgagtcatgagtgtaatgtgaagcaacttctccagggatagatctcaaccaagtttggtagccatacgaagttattgactggaatttagaacatatagttgtgcacaatttcgaacaaaaaaaaaaaaaaaaaacgggccgagcacgtgcgagtaactccagcagtagcaagtagcacccaaatcagatttgtgtgctcccctctatttttattgatctaaatttacgctttcagtctt

SEQ ID NO: 92629 - DNA, 393 bp, Zea mays
  Clone ID: MRT4577_18446C.1
ggcagtgcttcccataactgtatacttcttacagagtgcattcaccattctgtctgaaacaaatgacctgtagattacatgttaattggaaacatagtagctctgctacttcactagtcaagatgacggctactagaagaatttactctagatcaatgtcattgtaggctacatgttaattaaccaacggtggggttttttttattgtcaccggaggggaaaggatcctcacctgaattatattactatttataagtggccaaaatagcctggtttgtatagcaggggatgggggggattacaacaatagcatcacgttactggaacccggggcaattcctatctccaaagcaccccataagctggacgcatacccgcagcgaaggaagatgt

SEQ ID NO: 92630 - DNA, 784 bp, Zea mays
  Clone ID: MRT4577_184470C.1
ggggcgtccgatcgccgacgccggcttctgggtcatgaaccgcgagttgctggccttctgctcttggtccacctagaacaggcttgacaggtcgaaccctctggagtgggagatgatgtcaaagctggagcagatcgctgagacttatcgcttcagggtgaaaaaacaggacgggctgctgaagctgcaggggtccaagcaagggaggaaggggcagctcgcgatcgacgccaagatcttctaggtgacaccggcctttcacgtcgtcgaggtgaataagtcggggcctttcacggtcggaaaaagtcggcaggcgacacgctgggagtatgagatgttctgcagcaagggcctaagaccttcactcagcgacatttgttggagcagccgatctgaggagaacatggctccttcagtggttcagccatcataattgaagccatcctcttagaccgtctccagcactttatccatatggtctccccctcttagtcgattgttatttaagtgcagcctcttcggagatgcaattacaatccatcctctctttctttttccctttctcaaagagctaggaccttgctcgactgagcatcaggctgtagggctctttgtgatcatcttttgccagttttcttcttgtagcagaaattgttgggcatggaactcctgttcctttcaccaatagaagcacaatgatcagcccaaaaaaaaaaaaaaaaaaaaaaaaaaaaaaaaaaaaaaaaaaaaaaaaaagaaaaaaaaaaaaaaaaaatttgcggcc

SEQ ID NO: 92631 - DNA, 361 bp, Zea mays
  Clone ID: MRT4577_184471C.1
aattgaaacacaaattatgatgaattggcatggttacggggggcacgcacacacacaacaaccggacccttgtgaatccaacactgacacggagagtagattcttcgacaacctccatacggagagggcaccaggggacgcgggcacatcggcagctaagacggcccaggacttactgacgacacacgcgagacggagcacaaggtggagggtgctctactttgggatgttaggcggtggtacggggtggtgatgctgaacgtgctagccggggacaaggagacggtgctggcacggtgggatgccctacttgtcctggatcctcaaattcacatgctcgattgtgtcacgagctattaac

SEQ ID NO: 92632 - DNA, 403 bp, Zea mays
  Clone ID: MRT4577_184472C.1
aatcgccgacgccggcttctgggtcatgaaccgcgagttgctggccttctgctcttggtccacctcgaacaggcttgacaggtcgaaccctctggagtgggagatgatgtcaaagctggagcagatcgctgagacagagcgcttcatggtgaaaaaacaggacgggctggtgaagctgcaggggtccaagcaagggaggaaggggcagctcgcgatcgacgccgagatcttcgaggtgacaccggcctttcacgtcgtcgaggtgaagaagtcggcaggcgacacgctggagtatgagatgttctgcagcaagggcctaagaccttcactcagcgacatctgctggagcagccgatctgaggagaacatggctccttcagtggttcagccatccataattgaa

SEQ ID NO: 92633 - DNA, 1305 bp, Zea mays
  Clone ID: MRT4577_184473C.1
ccggccgggaaaaaaaaaaaaaccttccttgcgaactccgccaccgcgtccctgcgttatagggccgtcgacgacgacgggttgcgcgtccccgcctcattcgcgcgaccatggacacggacacggacacgacgacgtccaccggctcccgcctccatcccgcggccggagcgcgcgccggcgtacgctcattggccgcccggggcgccgagagcctcgtcacctgcgtcttcgcgacggtgggcacggtcctcggcgcgatcaccggtggcctcatcggcctggccacggagacgggcgtgctgcgcggcacgggcgtcggcggcatcacgggcgcgctggtgtccatggaggtcgtcgagtcgctgtggcgctccgacgagccggcaatctggagcgtcgtctacgtgctcgatgtcatctggagcttgctcaccggccgccttgtgcgcgagaaggtggaccccgccgtgctcagcgccgtcgagagccagatgagcgcagcggacacaccggccttgcatggagaccacgccgacatcttcgacacgggcggcaccaacggcatggcgagggtcgccatggacgcgctccccgtcgtcaggttcaccgagcccggccgtcatgctggcacagccgcacggctccagcagcctcaaggatgtccaggtcgccttcagcaacgccgaccacaaggacagcagcagcaaggtggaacagccggcggacagctccttgaagccggcgagcctgaacgcgttcgacatcatctcccactccagagggttcgacctgtcaagcctgttcgaggtggaccaagagcagaaggccagcaactcgcggttcatgacccagaagccggcgtcggcgatagtgtcaaagctggagcagatcgctgagacagagcgcttcatggtgaaaaaacaggacgggctggtgaagctgcaggggtccaagcaagggaggaaggggcagctcgcgatcgacgccgagatcttcgaggtgacaccggcctttcacgtcgtcgaggtgaggaagtcggcaggcgacacgctggagtatgagatgttctgcagcaagggcctaagaccttcactcagcgacatctgctggagcagccgatctgaggagaacatggctccttcagtggttcagccatcataattgaagccatcctcttagaccgtctccagcactttatccatatggtctccccctcttagtcgattgttatttaagtgcagcctcttcggagatgcaattacaatcaaaaaaaaagaaaaaaaaaaaaaaaaatttgcggcc

SEQ ID NO: 92634 - DNA, 2254 bp, Zea mays
  Clone ID: MRT4577_184474C.1
atcgccgacgccggcttctgggtcatgaaccgcgagttgctggccttctgctcttggtccacctcgaacaggcttgacaggtcgaaccctttggacgagtcgcggctcagcccacgcgtcgtcgcgtgtctaggtttcctctctcaccatagcgcccgctctgtcgcccttcgttcacctctccttcctctcgtccctgcctgccagggagaggggaagtcagaggcacggagtggcgcagagcagacgcccgtgaaccattgtagctgtccctgtcgtcgtcgtcgtcaacgaacccacacaaggaaaggatggagaagaagccgaccatcctcatgaacaggtacgagctcgggcgcacgctcgggcagggcaccttcgccaaggtgtaccacggccggaacctcgcgtccggcgagagcgtggccatcaaggtcatcgacaaggagaaggtgatgcgcgtcggcatgatcgaccagatcaagcgcgagatctccgtcatgcgcctcgtccgccaccccaacgtcgtgcagctgcacgaggtgatggccagcaagagcaagatatacttcgccatggagtacgtccggggcggcgagctcttcgcccgcgtcgcccgcggccggctcaaggaggacgccgcgagaaggtacttccaccagctcgtcggcgccgtcgacttctgccacagccgcggcgtctaccaccgcgacctcaagcccgagaacctcctcgtcgacgagcacggcaacctcaaggtctccgacttcggcctcagcgcgctcagggagtgccagaagcaggacggcctgctgcacaccacctgcggcacccccgcgtacgtcgcgccggagatcatcaacaagaagggctacgacggggccaaggccgacatctggtcctgcggcgtcatcctcttcgtgctcctcgccggctacctcccgttccacgacgccaacctggtggagatgtaccgcaagatcagcagagccgacgtcaagtacccgcagtggttctcccctgagctccggcggttgatgcccaagctcctcgaaccgaacccaaacaacaggatcacgatcgagaagctggtcgagcacccctggttcaagaaggggtacaggccggccgtcatgctggcacagccgcacggctccagcagcctcaaggatgtccaggtcgccttcagcaacgccgaccacaaggacagcagcagcaaggtggaacagccggcggacagctccttgaagccggcgagcctgaacgcgttcgacatcatctcccactccagagggttcgacctgtcaagcctgttcgaggtggaccaagagcagaaggccagcaactcgcggttcatgacccagaagccggcgtcggcgatagtgtcaaagctggagcagatcgctgagacagagcgcttcatggtgaagaaacaggacgggctggtgaagctgcaggggtccaagcaagggaggaaggggcagctcgcgatcgacgccgagatcttcgaggtgacaccggcctttcacgtcgtcgaggtgaagaagtcggcaggcgacacgctggagtatgagatgttctgcagcaagggcctaagaccttcactcagcgacatctgctggagcagccgatctgaggagaacatggctccttcagtggttcagccatcacaattggagccatcctcttagaccgtctccggcagtttactcacccctcttagtcgattgttatttaagtgcagtctcttcggagatgcaattacaatccatcctctctttcttttcccctttctcaaagagctaggaccttgctcgactgagcatcaggctgtagggctctttgtgatcatcttttgccagttttcttcttgtagcagaaattgttgggcatggaactcctgttcctttcaccaatagaagcacaatgatcagcactgtgaaacatttttaaaaaaaaaaaaatggcggccccccgacagtttactcacccctcttagtcgattgttatttaagtgcagtctcttcggagatgcaattacagtccatcctctctttcttttcccctttctcaaagagctaggaccttgctcgactgagcatcaggctgtagggctctttgtgatcatcttttgccagttttcttcttgtagcagaagttgttgggcatggaactcctgttcctttcaccaatagaagcataatgatcagcactgtgaaacattttttcaaaaagttaagaaaagggaggccgc

SEQ ID NO: 92635 - DNA, 557 bp, Zea mays
  Clone ID: MRT4577_184475C.1
cgggttctggtatcactgaaatcctttggcgacctcctgccactgccatacatactactctatgcaaacatgcacagaaactatgcctttacaaaacaatgcagacatgcagcgagatcgaagcaagtaatccggagaaaagaaaataaaggaaaacaaaacataccatgtcctcggagaagtagcccaacatgaccttgaagaaggacggcactgccgggaccggccgcgcgttgctggaagaagacgccaatgcggacggcgaagcaggctggccatggatccgggcgcacctcttcgtgcaatccacgcatgcgcgcttcttgtgcggatcgcaggccgtcgtcttcttcctcctcctccgcctcctcttgaccaccttttcggcttcctcgtccccgtcgccgtctacttcgaccacgatctcttctggctctttcttcacagctcctcctaccacctccgtgtccgttgctggctgcatgctaacacatgtgcgcgaaaattcacagatcacagggaccacgccgccagtcaagtggaaagcggtggaaatg

SEQ ID NO: 92636 - DNA, 559 bp, Zea mays
  Clone ID: MRT4577_184476C.1
gctggcctccccatggacgaggagcaccagtgagatggcataagcttccgcggttaccctgcttgttagccgtactctcgctaatgtgcatgatcacggtcacagcggcataggctgcactgggctagcgcgcggccaaaaggaacagggtcttgctcttcggtaaaaagaacacgatacagacccttttcaacaatgacaaggattcatggagagggaccactgaacaaagcgggagttgctcactgctgacgagaaggagcctgctgttggatgggagctctgcgggcatctcgctacctgagctacgaaacgcccaaacaatcaaatcgcacaacaggccgctaaggatgataattacaggctgcctgaaatgccagtgactgatgttagacaagaatcggataagcatggcactggtgaaggtgatacttctaaagaagcagaaacgctgagggaagatcaagcacacgtgaaggcacaagctgactttcgcgaggatctggcacgcagagcattccgtgcgctgaaagggatcattacactacaaggactgatt

SEQ ID NO: 92637 - DNA, 361 bp, Zea mays
  Clone ID: MRT4577_184477C.1
agacgccattacgatcaagcaaaccggctcgggcgacgtctcgtacatcattggtggaggagcattccatgccgaggacaagattgttcagcataacggtgcaggtactgtctcgatcaagaacttctacgccaatgacttcggaaagttgtatcgtgcctgtggcaactgctccactagctatgctcgtcacgttattgttgacaacgtcgcattggcgagtggatccgcgggtgttggtatcaacgagaatttcggcgacaccgccaccctcagcaacatttgcaccaacggcaagcccaccactgccaacctctgctgccgttacacaggaacaactcctggtaacgagcccacgaag

SEQ ID NO: 92638 - DNA, 610 bp, Zea mays
  Clone ID: MRT4577_184478C.1
ggccgcttttttttttttttttttcttttttttttttttttttttttttttttttttttttttttttttttttttttttttttaacgggaaggggggcaggaatccaataaccccttacttaactgtgttccataacaagtacaaggcatcaaacatgaggaacccaaaatggttgcccgggcttattatttacattcccggaaaaaaacatataacaagctctttaaggagcatcattcactaatgactgaataaaacaaaacagggatctatcttaaacccgttcactttttaatttacttttctgcctaagttgtctttttttggggggcacacaagatgtttattgtgaatcccttaaagggggaccttgccataggcagcaaacgacttaatctgatctgggaccttaacaaccttaaatgaacgtttctcaccacaaataaatgggatgtaaccaccctggacctgggatagcgggggcaatctcctctggagaaaaggaccagccttcaccttgggcgcaccccttggaaaaataaccacacttggccttgtatgtcttaagcctttggaattggcccgtaaaccctaaagggatttgttatt

SEQ ID NO: 92639 - DNA, 368 bp, Zea mays
  Clone ID: MRT4577_184479C.1
ttgagagaagcctcaccgatgacctagcacgggcattattggactgggcagaatataaaaatgcgccgcccaaattcttattttcggaaagggaaaaaacgttgtcttcttacctaaaacgcgcccgaaaacaaaaccgggggccaacttttttttttttattctttgggcggttttttttatttcaacagcgaagggcggttcttgggatggaactaccgtccctccctggggggatccttgcttacttaccaaaactcgccgaggggtggccctaccatagccgggggaaataagagctctaaaaccatgagccgcagaaacaaatgaacaaatccgccctaggaaaacatgaggccccccccccc

SEQ ID NO: 92640 - DNA, 873 bp, Zea mays
  Clone ID: MRT4577_18447C.1
tcaaaatggtgatcatggatcggttgacggtggaccagcaggtggttccggcgtagcccttctcgtcgccgacccagcggacgtcggccccgtcgtcggagaagatgttgatggagcgctgcagctgcttcaccgtctggaaccactcctggaagtggtacgtcatattggtcgcgttattgcccttggcgccgtcgaaccaaatctccgacacgctcccgtacccggtgaggagctcgtggagctggccctcgtagtcccacgcgtccgcccacgcgtcctcccacgcgtccgcggacgcgtggggtgccggtcccatggcgagaggtacagcccggcatcaaggccgcgcgcgcgggcagcgcccacgaactccctcaccacgtcgccgcggcccccgcgccaggggctggcgcgcacggagtgggccgtgtagtcggacggccagaggcagaacccgtcgtggtgcttggcgacgaggatgacgagcgaggcccccgccgcccgcgccgcgtccatccactgggtggcgttgagccccgcggggcggaacagggacgggtcctccgaccccgtgccccactcggagtccgtgaaggtgttcatgccgaagtggaagaacatgatcacctcgcggcgctgccatctcagctgcggcgccgacgggatcggcagcaccggcagcggcggtggagtcgcgcgccacgcctctgtcgcggagacgaggacggctacggccagcgccgcggcggccaggcacagcagcgggcttgccatcgtgctgctgttcttgtcacttctctgctcgcgatggctaagtgtagcggtatatactggcccaggcctgtagctgtagggagggggagatgcgtt

SEQ ID NO: 92641 - DNA, 295 bp, Zea mays
  Clone ID: MRT4577_184480C.1
cctttccgtccgcctggagggatgcaacacgagcactgacacgagcctgtcctacaccttggagagctgcagccaggtagccgggcttgacctgaacaactgcatggtgagcgactacggaggaaagggcctggctgcaaagaggcagttaaagcatggggcgctatatgcttatggctgtgtgaaggaacgcatgagagcactaactctcttgggacgatgctccatccgtggaggcgctagacattgcaggatagctatatcgtcgaccacaacatcgttcattagcagaagt

SEQ ID NO: 92642 - DNA, 393 bp, Zea mays
  Clone ID: MRT4577_184481C.1
gcagatgaggatgatggacgtgcagaccgaacagcatgaactgcggatgatgatgcagcgtgagcgtgccgctgccggctgcaacagcctgtacgagccagatgtgatgcagcagcagcaggatgtgctggtagcacagggtttgaaccccatggacaagaagaaggggcacaacatgccgtgcatgggtggactctaccacgaccagtaccagatgcacagctaccgcaccaacccctgtggtatctccggtgtcattacaccatactactgattcatgatattcgggaaatctgctgtatgcatccgtctatgtctatatatgtgataatgcaggaagacgacacacattataatgtgtggtatgaccaataatatatgcatcataataaa

SEQ ID NO: 92643 - DNA, 1242 bp, Zea mays
  Clone ID: MRT4577_184482C.1
catagtagtaagcattcatgttttatcccaaaatacttaccttcttgacctttctcttttttcctaagcatctctctctctctcttcttttcacactggtaaccgtgctcaactctaaaacgtcctctattttgggactgagtgcataaatgatacaaatgtatctagaaaagtcgaaacctcttatagtttggaatagaagggagtatttgtttagatgtcattacatagcattttgcatgataatataggatggtagctctttgaactgctcatatacaagagatgtttcctcatttccttgttcctcattggcacaccactgatattgatgaagggaccaaccaatgagttcatgacatgtggcctcacggcgcacatgccagattcacatcgttggttcttataaccatttaatacaatgttcacgcctgaggttgtcttgtcatagttgatgttttccataaatccacaataccaaaacaatgacgaatcttatcccagatgtaacacattagcctggccaagctcatctggactttgtgcatgcacccagcatgctaaatgccatccttgctaatcagcacaatccatcgcatccttctctagataatgctttgatgcatttcagggtagactctgaagtttctcagactgttgatgccccctacaataaattactaactgatcctctctcttttttttttgagccaggactattacttctacaacgatgacactggagttagtctattgtttgggaacccgcaactgtgaagactttgagctgagagattctttggttgacaagtacatcattagaattcttcaaacttacgtaccgttcctatccccactgcctgtaaaacagaaagcatgcgagtcgctggctggctgttgacctcacctcccctctcctctcctcttgtaccaatgttaaattcttacgaccgtttaatgtatcttaatcagacaaaaaaaaaaaaaaggaaaaaaaaaaaaaaaaaaaaaaaaaaaaaaaaaaaaaaaaaaaaaaaaaaaaacccaaaaaaaaaaaaaaaaaaaaaaaaaaaaaaaaaaaaaaaaaaaaaaaaaaaaaaaaaaaaaaaaaaggggggcccgttttaagagatccaaatttacttccccgtgttttgcaaagaaaaaattttttttttggggcccctaaattaaattcccgggcccggttttaaaaaccgggggactgggaaaaaccctggg

SEQ ID NO: 92644 - DNA, 217 bp, Zea mays
  Clone ID: MRT4577_184483C.1
ataaggaaagctggcacgctcacgcagagcatccgatcctgtatagcgggcgcgacccacgctgttcgtttttacatcactatgaccagtgctgtttttgagctattacttaatcctgtggactttcgactcttattttgcatggaagagaccagatccaggatgctagctaccacagaaagaatctactggacgcggtcaataaaagatgagatta

SEQ ID NO: 92645 - DNA, 145 bp, Zea mays
  Clone ID: MRT4577_184484C.1
acgcgagaagtaggggaaggcggtgctccgccgcggatgcgcgttgatatcgcttcgcagaacctgactcaggcagccagctgcagaagagttgaggcgaagtcgtgctgctgggtctgcaaacgcgatggataacgtgcagccg

SEQ ID NO: 92646 - DNA, 419 bp, Zea mays
  unsure (1)..(419): unsure at all n locations
  Clone ID: MRT4577_184485C.1
attccctggtcgacccactcatccggaggatcccagaggccatcctgtactatagggactacatggtaccctntgctactntgatcaatttgaaattttgccaaaccacctctttcccaaatcatactaatttactgcacctcacttttccctttcagaaaccttcatactttcacaccatatctatcttcacaatacatatcttattaccatacattttatcataacattaattgaactatttccaatactcttgttcttttcacataccataattcctagtcaattgaatttaccactcttgcaatattcattctgatcataatccctcaaaaatttttataccacaatacatttaaaccttttaatacttataatcatatatttaataaatcctatcaaattattaaatattacca

SEQ ID NO: 92647 - DNA, 626 bp, Zea mays
  Clone ID: MRT4577_184486C.1
taggggccttttttttttttttttttccttttttttttttttttttttttttttttttttttttttttttttttttttttttttttttaacaatccatgggaaaaaaaaaggactgcataaatttgtacacatgacattatttcccttccccccatgacaaaagggaaaaaaattaaaataatcgggggaagcaactaaatttttttttgctactttgaaaccacaaaattccccccccaatcccccccccccgggggaaacgttctaaacaggaaaaaatacaaaaactgggcccaaggaagcaaaaaagcaacaagcccgcccaaaatcccctaccagaaataggaatagatgcagatacatgggccccacccccccccaaaaagccccctttggtggcgccaaagcaggtgacgactccctatcttccccggggaaatcagggggggatgaaaaccccccctggggggtctgctcggccccggggtccccgggcgccatcccaaccgaagggggaaccatgggggggctgccaaaatccccccggttgaacatttccttgggcagaaaaaccttggagacggcaaaaacccccacagggttctggtcaaacaccggggggggg

SEQ ID NO: 92648 - DNA, 250 bp, Zea mays
  Clone ID: MRT4577_184487C.1
ggtattgaaatatgtttggggaaacaattctacatactctgctgcttaagaatacccctgcaccatggcaagcgcaaaaaaaggaccgaaggtaaacccaattggaaatttcatgccactgaaaattgttaacaatttttataaaaaaagaagtttccatacatcccccgctcacgaaagggccaaactggacaataaaactcaaagggcctaggggatatgaagattttattcctttcgcaaggttgct

SEQ ID NO: 92649 - DNA, 416 bp, Zea mays
  Clone ID: MRT4577_184488C.1
gcctgttttggggttttttttttttttttttttttttttttttttttttttttttttttttttttttttttttttttttacacaccaatcctggtttatgggtaaaaacccccctaaaaattaaacagcaggccccccccccataaaaccctagggggggggggggggagaggtccccatggttgggcccccccagattggggtcttgcgaacccatcatttggggggggtggtcccccaaccccggcccactaattcagttgcccaggccaccccatccaatcctgggggggccccctctgaagcccccgccgggaggggtccaggtggggggccccaaccccaacccctggggggccgttttccccttttttcccttgggttgtcaggcccccaccgggggcccccccccccgc

SEQ ID NO: 92650 - DNA, 429 bp, Zea mays
  unsure (1)..(429): unsure at all n locations
  Clone ID: MRT4577_184489C.1
caccgagcacgccatgagcaacaggaccggagccagcaggggtttgtgaattgtgatttaaaatttgatttaangttttggtttgattatttatttggtagtaatcccatgtttaattaaaggaataagatagacaaatttctcatcaagaatcggangaaagatgcttctaattctaaaacaattaggacaaatgagagccgtgtagaataaaataggccatatattgagctagatatgaatgatatagtcctgtgcatcacgccttcggcggatgggagattcgtccgccgccggcaatacacagcacgtatgtagcaactttcaaaaggatttctgttcatcccgcaatacgcatgtagccgctttttttagtattcactgctggatgttgggaattttagcctccatgatctgacaacatatgaa

SEQ ID NO: 92651 - DNA, 343 bp, Zea mays
  Clone ID: MRT4577_18448C.1
agcagtggtaacaacgcagagtacttctttttttttttttttttttttttttttggagtcccgcttgggtacgtcagcttgtagtcgatgaccaaagcctggataaataaaatcacggtgcatttttacgaagtggatttttttttcatcatcatcagaagaagaagacgatttcccgcatgtgagatgaaatggagcacctttctgagggggatcaaggtgaggaggccgccgaagctactggcgacgaggaagccggctatccacccgaatcctggctccttgacgctccccggcacgtttcccggcgtgtccaccgcgtactctgcgttgttaccactgc

SEQ ID NO: 92652 - DNA, 488 bp, Zea mays
  Clone ID: MRT4577_184490C.1
aaaaaaaaataccggagattctcgaatcgtgactcttttttgttgggcaaaacccccggatgcatttggttgacttgcgaccagcaaggacttacgcacggcggtccacactccacaggtcaaccccgggctgagctaaccaaaaaacctaccataacaagtttggggagcatttaatcacagcttttcaaatccagtttgctaacgagcaatgaggctccatgcgggtaacagttatctttatattcctgggaggcgtacccggcttttgcatgtggtcagctcctggtttaatttttttttgagatggattgagtatattgaacgagtatgctatggacgttgggtatggtcatcagtgcaccacgcattgtaaaattctatatagtattttggagctggacaatattgtaacaagctggctatgagagaaaaacgatagacattctatacgacctggtgagccctgcagatgaaatctagatcat

SEQ ID NO: 92653 - DNA, 179 bp, Zea mays
  Clone ID: MRT4577_184491C.1
gcacgagcgacacggggcgaacaagtgataaataactatggggatttgatgaacgttgatagttgtaggtcggtaaatatggttgagagtgtaatcttcgaatggtctaggttttggtggggtgttactccaacggacctaaaaccccactattgtgtgcgtgtggatgcgccgcgttg

SEQ ID NO: 92654 - DNA, 278 bp, Zea mays
  Clone ID: MRT4577_184492C.1
aaaaacccttaatgctcaagctaagagcacctcgtcgataaacctatccacattgcacataaagcgtccgttgagcttctccgcgaccacagcgctccccttaagctccataacacgacgacacatgttccaccctttctccccctccatagcctcccgtatgagcgccatcacctcgccccatcagacatcattaccgatctccattccgatgccccactctgtgctcttataccggcaattagtctgcttctcatcaaataaaggccaacacacca

SEQ ID NO: 92655 - DNA, 474 bp, Zea mays
  Clone ID: MRT4577_184493C.1
aatacccgaacaagaacattggtccaacaatctaccactcttacatcatgcttaaattatgtttgcccttttcctgtgtacaacaaagagtattcagattacaaaaaacacctgttaaagcatgcaaagaaaactagcacacgcttgtgtctcgtgtgcccgagtaaccgacagaaaactagcgattgtgcccataaacaaccaagtcgtttatcatgtttaagcagcattggcgggccctggggatttattgaactctggcttaagctcatgagttacctggtttggtcctcgtttattatacacacacagatcgcacaatatctccttaaaaaattgctctgggtggtcagaatcttgtaccactgcctttattgcccaattgggttggctttcaaaaagcgggaatataatggggaccatctgcggacgaatcctacgagttgtttttacattggatggatccgctggcgc

SEQ ID NO: 92656 - DNA, 488 bp, Zea mays
  Clone ID: MRT4577_184494C.1
cttgctcctagtgccattattccacagttcctcccaccagttactttaatggggcttcgaacatacagcccgtgcaagcctaccaggttcactaagcgttggggggagcggctttaacaccaaccattggccaattggcaccaccattccttgggaaatttaaccctacaaacaatggaaccgcaccagcaccaccagtttctggccttaattggaccacctagccgggggtaaaccctgtcgcctactggcaacagaagctactggcttccacccaactggcttctggcaaacgtagctgcttaccagcaacaacaccgtctgcaccagttaatgccagcgctaagtcaactagccatggtgaaccctgtcgcctacctacaacagcaacaattgctttcatctagcccgctcgctgtgggcaatgcacctacgtacctacaacaacagttgctgcaacagattgtaccagctctgactcagctagc

SEQ ID NO: 92657 - DNA, 230 bp, Zea mays
  Clone ID: MRT4577_184495C.1
cactcgcgctattagttaaggacgcgttcacactatacacgcaacctaatcagatattacacaatcaattaggaacgctctgttgtgaccttgacatgcagattgctctaaaagaagctactataggggcgatcgattatagaaagaccaaggttacatgcgcggccatgccatatcttattgctggtttagggaaacctaaattgagaatcatgtgtccgatctggaaa

SEQ ID NO: 92658 - DNA, 658 bp, Zea mays
  Clone ID: MRT4577_184496C.1
atctcttatcatctgcgtctctacatttcttctctctctgctcctccgccttcgcctgatccatccaagacagggcatcgccatgtccgactctgagtgataccacttccaatcgaacgacgacgatggggctcccaacacctacccgtatcatgttggcaccgcccgtaagaacgtcttcatcgtcatcaagaaccgtccctgaatgttgtggaggtttctacctccaagactggtaatattggccacgcctgatgccactttgtccacatacacatattcaatgggaaaaagcttgaatatattgatccttcatcacacaactgagacattccgcatgggaaccgtactgagtatcggctgattgatatgtctgatgatggatttgtgatccttcttacttcagatggcaactctaaagatgatcttagactcccaactgatgatactcttgcgtgccacattaacgaagggttcgaaagctggaacgatcttgttgtgactgcccagtctgcgatgcgggatgaggatatctgtgcgatgaacgatgatggtcccgagtaagttgcttggattgggagactgtaccctactgtatctcaacttaaatggagaaaacaattgtatcaccataggattgctaccgacacattcacct

SEQ ID NO: 92659 - DNA, 168 bp, Zea mays
  Clone ID: MRT4577_184497C.1
tccatgcgtacggcaacgcatccagtgaaacgagggctctgaggctatcgatattatggaaatgctagcttgcgcagatttagcggattaggcaaggctgaacactgagtgctaagaaaatacagcaggatgggctgtcttatgaaggaattggacttaagaagggag

SEQ ID NO: 92660 - DNA, 438 bp, Zea mays
  Clone ID: MRT4577_184498C.1
tttttttttttttttttttttttttttttgggttttttttttttttttttttttttttttttttttttttttttttttttttttttttttttgggaaaaaacggggcccccattaaggggggacagaaacagaagaccccaacctttaatggggcgggggttaagggaaaaaaaaacgtttttaaactccaggggggcccaaggtaaataacaacatttttatcccggcaaaatgggaaaccccaaaaccctttgggcccttttggggttaaaaaaaaaccaatttgtccttgaacaggatttttaggggggggaaaaccttgggcccaaccgggaaaacccggggggttacccttaaaagggaaaaggggaggccggttttttccatttaaaccctaaagaaaacggggatttttggggtttgggggctgaaggggg

SEQ ID NO: 92661 - DNA, 555 bp, Zea mays
  unsure (1)..(555): unsure at all n locations
  Clone ID: MRT4577_184499C.1
tggtcgtgggaggcgtacgcgccgtggcagcgttcatggagctcacggcgcggggcttggagaccggagtctcttgtggtacctgtactgctggcggagccactcacggtgtctcagctgcagtcaggcgaatgagccgctgaacggtgttttgtcaaggcctatgtgtgcgtacatgttggggcggttctttgtctagtgtatcctcagcctcccgaaaattatgtcatcaccgcgtacagctgcccccggcgtgccgcacaatttagcgacgcaatacaagatctccgccnccctaacgatcctaatttacgggcaccagcatgccacgcagtagatgccgcattcgtcgcctcagtccaatatgccggacgaccacttgcaagatgcggcatgcccaaacactggggatccccaactagtgccctcccggcggatggatcttcgctgaccttgggcggttacatgccagcccgttccgctgtgctttgccgacgcgtgggcttgcccggtggttactggcccgtaccctgaagcgtgccatctttccctata

SEQ ID NO: 92662 - DNA, 489 bp, Zea mays
  Clone ID: MRT4577_18449C.1
cattgaccttctcgaggacggtctcatcaatcaactcaaacacaacactcaaaccaaacaacccccaccaccaaaccatcaacatgtctgcccccaacgccaacgctcccaacgagggcatcgtcggtcaggtcaccaactccatctccaacgccgcccagtacgtctccgagaccgtccagggtgccgccgccacctcctccaaggaggccaacaaggagcaggccaagggcaacgtccccggcaaggactccatcggtgaccgtgtctccggtgcccttgacgctggcagcgacaagatcaacgagaagaagcacgagacctccgcctccgccaacaagcagggcatctaaatgtctcgctacggcacgacagttacgaactttcatgattgttaaagcgtcctagtcggatgcgaagataattcagataattcaattagcctcaagaaaggcacgttcaaacaaaaaaaaaaaaaaaaaagcggcc

SEQ ID NO: 92663 - DNA, 557 bp, Zea mays
  Clone ID: MRT4577_1844C.1
gaaggcagcagctcttcacgttgtctaaagaaacaacagattcaatcgcaggaaccggctcgctaggcacgtgatgacatgtatcgcagcactagcctttgactctacccataaacctagggtgtagtgatagttacaaacaggataggcacaaccaacgcccaaaaggctatgcatatcaagacaaaacataggcgattctggagaaggaggattgatgaaaagctgaggatagctgaatactacttcatggcggaaagtgtgaggaaaataagaatgaagacagcatggaaagcactacgtatgcactgcaaggaatgaaggagagataaggtatgaagttgaccaaaacactgcgctgaactgagaagcttttgctacagcaaaaaaaacaatgatggacgtatgtaacctgtttgtccgacattaatattaggacgataaatgcaacctacatgaaatttcaacaaagaaatgaagcataaataagttaaagatatctgcactgagaaaaatgtactacggaatacggtggctattaaggatgctgctgaatc

SEQ ID NO: 92664 - DNA, 420 bp, Zea mays
  Clone ID: MRT4577_184500C.1
aaccaaaggaatcattgcattttttgggggggccaagttttacaacacatcacattggtgaacaatcagttgaaatggaggcctagtttaacactttttgaacttttccgtccccggcagctaaaaccgccacgcttatcgtcgctgagcaagcccggcctaaacgttgaggcatgtcccaggctggcacttggtaattacaggtttttgggccgatgacgggttacgcatgcatacaaggtttttggggagggaatacaccgctggactggatgagtttgttcaggtttccttgctcttgcccttcttggacttggccgactttttgtcggggtttttggacccaaggctgttcacccaggcgtagtcgctgggcaccgtgaaagggtcggcattgtcccggacctgcgacaggttcac

SEQ ID NO: 92665 - DNA, 348 bp, Zea mays
  Clone ID: MRT4577_184501C.1
aggctgatccattggtagatacgtactcgggtggagcagaacagctagagacatggcgactacaagtcctgttgccgccaccgccgccggagtgctgctggtcctgtccgcgcttggtaacgctggcgcgggacgaggacccgtacttgttcttcgtgtgcaacgtgacgttcggtaccaggtctctgctgggcgtgccccagaatgtcatcatcatcaacagcgacttccccggcaccagtatcaactgctccgctagcagtatcatcgtcgtcaatgtcctcattcatctcgaccatcggctctcttccacctgtacagggatgcatcacatgaagaactcttgga

SEQ ID NO: 92666 - DNA, 551 bp, Zea mays
  Clone ID: MRT4577_184502C.1
ccggttcgacccagcgtccttttaaaaaaaaaaaaaaaaaaaaaaaaaaaaaaaaaaaaaaaaaaaaaaaaaaaaaaaaaaaaaaaaaaaaaaaaaaaaaaaaaaaaaaaaaaaaaggggcgggccgttccgaattttataacccggccccgggggggatttttattttaggggtggtttttcctttccccatgtttttggctggggccccaattgggtttcccccatttttggggtggccattcctggttggggggaggcccttttggggttttttttaaaggggcttcccttcattgtttttttgcccccttgtttggcaccctttactttggaggggttgtggttacctggtggcattcatttgacctcaggggcgggtccccctttggccctttttttgggagccagttggggtccttttaattggaaaccaataccccttccttttgacccacttggtttttttaaacaaaacgggttttttgggggcttatttggaccggtggtttccccaaattttttggtttaactgataacctttgtttagg

SEQ ID NO: 92667 - DNA, 469 bp, Zea mays
  Clone ID: MRT4577_184503C.1
cccgcctacgccccctcccgccgccgcacgatgagcacttctcccgccgccgccgacgtttcgcctttgccgcctactgctgccgccgacgaggccgcgcgggcgacagagacggtggtggtcgatgagagggtcgcctcacacgtggacccgttcctcgtcgaggcgctcgacaaccctcgccaccgtctcatgggtacgtgccgagccgtcttatctgttcgctcagcacatcgcgtcttgcgcctgcgattttgatgtcgtaggatcatgcttgtgcggatgtgatggttgctgtggcttcgctagttggacggtgggatttgggccgggatttccgcgcctttgtctagagtttgggcctggtgcttcctcagtgcagaattgcagattagaattccctatgtttgatttatctcaggaagtgtcgggataatggcctactagtgcgatcgtaggaattcataag

SEQ ID NO: 92668 - DNA, 1646 bp, Zea mays
  Clone ID: MRT4577_184504C.1
ggtaccctccgggtccggccggggtctcgccaaattcggccccaggtttcaattccttatccgcacagtcacacggtttaatcgaatggcttcgccgtcgtgtttcctcttccgcccccgtccgccgctgtgcagccgccgccgccgcagcagcagcaggtccctctacctcctctccaagcagagcctgcaccgacttccctcaccaagaacatgccgccgtccagtggcagagcagctcgtcctgcggtcgctgccgcccggtaacggcaggcggatgggggcgacgggcttcgcctgctactgttcctacgacaccgagaacggactgcccacgccttcaccggacaagggaaaaagctcggatgagtggccaatccttcgccggtgggatgttccatgggagtggccaacgatttctctcaccatggtggcatgtgcagtaagacagctttcttttgacagggatagctgagcaatctattttggagcaactaggttttcgagctggggagacaactctagatgagaaagcagagatactcttcttgggacaactaattcaatgaaccacttaagctgcaaaacggatggcttctgtggtctgcaatcggcctgtttgttgcaatagttgctattgctttagcaggtgctgcaatgacatttctgaatggtgaaacaccacagagagagacagactcgctggtccttttgttgccgctgattggctcgtcaaacatcagcactgcctgtttgctgggcatcactgggattttggcacccattctggaggaaactgtgtttcgaggatttcttatggtatccctgactatgtggtttcctactccatatgctgtgcttatgactgctgcagtgtttgcctttgctcactttacaccaggagaatttcctcagcttttcgtgcttggtgtcgtcttaggattttcatatgctcaaactcgcaaccttctaactcctattgcaatacacgctgtctggaactctggagtaatattgttgctaacttttcttcagatgcaagggtatgatatcagggagattttgcaggcatcttgaagatttaacgcagttagattaatttcatcctgtgttttcttgtgtcagagagggtcttgcaagttacggaactacttgtgctctgctcaaagggacattttcacgaaagtgactattttaagctgaattacggaggcatcggcaaaggtgtagaaactctgttggggttacaacaatggttctcacctacatatagaagatccttgttttcctttgtcttttctatgttagttagatccatttcccttttcccagtggtcatttatctatcagactgggcaaaagcatctcatgactcatgaggctgggcctgggatactatttccatcatcaacataaaagacaaagtttatgtataccagagtcgtcttaatgacggtgtttctgttcacttcgccgtttgtgtatgattgcagagaactgtgactgataggaacatcaagactgtataattaatcagcaaccgtagttggtgtcttacctgtaacgttatttgaaggggtaaaaaattgtttatgttgctatcaaatacagtaatacacattgatagaaatacattcttttgaccc

SEQ ID NO: 92669 - DNA, 408 bp, Zea mays
  Clone ID: MRT4577_184505C.1
gatgtgagcaactgaacacaccaagcgaaacgaactagaaacgacttacatcattggataccagatttagcccttctggctaattgcactttatgcgagcccatcatagcgtacacttattgaacaatgctgaattgtcctaaagccagattgccaaatgcttgaccagggacttaaggatatgaagacctattgccaagccatcatgcagcaaaagcgcttgtgagagcgtcttacaacaacaattgcccaattgacacacaatgattgccacatataacaatacaaaggataacgacgtaacaataacaacctttcgtacatcattgagccacctaggcatggtgaaccctgatccctactcgcgagagctgctgctagcatgcaacgcacttgctctggagaacg

SEQ ID NO: 92670 - DNA, 141 bp, Zea mays
  Clone ID: MRT4577_184506C.1
cccacgcaaccagtgaaccatcatattgtctagtggcttctctgtagaggactgatctgtttttggtactatgtttaccgttgaatacttacctattttccgtttgcctatattcttaatttacggatgctgtatccagct

SEQ ID NO: 92671 - DNA, 476 bp, Zea mays
  Clone ID: MRT4577_184507C.1
aggaggcaagggggacacaaaaaaaaacccccattcgggcaaacataggtttaaacaaaatactaaaaaaaaaaaaaactcagggcccgcagcgttttccttttcaaactaaagaacccccacaggagcacattaccacaagggctaggggggtacaaaaattccaaaacatgggataaaggggaaaaaatacaaattggccatgaccaccactttaaaaaaaaaaccccaccggccttaaaaccccctttcccacgggattttgaaaaaaccaaaccttaccagggtcctaaccacccttttttggttgggtttttcttgaaattgaccacaaaagggcagcaacattgggagggaggtcctaaaaaaaaacggtggaaaacttttgaagggcaaacaaaataccttcgtcggcggggggcaaaaaggggaggggaaaaccctttctaccaaaacgaccacttcgaccaaaacga

SEQ ID NO: 92672 - DNA, 261 bp, Zea mays
  Clone ID: MRT4577_184508C.1
ttgaactgttgatggcttattaagcaacggccccttgtttgcgaatcgagtgctctctggggattgatttagaacgggcagcttcccatttatcattgtccaacccatgcattccaagcatctttcttgaaccaggcattccaggcatcatttattaacacgaggcttcttcctcaaggcattggcacatgactaatttgcatgagcgcacttttggggaactggtgcgcccaccatctacgttctattaaagtttttggc

SEQ ID NO: 92673 - DNA, 1749 bp, Zea mays
  Clone ID: MRT4577_184509C.1
caacactccagtggcggcaaagacctaacatttcaaaatcaatggccaagaaccccaaggcgcccgacacccgcagtggccgttctcccaccagaaggccccgaccacgccgcgccaaggcggtgccagaagcctcctccgcagctgatatcgaagacctggctccctcagtgcctggggccgctgcccctggcgctgccgcacccacggccctgcgcgcacagctgctccggtggtatgacgcgcaccgtagggacctgccgtggcgatgcgtaagcggcagcgaggaagagagggcgtacgcggtgtgggtgtccgaggtgatgctgcagcagacgcgggtgcccgtggtcgtcgcttactacgagcggtggatggcgcggtggccgaccgtacgaagcctcgccgccgctacgcaggaggaggtgaacgagatgtgggcgggtcttggctactaccgtagggctcgatttctgctggagggagcaaagcagatcatcgaaaaggggttgtttccttgcacggcgttagcccttcgtgaggttcgtggcattggggattacacagctggagcaatcgcttcaattgccttcaacgaggttgtcccagttgtggatggaaatgtgatacgagtcatcagcaggctttacaccattgctgacaacccaaaggaatcctcaacagtgaagagattctgggacctcgtaggtcaaatggttgaccctttgagaccaggagacttcaaccaagcgatgatggagttaggagcaacattatgtagcaagacaaagcctggttgctctcaatgcccagtctctagccactgccaagcgcttgcgctttcccgtgaaaaatcatcggttcaagttacagacttcccacgagtggttccaaaggccaaacctcggagtgatttcgctgctgtttgtgtggttcagattgcacaaggcttggaggaagaggcggcagacccaaagggaaatgaccatctctttttgctgatcaagagaccagaagagggcctgcttgcagggctctgggagttcccactggtccttgtggaccaagggaaaaccgatttgctgaacagaaggaaagcaatggacaagtatctgtcaaagttgcttagcatcgacatggttcggaaacctgacgtgatcctccgggaggatgttggtgagcatgtccacattttctcccacattcgcctgacaatgcatgtggagctcatggttattaatctcaaagatggtgtggatcgactatgcaaaaagggtgctgatagcacaaagttgaaacttgtcaacgagtcctgcgtggagtccatgggattaacatcgggtattcggaaggtgtacaacatggtcagggctttcaaggagaaaagcctcgctgtatctgagataggtcatgtacccacgaggaaaaggactagacggttaaagcggtagcctaagcaattaggcagtagaggcaagaactagacggttaaagcaagtaaccgtaagcaaattagggagtagagactgctagctagtgcagtacaacatgcagcttgtgagatgttgatttctgtttcggtgcatgtatctggcgtgctgatgtccaaaactgctaattgttgcaagcttgctggaagaaagaaggctgattggtactcagggctcttgtttatcgcgcaattttcctgcatttccagacgtcaagtgatacacagcgttttagttttatgtacgctttggtttgttc

SEQ ID NO: 92674 - DNA, 309 bp, Zea mays
  Clone ID: MRT4577_18450C.1
tggaaatgatatccttttttagaaggatcggtggctgaatggtagatgcatcggagaggtggcacctgaggttcttgagcatgtacctaggtgtatggcttccagaaggctggttaaagatgctctgactgatctaaattgggtagctgacataaggggtgcgctttcagttacggcgctagcgcaagttctaggcctatgtgacctactggagggtcttgtacttcagcctggtattccagataggcatagttggcaattcaatgcttctggggactactctgctagtgctgcctacacagttcttct

SEQ ID NO: 92675 - DNA, 333 bp, Zea mays
  Clone ID: MRT4577_184510C.1
ccaacaagctcgtttattaattaatatattgaaactggaatgagatggcaaatagctttggtgctgggtttatgttacaccccaacacaagagaaaatgtcacttcggttacagtcatgagatccttctttttttcaagtaagtactcctaagtattttattagtatgggaatataaggcgtaagttgaccgttgctctctactacttcatgcatgtgtaccaagagcatccatgcaacatgggcttaatttggcggagatggtgggcgtcgggctgggatcaggattaggcgggccaggagcaggcgggccaagcacaggtgggccaggcgc

SEQ ID NO: 92676 - DNA, 192 bp, Zea mays
  Clone ID: MRT4577_184511C.1
cccacgcgtccgcccacgcgtccgctctccaatcccacagtcaagatggcctcctctgcccgtcagtttgcccgcgtggcaactcgtaccactacccgctccttcgccgctgctcctcgacaggctttccgccagcaaggccgccgcttctactcctctgagcccgagaagaagtccagctctcttgtctac

SEQ ID NO: 92677 - DNA, 754 bp, Zea mays
  Clone ID: MRT4577_184512C.1
tgggatctgggctcagtctctttacgaacttgccatgaacccagaaaaatacagaaactcagattctattccagacacatcagatgaatatgttgtctgaaagatctctatccacaggccgaaaggcatgttttggtgatagctagaatggatggtcttgactctctagcagatgtcaagaaagaacacttgcctttgttgaggaggatgcattcagctggggtgaagtgggcacataagttcctagaggaagatgcggctttggaattcagacttggataccattcggttccatcaatgcgacaattgcatcttcacatcattagccaggatttcaactctgcaagcttgaaaaataagaaacattggaactccttcaccacatcatttttccgtgattctgttgatgtgattgaggagattgaacaaaatggatcaacaaccaccagcagtgatgaaaaggtactcgctatggaactccggtgccacaggtgcaggagcgctcatccaaacatcccgaaactgaaatcccacatcgccatctgtaaatcttccttcccttcacatcttcttcagaaaaacaggctgttgttgtcctcgacgatgcatatggaccgcacgtagatgcttgaactcgatgatcagttgtccttgcacgcacattttgcatgtcgtgcttgcctaaggatgatcgattttttctctccctaatgcggactagtggaaacttgcccccctttcagagacccgcaaa

SEQ ID NO: 92678 - DNA, 243 bp, Zea mays
  Clone ID: MRT4577_184513C.1
caccctcacaactgcttacagaatggatcatgtcccccttatgtagaggtgaccacttaattgctttcctgcctccttgaaagagagatagaaagaagactgtgtttttgccactgatttagccatgtgaaactcatctcatcacccttttcttggtttgaagctgctgtctctagaagtgccatctcaattgtgctttgtatttctaagtgctggagaaatcttgaatagcttatgtacaaa

SEQ ID NO: 92679 - DNA, 182 bp, Zea mays
  Clone ID: MRT4577_184514C.1
ccccatacctctaccagcggtgtcttcaatgtgtgaagaagggaagctataggagcttgtgagcattgtgggaaaatgagcgcggtagcaacacttgcagcaagaccaaggagcataagctcatgtcgtttacctcctttaccattcctctcaccagaggtgtattgcatcaagaaaaaaca

SEQ ID NO: 92680 - DNA, 457 bp, Zea mays
  Clone ID: MRT4577_184515C.1
ccccgggtcctgcgggggggcgggccagcccggtagtggggggcgggaccggcaggcggaccaacggtcaaaaatggggggggggtgaaagcgtggggggatcacgggcaaagacaggaaccgggccaaaaggataaagcggtaagactggggagcctaaagagggagggaacaaaaaaaaaaaaagggggggtgactaaagggggagcaaacggaaaacaagtcgggcgagctgactgaacgaattggcccacgcaaaccgagagggggggcggaattaaagaaacaggcaaggtgcggtttaaagccgcgagacggtcaggagccaaggggggttaaccgtccggccgggagagagggaaaagaagggggccatgcaaggtggggccaccaggagaaaaaaataagcggtggaaggtgaaaaaccccaataacaaaaaaaccggtgggagggggg

SEQ ID NO: 92681 - DNA, 347 bp, Zea mays
  Clone ID: MRT4577_184516C.1
acagccaagaccaggtctcgttgggttatctggtagttcaaaaccaccacttcatcgaagccactcacgagcctggcttcacctttctactggcaaaattcgacggcatcctcgggcttgcatttcaggaaatttcagttgaaggttcacttccagtatggtacaatatggtgaaccaaaacctagtggcgcagcctgttttctccttctggttaaaccggaacccattcgacggggaaaggggcgaaattgtgtttcgaggttctgacgaacagcattacaaacgaagccatacgtacaccagggtcacttggaaaggctactggcaatttgaaatgggtgacttt

SEQ ID NO: 92682 - DNA, 683 bp, Zea mays
  Clone ID: MRT4577_184517C.1
gaccagtgaatcacatctcactgttttattccttcgctacaaatttaaaatgcaggggtacagtacatcacagtttaaggcttacccacctcagatccctgaatcagttcagtatatatactacactatatatgcagacgaacgaataatctcatgtcaaacacggactgataaacaaagatggatcctcgagattacatgcaagccaacatgcatgcatgtatgcatgcaatggatccacgtcatgaaacatatataacaaggcataacataacatcatgcttgtctgcctgcagccatatcaatgaccgcctcctccaacactgccttcgaaactagcagtagcactagctccaaagccgccgccatacccacctccacctccaagaccttttccaatgccacctcctatacccgctcctgcgccaaaacctccaccatacccggcaccaagtcctccgccaccgttgatgcctacaccatcaagaccttcatgcgtactaccacttcctacacccagtccagagccaaagcctccaccatgcccactgccgaggcctcctccgccgccgcctccaaaccctccaccactgccgtagacaccacttccaactccaaattcgctaccgaaaccaccaccatggccaccgtcgagtccccttcttcttccacatcaacctcca

SEQ ID NO: 92683 - DNA, 417 bp, Zea mays
  unsure (1)..(417): unsure at all n locations
  Clone ID: MRT4577_184518C.1
accaaaggacccaangccaggagaaaagggannccnanggggggagggccnaaccgcannggaaagcncacannaacccgncaannnngganccaanncgggannnnncnggggaaggggcgggaagaaangggaacannancganncaaacagaggaaagggggggggagggangcaaacgcngnaccnagagganaggganagaggaagagggaaaaancgnnnngaannananaaagaanaaagcccaaaaaannngncgaagaaagaagagcccagacncnnaaggaagaaanggnnncncgaaaaggaacccncnganncccaaagaaggaggggcaagggganggacaccgagaaagaaaaccncnnannanaagacgngnnngganccgcacangngcggggaaagaaca

SEQ ID NO: 92684 - DNA, 117 bp, Zea mays
  unsure (1)..(117): unsure at all n locations
  Clone ID: MRT4577_184519C.1
tacngagctcgtngaggcnggaatnaattcgggagcngtagctgcaggtcganacnangntatccctatagnatagtggaaagtacatctggcgtanatcatcgngatagagagttt

SEQ ID NO: 92685 - DNA, 277 bp, Zea mays
  Clone ID: MRT4577_18451C.1
gcagaacgcgcccctagcgtgttttttttctttgtttttttttccaacttttcgacaatacatacgcctcaaacagccttccggactgctataccattaccaccaccatccacgcctgccgggggggcagtgggtggataaggcacaggagtcctggggggggggggggggatgatgggtggagaaccgcgaaagaaccaaggttgaaaatgtgctttacggtcgagcgcgagccggccccgggccattgggggcccgttgggggttcttccggggg

SEQ ID NO: 92686 - DNA, 365 bp, Zea mays
  Clone ID: MRT4577_184520C.1
tcggtgccacaactacgacatgctgttctgtgccaggcaaaccgacgccgtgcgcgcctcctactacttctaccaaagcgacccagcatgggacaccgtgaacttttgacttcactgcacacacaaccgaattcctcggggagctcatgcagccggatggggacatgtcccataggttgaattcaaaagcaaatgaccaaagggcggccagggccatcaagagcaaccctatatacatcagcgacaagctgatgaaccacaattcccagctgttcaggatgctcgatctccgccacggatgcgtgatacacacgcaatttgctggtcagtccaaacgcgaatggatgttatcctaacctgtgcgc

SEQ ID NO: 92687 - DNA, 374 bp, Zea mays
  Clone ID: MRT4577_184521C.1
gaaaatgatattaattttattggatcattttactgactagaacgccagacttagagtggatataagtataaaaataaccaaattcttacaaataatactttgctgctacagtactgaataattagtggaggttgcaattataatacaactttaaataacattctcataatgggtttaacacaatcaaccaggggctaaggtttaaaggtttacaaagagaaatccaggacaacatgaaaactcccaaagttcatattccagctaaatgcttcatttaaccgtcaatccaccaacacaaacattaacaaaactcagagcaactcatgatgaaacagtcgttctctttttaggacaggccaaggttaatacagaaa

SEQ ID NO: 92688 - DNA, 2195 bp, Zea mays
  Clone ID: MRT4577_184522C.1
cattgggtacctcgaggccggccgggacattgggacaggcctaacaacagtagcccaacacggcctgccactaactccgcctccggacggggacggcgaggccgacgccgccggtacgttcgctctgccggagtgctggatatccgcccgctgctcctcagtcgaccctccgctcccgcccatgcctcgacccaagcccgccgctgccggtggcggctggctttcagggtgggggtgggacctcatgctcggatcgattgccgcgttctacgccgtcatggcgccctacaccaaggtggaggagagcttcaacgtgcaggccatacatgatattctttatcacacttatcacatcgagaagtatgatcatttggaatttcctggagttgttcctcgaacgtttataggagcatttgttatctctattctctcatcacccacagtctttgtattgcgtttacttcgtgttccaaagttctatagtcttcttacagttcgattaacattgagttgtgtcactttgatgagtttgagacttctcagagttcaggtaaaaaagaagtttggccatcaagcagaagcattctttgtggtactaactgctatccagtttcacttgctgttctactcaagccgtccgcttccaaatatctttgctttagctttagtcaacttggcatactctttctggttcaagggaagctacctatgtacattacgggctctgattgttgcagcagttgtttttagatgtgatatgattctgcttcttggcccaatagggcttgcacttttgctcagcagatctgtttctctcttggaagcaataaaatgttgcataagcactacccttgtatgcataggatttaccgtgctaatcgactctataatgtggcgtcgaatcctgtggccagaatttcaagttctctggtttaattcagttctgaatcggagttcagaatggggtacccattcaattcattggtactttacatcggcgcttccccgttccatgatagtggcataccctctctgcatggttggtgctcttcttgatagaaggatagtaccatacatgtttccggtcttcttatttgttgtgctctattcaaaacttccacataaggaactccgtttcataattggctcaattcccatgtttaatgtgtctgcttcactaacagctagcagactatataataaccgaaagaaagctgggtggaatttgctttttattctcatgcttggtgcctttcttgtcagtctaggatattctactgtgactttcatggcatcctacaacaattatcctggtggctatgctttaaaggctctacatgaagcagattcttcagtgaaggaaaagatggtacatattgatgccttcactgcaatgagcggggtttctcgtttctgtgaaaatgaatatccttggagatactccaaggaggaagaaattcccatcgaagaatttgagaaaaggaatttcacctatctactgaatgagcaccgctccatcggtggctaccagtgcctgttcgctgtggatggattctccagagtaaaacttacgccccaaatccccccgctctctctggtgaaagaacccaaggtgtttgcacatgggaatacgagagaccctgacattctttcactgagttggcccggttgtccttgagggcatggggacaccggacacccagattcctgtggcaggaccactaactgccagcagtgaagatgtgtttgagtcagtccgcgtgacacatatatggtatacatctctgggtcttgccatgaagctaccttacctgcaaatctagaatggggcccctcctcccctagatcccacggcttcgaaaccacagctttaaggaacactgccattttcaggtgcaaatttgtgtaacattttagagccggaagaaagacagaaagcacacggggggtggggggaatcatagcaattagcaaccttgtatttacaagttggtcgatatatttttttcccttttgaggcaactttcatactccatcttatataacaagagcttctagactttatttatcggcagcaggcatacagtcgtgctggagacgcatacttgctccattcaaagaataatatatttgttttctaaaaaaaaaaaaaaaccacaccaaaacaacagaaaaaaaaaaaaaaaaaagcggcc

SEQ ID NO: 92689 - DNA, 260 bp, Zea mays
  Clone ID: MRT4577_184523C.1
atgaatttggcgggagaccggggcattttctgcaagcaccgtatgacggtcttatcgacgagatgcctggatgtgatgctggataaagatggttggcctggtcaagaacatgcactcgtgctcagctatatgaaccatgtggaccgtggcatgattaatgtatggattatagacaaagtgccttatgaaggacatggatgacatgccttagttgctgtatgactgatgtttatagttttcaggcattgaagatgtggatc

SEQ ID NO: 92690 - DNA, 139 bp, Zea mays
  Clone ID: MRT4577_184524C.1
ttttttgccacagcctgtccaaggagctgtttgggtcgccctgagcacggacaaacccaaaaagagaaaacgttgggaagggaccataatacaggccattcgaatccaaggggccaaggttgatcgggacagaggaagg

SEQ ID NO: 92691 - DNA, 684 bp, Zea mays
  unsure (1)..(684): unsure at all n locations
  Clone ID: MRT4577_184525C.1
gccgggagctgccttccccgctacgcctatcccacccttggtccctaccgccggccgggagcagccgcgtgacacggtcactcgcgccacccgttctgcacctcggcccttcccatggcgacgcccgtctccgcgccggccccaccaaaccctaaccccgtctccggcgacccgccgtcgctgctgctacagcagcaggaggaagaggtgccagcgccggtcccggagacggcgccgacgcccctcaccacctcgatcgaccccaccccctccggcggcgaggagagcgaaagcgatgactcctcgtccgtctggtcggcgccctcctccgcgcccgcccccgtcctcgcccccgcccccgcccccgcggcgccctcccccgcggccaaggacatcctccacatctccttcaaccaggactacggctgcttcgcagcgggcaccaagtcgggcttccgcatctacaactgcgaccccttccgagagatcttccgccgggacctcgccgccgagggcggagtcggcgccgggggagggggtatcggcgtcgtcgagatgctgtaccgctgcaacatacatccgctcttcggcggcggagataacccccactacgcgttcaacaaggtcatgattggaaaaaacaccanagccgctggatcggtgagctctccttccgctcccccg

SEQ ID NO: 92692 - DNA, 838 bp, Zea mays
  Clone ID: MRT4577_184526C.1
ggaataaggatggcacggacaaagcaaaggataaaagaaagagagacagtgcgaagaagcaagatgaacataaggaaaggggtgaaatcgcaccgaagcttgcgtctgatctgcatttctactcgatcgatctcctcctccacgccggccgcggtcacggctagctcgccagccatggctgtccgggaggaggcgctgcacatcctcttctttccgttcctggcgtccggccacctcatccctatcgctgacatggccgcgctcttcgccggccgcggcgtgaagtgcaccatcctcaccacgcccgtcaacgccgccatcatccgctccgccgtcgaccgcgccaacgacgccttcgccggcaccggctccccggccatcgacatcgccgttgtgccgttccccgacgtcgggctcccgccgggcgtcgagaacggcacggcgctctcgtcccaggacgaccgcgacaagttcttccacgcggcgactctgctccgggagcctttcgaccggttcctcgccgacaaccgcaccgacgccgtcgtgtccgacagcttcttccattggtccgtcgacgccgccgcggagcgcggcgtcccgcgcatcgcgttcctcggcagcagcatgttcgcgcgctcctgcagcgacagcatgctgcgccacaacccgctggagaacgcccccgacgagcccgacgccctcgttctgctgccggggctgccacaccgcgtcgagctgaggcggagccagatgatggacccggccaagaagccgtggcagcgggggttcttccagaccgtgaacgccgccgaccagaaggaattccggggaagtgttc

SEQ ID NO: 92693 - DNA, 146 bp, Zea mays
  Clone ID: MRT4577_184527C.1
tcttggttcaaaacatgaagcacatcacactacaacaacattctgctttactagacctgctggcctattctaaatgtaataaaggtcttcacattacgaatcgattgatggtttaacatttgttcgtttttcaaaacaacttgttg

SEQ ID NO: 92694 - DNA, 445 bp, Zea mays
  Clone ID: MRT4577_184528C.1
tctctgatgcttttttttaaaatgcagttacacttgctaggcgataccatcccaacagagaataatctggcgatagaaggggcgacacatgaatcccaacatgaggcgcatgatacgcccctctgcgtttccagaacactataaaagcaattgccgggaactctaaaataaaccattcctaacaagcgtttctatgggctatatggcactgtgatgtgaacaacattagtggggtctcattaaaacctatcacggagcgcgtccatttgggaatgaaaagaaatcaccttatgatgatggcctttgatgcttattgacactactttgtctttactgagatacatggatttgcgtttgataccacccttcaataaggcggaccttaatgattgaccccagatcctctctatacgcgtgaatctatactgcacatgcacccttggga

SEQ ID NO: 92695 - DNA, 583 bp, Zea mays
  Clone ID: MRT4577_184529C.1
gacacacacacacactcatcaacagcagttaagcctctcccaccaagacaggaacattggtgaagaggaggtcaaaaacgtggaggtggatggtcaccaatgagccccaggcgggggagaaagaggacgtaggcgatgacaaagccgtaatcctcgagagcgacccggcgtctcccgcgtcaccggactactactgcaaaggcctgggcattccatataaaattacgaatgagacctggtcgcgagaacactgcctgtgcgaaatatggtggctgcaatgacaagcatctaactattgcaaaggtgtaaacagagaagaggaactctttcatcaaaccttgggaagagaatgaaaagacaaaagctctgaacaaggctgctaataaagaattcgctattctttcttgggaaaacacaacgaaagcaaacatagaacttttactgaacaagattgaagaacaactgtaaaagatcaatgctgtatatgcatgacaacatgaagaacaaggctgccctgatacacaggggagcccaagagaagcgagctatggtggaggcaaaacgcggtgaggaggcttctgaa

SEQ ID NO: 92696 - DNA, 550 bp, Zea mays
  Clone ID: MRT4577_18452C.1
gggggcccccttctctccttttcttttcctttttcttttttacaggctgaagaagctgggtaccaagaaacccgaacaaattttcctttgactggatcccagtaatataatctaactcccaggagccctatttggacaaaagggtgcaggcagggagggcatggatgccattgaaaacccccagggaaagctccctttcaagctggtgccttggggcccccaacacctttttgaactgcatgtaccaggctcccattgctaaccactgggcgtccatcatttcgaaccctatgcagtacaacacggcgaacccatcctcggggtctggcaacactttgaagaaattaaaccctggcaaaaacttcgggccccctgagttgagccccaacagttgaaacaacatgtatgaaaaggttacccccccgaccccaaagggggacccccatggaggtcgcattccttggtggttcaaaaacaacctcttgaaaaaaaccgggtatgttcttgcaaaaaacaaaagggtttcgagcgaaacaaacccacagccctt

SEQ ID NO: 92697 - DNA, 392 bp, Zea mays
  Clone ID: MRT4577_184530C.1
cccagtcccggggtctagtctgagggccgtttccatggccaaccgggcgaggccgctccgggccatctacatgaccagcacctgccatgaccctgacacgtgggcgcacctcatcaaggagtacgcctcgcaatccttggtccgggaagccgccctcggctacgccaggaacctgacccgccggactcaccaccaatccctagtaagcgtcctgatcaaggccgtcgctgccttcttcccggacgagctaggtgttggcatgtaccttcatgcggaagccctcaagagcggctttgcccgcgatctgatcatcggcaccacgatcgtgtggatgtgctgcaagtgtagtgcactcgacgacacgcgcagggcgctcgactaaatgccggacc

SEQ ID NO: 92698 - DNA, 719 bp, Zea mays
  Clone ID: MRT4577_184531C.1
acgtcagtgcactcgatccattcctctcctctcactcccgcaaagaagctagggttccccgctgcgccgccgccggtcctcgcctcatctgctccccgacgcggccatctccggcggcatggccggtgggtaggccctctcccgtgccctaccgaccagattcatcgagcacgttccctagcggccacccgcagctctccccatggctagggtttcggcctctgcgtcgccggcgtggcttcgacgaccctccctcgtggctccgggaccagaaggctgctccgacgccattcagggagaggaggacgacgcccgcccatggattttgagcagtagcaactcaaggacaaggtcaacacgcccctggatccaggaggttggtgtcgaggaacctgagatgtagccacttgctaactcacccacgcacctgcaccaacttgatgtagtgagaggatgagtgaggcttctctctcgggatgatgcccagccatggggaggcagcaacccaaggtgcactagcttttgaaaacatgagttgaacaaggtggcctgccaacgttggcatccttgtaatgaagactacattggaaagatagaaagtatgggaaggggaaggacaagatcgacgatgaggatgttaccttccagcgcatggtggcaaagatggagtacgaggacgagcagcagcagcagcagcagcaaatcagcctgatgatgac

SEQ ID NO: 92699 - DNA, 474 bp, Zea mays
  Clone ID: MRT4577_184532C.1
atattgcgtcctcttcgcaaggcaccgctgccgaagcccgccttcgccgccgccgcctctgcgatccccgcaaggtcgcatacatgtctaccgtgctccagcgcccgacccccggcacggtccagtgcttcgaacgtatgaatactgttgtggccgtcgcctacaccaagccgcggtgcgctctgatcaaggtgaacggcgtccctattgatgtcatcaggccggagatgctccgcctcactgacttcgagcccatcctgctgccggatcgctccaggttcaaggacatcgacatgaggatccgcgtccgaggtggagttaagacatctcgatatctacgccattcgccaggacgtctgcgaggggatcgtcgcctatctactagaagtatgtcgacgaggcgcgctagaatgaggtctaggacatcttcacccggtacgactgtacccttctcgtctgctaccccatgcgctg

SEQ ID NO: 92700 - DNA, 285 bp, Zea mays
  unsure (1)..(285): unsure at all n locations
  Clone ID: MRT4577_184533C.1
ggccgctttttttttttttttttggggntttttttttttttttttttttttttttttttttctatttttttttggattttncggctttttgatttttctttttacttggggaaaacggcccgtgaacctagtcttttaagggttggccaaattcctgcacacacttcctacttgtggttgggacaccgataacaaggtatttacaggggggctgaaagcttaacaaaacaggaatttggaaaaattaaacgcggcaaaaaactccaatcgccgcccggatttttt

SEQ ID NO: 92701 - DNA, 406 bp, Zea mays
  Clone ID: MRT4577_184534C.1
tccttgcgtccgcccacgcgtccggttctcccaaatctgagagcgttcccaggacctagggttcttgagatccagccccaggatggatccttaccctaaagcttccctttctcctcgccattagttgttttcgcgtttgttatttccttttctaatctgtctcttttcgaagtttctttttttccttgttctgcctttttataaatgattccgcgcgcggctgctctccctactatttttttatcgtattccgccgtgtaaaaaggaaaacttgctcgatgtcctttttgtttgttgcttggtaataccgttcctgtttgctataattattcgatcagcggggatgtgaaagtacttgttttacatttgttcgggttctaataaaggactggtttggacttggctt

SEQ ID NO: 92702 - DNA, 1195 bp, Zea mays
  Clone ID: MRT4577_184535C.1
gcagagccgccgcgtggcggtggcgttccaggcgtacaacgcgctgtcgccgctcgtcaagttctcgcacttcacggccaaccaggccatcctgcaggcgctcgacggcgaggactgcctccacgtgatcgacctggacatcatgcagggcctgcagtggccggggctcttccacatcctcgcgtcccgcccgcgcaagccgcggtcgctccggatcaccgggctcggcgcgtcgctcgacgtcctcgaggccactggccgccgcctcgccgacttcgcggcctcgctcggcctcccgttcgagttccgacccatcgaggggaagatcgggcacgtcgccgacgccgcggcgctcctcggctcgcgccagcggcggcgggatgacgaggccaccgtggtgcactggatgcaccactgcctctatgacgtgacggggtcggacgtgggcacggtgcggctgctccggagcctgcgcccgaagctgatcaccatcgtggaacaggacctgggccacagcggcgatttcctgggccggttcgtggaggcgctgcactactactcggcgctgttcgacgcgctgggagacggcgccggcgcggccgaggaggagtcggccgagcggtacgcggttgagcgacagctcctgggcgcggagatacgcaacatcgtggccgtaggggggcccaagcggaccggggaggtgcgcgtggagcggtggagccacgagctgcggcaggccgggttccggccagtgtccctggccgggagccctgccgcgcaggccaggctgctcctcggcatgtatccgtggaaggggtacacgctggtggaggaggacgcgtgccttaagctgggctggaaggacctctccctgctcaccgcgtcggcgtgggagccggcggacgacgctgccgcttctgcgcccaccggttaacgagtacaagacaagatttttgcagcaggtagattatgattttggaattccatttcatgcctgctgccagcctcgcagccatccttggtggactggtcgtcttctcttcttgctgccgccctgctcgtgtaggcgtcttgtgagtttgtttttgtgatataatcgtataggcttcggcattcctttcgttctcctacctccagtatcaattaccaaatcaactttggattttgaatatttagtatactgcagctttgagtc

SEQ ID NO: 92703 - DNA, 299 bp, Zea mays
  unsure (1)..(299): unsure at all n locations
  Clone ID: MRT4577_184536C.1
gccccncgggagaaaaggagcagaaagggncgcacaggangancgccgcgcggcaggcacagggggaaagggggaaaaaaaagaccgncaggcgaaaagagagaancagacgccngccacagcaccaggcggggagaccggnngcggatcctggagcacgacccaagcaagccggagacggcgccgggagagcgccgccaccggaggcgaccccgcccgcgnccggggccgcccgccccacgggcacgggagaancggaccaagggcggggacccaagcgggcagcacacgggggggac

SEQ ID NO: 92704 - DNA, 1538 bp, Zea mays
  Clone ID: MRT4577_184537C.1
cattgggtacctcgaggccggccgggaccaccaccatagatcgatccttgagttgacgaaaacatacacagctgctagctaatcctgccgtgagtgcaatgcatgcgaagatgacgaagcccgcagccatcgttgttgctgctatcgccgtcctctccgtcagcctgctggctgggtcgtcgtgccttgcccttgcgcggcccagcggcgacttctccatcgtgggctactcagaggaggacctgtcgtcgcacgagagcctggcggagctgttcgagcgctggctgtcccgccaccgcagggcgtacgccagcctggaggagaagctccggcggttccaggtgttcaaggacaacctgcaccacatcgacgagaccaaccgcaaggtgagcagctactggctgggcctcaacgagttcgccgacctcacgcacgacgagttcaaggccacctacctcggcctacggagcagtgttggcgatggtggtagtggtatcgatgacgacgacgagccggaggaggaggagggctacgagggtgtggacggggcgagcctccccaagtcggtggactggcggagcaagggcgcggtgacgggggtaaagaaccagggccagtgcggcagctgctgggccttctccacggtggccgccgtcgagggcatcaaccagatcgtcacgggcaacctcacggcgctgtcggagcaggagctcatcgactgcgacacggacggcaacaacggctgcaacggcggcctcatggactacgccttctcctacatcgcacacaacggcggcctccacacggaggaggcctacccgtacctcatggaggaaggcacctgccagcgcagcagcagcagcgagaagaagtggccgggatcgtcggaggacgccaacgacgatgccgcggtggtcaccatctccgggtacgaggacgtgccgaggaacaacgagcaggcgctgctcaaagcgctggcgcaacagcccgtcagcgtcgccatcgaggcctccggcaggaacttccagttctacagcggcggcgtcttcgatgggccctgcggcacgcagctggaccacggggtagcggccgtcggctacgggacggcggccaagggccatgactacatcatcgtcaagaactcgtgggggcccagctggggcgagaaggggtatatccgcatgaggaggggcaccggcaagcgccagggcctctgcggcatcaacaagatggcctcctacccaaccaagaactgaactcagatcatcgtcaagcagcagctggctgattactcccactgctggcgctccacgcttcactagttcttcgtcgttctccttcacttccattgttttcaagattggacgatccttcgttgtttgaaatgaaataataatgatgatggaattagtgttctccaagttcgaacaaattaagtattgttggagttttcgttggaacaactgtagtctgtagtcagagtgagccccaaatcagggcagttgcttttgaacacaacattgttaaatacttggctt

SEQ ID NO: 92705 - DNA, 291 bp, Zea mays
  Clone ID: MRT4577_184538C.1
gagctcatcttttcggcggccgccctgggaggggaggtgtggttacctcaaaaggaccatcactggaacaactagtggcgtccatgctttgtcatgtgacgagtgacagaagtacactgttgacaaagctgagcgaagctcctcgagaaaaagcaagtgtcaagttctaccgggccccaaaaatgctcgcatctcttaaagacgtctaaaaactggacagacgcaacatggccatctgtatgtgcaactggctatgggatcggtcaccactcaccatcgacagatcactgg

SEQ ID NO: 92706 - DNA, 1763 bp, Zea mays
  Clone ID: MRT4577_184539C.1
gcgtaccgactctcggcaacggatatctcggctctcgcatcgatcgatccctgagttgacgaaaacatacacagctgctagctaatcctgccgtgagtgcaatgcatgcaaagatgacgaagcccgcagccatcgttgttgctgctatcgccgtccgctccgtcagcccattccgagcaagcaagtaatatggcttggtcttgtgctcgtccgatgagcatcgccctcgctgccgtcctcctgctgtgcggcggcgcgtggctgcagcaggcggcggaggcgcgcccccaccacatggacgacgacagcagcatcgacatggaccgcggcagcgacgacttcttctccatcgtggggtactcgccggaggacctgacgcagcacgaccggctcgtcaggctgttcgaggagtgggtggccaagtaccgcaaggcgtacggcagcttcgaggagaagctgcgccggttcgaggtgttcaaggacaacctgcaccacatcgacgaggccaacaggaaggaggtcaccagctactggctgggcctcaacgccttcgccgacctcacgcacgacgagttcaaggccacctacctgggcctcctgccgaagaggaccagcggtggccggttcaggtacggcggcgtgggcgacggcggcgacgaggtgcccgcgtccgtggactggcggaagaagggcgccgtgacggaggtcaagaaccaggggcagtgcggcagctgctgggccttctcgacggtggcggccgtggaagggatcaaccagatcgtgacgggcaacctcacgtcgctgtcggagcagcagctggtcgactgcagcaccgacgggaacaacgggtgcagcggcggcgtcatggacaacgccttctcgttcatcgccaccggcgccgggctccgctccgaggaggcgtacccgtacctcatggaggaaggggactgcgacgacagggcccgcgacggcgaggtgctcgtcactatatccgggtacgaggacgtgccggccaacgacgagcaggcgctcgtcaaggccctcgcccaccagcccgtcagcgtcgccatcgaggcgtccgggaggcacttccagttctacagcgggggcgtgttcgatggaccgtgcgggtcggagctggaccacggcgtggcggcggtgggctacggcagcagcaaggggcaggactacatcatcgtcaagaactcgtggggcacccactggggcgagaagggctacatccgcatgaagaggggcaccggcaagccggagggcctctgcggcatcaacaagatggcatcctacccgaccaaggaccattgatggatcatggacgacggagatcatatctatcttcccttccctttcatccgactctttcgatttccatcgtttgcccccttttcctgaatgtgtgtgtttttttttatatattactgtgtcaagtaatttctcgatggatcgatcgaggaagaacgacaaacatgcactcaagcacgagcgcagcaatgtcatctttctcttcatttggtgcgttgaaatgacgaatatcaaataaagtggtttattttttgtctaaaaaaaaaaaaaaaaaaaatgaactcagatcatcgtcaagcagcagctggctgattactcccactgctggcgctccacgcttcactagtttttggtcgttctccttcacttccattgttttcaagattggacgatccttcgttgtttgaaatgaaataataatgatgatggaattagtgttcccc

SEQ ID NO: 92707 - DNA, 623 bp, Zea mays
  Clone ID: MRT4577_18453C.1
gggtacctcgaggccggccggaatccgtttcacgttctactcccactcgcggacgctggagacagcggcggagagaagaggaaagcaagcaggacgtggcgatcgtcgtactcgaccccgcgctgctcgtcgcgctgagattgacaaggatctcgaggtcgaggctaccgccttcactcgatctagaaagacatcgccaagaagctccagggccgcaagcagtacaccatccagatcggctagagcgagttcgtcctcgaggtagctggagctgctcagcgagggcgcaaatgtgtaccagctcatcggacctgcggtggctgagtacgacttcgcggaggccaaggccaacgtcaagaagcggcatcgagttagatctcctcagagctgaacgggttgtatcggcctgatctagacttgcatgaaaagctcaacagcctgaaggtgtccatattcaagctggagcagaggatgcacgctgtactggctaaggcttagacaactgatttgttggttgctagtatgccaaggccatgcttcatttcatcccaatgtcctccagggtttttttttggtgcggaggatgcggttgatgatgatctcgtctccgcgacgattccaag

SEQ ID NO: 92708 - DNA, 273 bp, Zea mays
  Clone ID: MRT4577_184540C.1
cagcgccgggacggtggcggacgcgtgggcggaccgtgggcggaccgtgggctcgacgcggccaaggccaccgtcggggagcactaaggccatgagctgacgcaccgactggaatccaagggatgcagctggggaggaggcgcacagctgaccatcttctacggcgggaaagtggtcgtcttcgacaggttgccctccgccaaggtcaaggacctgctgcaggtcgtgagcccgccgggggccgacgccgtggtggacggtgccggtgccggt

SEQ ID NO: 92709 - DNA, 193 bp, Zea mays
  Clone ID: MRT4577_184541C.1
cgaccacgcgtcggtcacgtctcactaacaatactcatccatttctctgtctactcctcgtcacccatccagaaacatattcaccacccatggtggcccttcattctgctctcctcccatccaccctctcatccgtccccaagaagtgcatcatctccgtcgcggcgaatgacacggcattccttatcgtatc

SEQ ID NO: 92710 - DNA, 318 bp, Zea mays
  Clone ID: MRT4577_184542C.1
taccggacctacgaccgctatgtgccatacttgattgcaaagatggataaataggctataggtggggaagaccaacgatctagggggccctatcttacatacgcttgcatacgaatttaatccttctgtataccgtgcctctaaatacaattgaatgacctacacttgacacacaggatggactgttaaaaccctgccattacccacctctaaacctactcatgacatcactgtttccccagatgacactatagccataagacccaatctaatagcttttgataacaatatctcaatctgaatggcaaatactactcc

SEQ ID NO: 92711 - DNA, 422 bp, Zea mays
  unsure (1)..(422): unsure at all n locations
  Clone ID: MRT4577_184543C.1
tcgtgcgcgacttttcccttgcgctatcatnnngttccattggctcagaggcgtgttcacgcgttggagaccctgggtnngcggtgtatgagtaccgactcgggccgtgtgaccggagattcgagtgccttccggagttttcaatgggcctgccggggtgcgcactcggacactcgcgcgatgntgcggtgctttcttccggcctgctggacgcctactcttccggctttgaatccgattccaggnnngttggcgggctcgttatatgcagaaagagataacctctatcccgagggcccccgcgcgtgcgtctttcggactttcctaactgtcgctcgtcttgccagccaacgtcaccggcttcgggagaatcttaacgccgatttccctttcggggtgactgcgcgttgagtcgcgctatc

SEQ ID NO: 92712 - DNA, 1226 bp, Zea mays
  unsure (1)..(1226): unsure at all n locations
  Clone ID: MRT4577_184544C.1
gccggccgggccggggagccgaagcaagctcattcatcacagacgtaaaacacctatagagggctcaaaggcacgcgcgcgaaacgcggagcgaggagaagccaagggaggctgttcttcatcatggtcgcatatgcaaccacgtcatacgtcgcagctcaagccctggcgagctccttgcagccgcaggtggtggccgccgtcttcttcacgtcggccgcgtgcacggtagcgctcgccgtcctcctggcctcgctgcggctgcggccgccgtggtggtgcgcgtgtgcggtgtgcgaggcgtacgtgacggcgtcgtggacagccgagttcgacaacctctgcgactggtacgcgcacctcctgcgccgcgcgcccgggcggaccgtgcacgtgcacgtgctgggcaacgtgctcaccgccaacccgcccaccgtcgaccacatgctgcgcggccgcttcgacaactaccccaagggcgcccccttctcggccatcctcgccgacttcctcggccgcgggatattcaacgtcgacggcgactcctggctcttccagcgcaagctcgccgccgccgagctcgcctccccggcgctgcgctgcttcgcggcgggcgtcgtggcctccgagctgcggtgccggctcattcctctgcttcactctgcggccggcgacgagaagctgctcgacctccaggacgtgttccgccgcttcgccttcgactgcatatgcaggatctcgttcggccttgatcccggctgcctggagctgtcgctgcccatgtcggcgttcgcggacgcgttcgacacggcgtcgatgctctccgcgcggcgcgcgacggcgcccatgcatgtgttctggaagctgaagcggctactcaacgtcggggagggagcggcagctccgcgacgccatcggcctcgtcgacacgcttgccgctgaggtgatccggcagcgccggaagctcggtaccgccgcctcgggcgacgacctcctgtcgcgcttcatgggctccatcgacgacgacaggtacctccgggacatcgtcgtaagcttcatgcttgccggacgtgacaccgtcgcctcggctctgacggncttcttcctgctgctctccgaccaccccgacgtggccaccgcgatccgggacgaagtcttccgcgtcaccggagacggagacggccacgccgccacctgggagaagctaaggacatgcactacgtgca

SEQ ID NO: 92713 - DNA, 430 bp, Zea mays
  unsure (1)..(430): unsure at all n locations
  Clone ID: MRT4577_184545C.1
acccagccctttcgtcccgttttactcctggtgcgcggcggccgacagcaaccggcggttctccttcgtgagggtttaagcgacgaagagaaaggggaggaagcgagcccccagggaggtgcacagggagagggcgggagatggctgcaatggctggagcgcctatggcgctcttggccgctcggctctctacttgcgggaccatcggggggtcaggcgggcctgctcacctctacggcccatcgattccccactcatgcgcacctcntgactgcaggaggctccagacccgggtttcacatggaagggttggtacctttgcatctgaagggacgagaaaagattatcagcgtgagcggggacaaaacaaagcatgtagctacactgactcccgttggtacggctactatctccaactttagagagatgc

SEQ ID NO: 92714 - DNA, 283 bp, Zea mays
  unsure (1)..(283): unsure at all n locations
  Clone ID: MRT4577_184546C.1
gacacatcaagtgacaccaccgctcttncngttgnctncnangacctcncacaattnctcantaccatccatntggncgaatcnngtggnagncctcaaggctaaggnncgagtnatganactcatgantcatganannactgaagtgatgaaaaatgcagnatctgtgtgcagagcctcctgcgcaatatgccatttcctnnnngctnagaaactgagtctgtattngtccagagacccggtcattgcangtattgnaaggaacttgatatcngtcatgact

SEQ ID NO: 92715 - DNA, 341 bp, Zea mays
  unsure (1)..(341): unsure at all n locations
  Clone ID: MRT4577_184547C.1
gcacgagcggaagcgaaagaagattcggntcggcccnctcaaagccggncctncnntctggnnctcagnaatnnctgncgngnncggaagncncntncgncncgagncaggncncctgncagancccgacgggacagacacgaccccggaatcccaaaaggaatggcncctntccggtaggccggtggcaagagggcctgcgtgcgtgggtgctcgtccctgcgccttctcccccgcgacgacgcgcgtctcgtccccctccgcctgcagcgcaccagcgctgaagccttgggtcttggacgtgcccaaatcccccaactcggtcctcctaaacgcttgtg

SEQ ID NO: 92716 - DNA, 263 bp, Zea mays
  Clone ID: MRT4577_184548C.1
acccatactctagtatatcttcccttattcttccattccttccatcaatcaccgctttagtgtaggataactcaaccattcaggcctacacaatccaccactcaatcacaacaatcaactcacctacattacacctcttcttttaacaatactcagacatatttttcttgcatatattcgtacaatccattactacataacacattcaacaactattactaccatttatcatccaactcattatcactaacctttaccctcta

SEQ ID NO: 92717 - DNA, 179 bp, Zea mays
  Clone ID: MRT4577_184549C.1
tcgcttcatctccgtccgctcccggcatcgacccctttttcccgtcatgcggtcgccgcccacgggcggggattgatcatcttccggtgcttgagtcaagtaaagaacctttccctattctcggttcgatggattccaacgttcgttatgttcttcgtttaatccgatttttttccatg

SEQ ID NO: 92718 - DNA, 615 bp, Zea mays
  Clone ID: MRT4577_18454C.1
ggccgcttttttttttttttttttgtttttttttttttttttttttttttttttttttttttttttttttttttttttttttttatttttttattttttttttttttaaaaggaaacaagggaaaaatttatgaaaaccccaaaaaaaaaacaaaaacaccaaaaaaacttttaaattttctaaaaccggggaaaaaaccccaaaaaaaggcaaaaaatagcaaaacccaccacccaaaaagaaaaacaaacaaaaaggagggtaacaaagggttaaacaaccaaaaaaggaaccccccaaaactaaccccaaaaataaaactggggaaaaaacacacccaaaccccccctcaagggagccaaactaaacctcaaaaaaaaagggggggccaggtgatttttttattttctcaggggaaccaaagaaagttcccacccctttttgaggggggctccgcctatccaaaaaaccctctgggggacagggaggcattttttgttgaccccgaaagggatccccctttgccaaaacattttgggaaaaaaaaaggggagccccagaaacggggagggattcaaccttgggcagaaatgggggggggaacgccccccaaa

SEQ ID NO: 92719 - DNA, 586 bp, Zea mays
  Clone ID: MRT4577_184550C.1
ttctcggacacgaaacctcccgcgaccgcaacgccatcatcgctcatctcccggggctcgcaagacctgatccacccagatagcccatcatgaacgcccgtttcctccgtccctttgccagggctgccttccgcgcccccacggctgtccgcccggtcgccatggcacgccctgctctcgtcgccagccagaccaagaagaccgaggtcagcccacagcagatgacggtcctcaagtctgctatgccccagctcatccccttcttcttcgtcaacgagactaccgtggcctttatcctcctgccatcgctcatctacgtcttctccaagtacatcctgccccagcgcgtgcgcctgttcgctgcccgcctcttcatcagcaagttgtaagcgaggaacgtcgagttgaagcaaaggatatatatctaaggcgagaaaaagccaaggatgtccatgtaccagtagcgggaatatgctcgtagacaaatcaatggcattgcacgaagagtgacggcatttctatctggcatacttaccgaccaatcatattattttgccaaaacagaatgacaaaaatcagtgttaag

SEQ ID NO: 92720 - DNA, 263 bp, Zea mays
  Clone ID: MRT4577_184551C.1
cgtgcttctgtttggcgccttggccacacgggaagagcttctaactgataggcttcttactgctacggtggcttggcctgctcctgcagtgatttacattggtattattctgtccaccttaggtgcagcactgcagagtttgactggggctccaaggttgcttgcagcaattgcgaatgatgacattcttcctgttcttaattacttcaaagtttctgagggatctgagccacatgcggccactttattcacagctttcatct

SEQ ID NO: 92721 - DNA, 567 bp, Zea mays
  unsure (1)..(567): unsure at all n locations
  Clone ID: MRT4577_184552C.1
aaatgcgaatagaagttgtattgattcgattgttgatgattacaaatcggtcgtagacctctctatttatagaggaggggggctagaccctttacacaactgattccgagctaatcccgcgattttagccaacaaccgtagcacaaaactcggaaccctaatctgctctgcccacgcgcggacagtccggcccacaggcgcggacagtccgccggagggccggacagtccgccggctcatttctggttcgaacacataatagataatgttctttcttacatgaccttagtaagaagacacacttagtaagaagaaaaacaatactaacgcacgcttaagcgctacactgcttaagaagacacacttagtaagaagaaaaacaatattaacacacgcttaagcgctacactgcttaacgtnttaaaaaggtgtccattagttcgaagaacgctttcatgagcagtcgctcaaccggtgcctatagttcgaacttcagttcacacttttcaatcgatgaaatgattctcccgactgggacaatgaccaggatgtgcttngattgtccgg

SEQ ID NO: 92722 - DNA, 116 bp, Zea mays
  Clone ID: MRT4577_184553C.1
gcgctctttcgttcgtagggttatacgctgtttacgggagcaagatacgcaaaaagtgggcagaacagattgaatgttaaggacaagcgtgaatgtcttatattcttagtttattg

SEQ ID NO: 92723 - DNA, 702 bp, Zea mays
  unsure (1)..(702): unsure at all n locations
  Clone ID: MRT4577_184554C.1
caccaatgccacccctctacttcagtctcttcctccttgtactctagtgatcgtcagtgagagaaagagaggcatggccttttccgtggccaagatctcggcgtccttcgccgtgttcatggttctagccttcctccttcgtccctgcgcgtccgtcgagatccaccgcaagctctccggctggtccaacggcggcgccacctggtacggcggccccaacggcgcagggagcgacgggggtgcgtgcgggtaccaggatgccgtcgaccatgcgccgttctcctccatgatcgccgcgggcagcccgtccatctaccaggacggcaagggctgcggctcttgctaccaggtgaagtgcagcggccacggctcttgctcgtccagcccggtgaccgtcgtcctcaccgacttttgccctgacgggacgtgccaggaggagcctgtccacttcgacatgagcgggacggcgttcggcggcatggcgaagcccggccaggccgaccaactccgcgcggccggacgtctccaaatccagtacacacgggtcccgtgcaactggngccgggatggacatagccttcaaggtagacgccggctccaactcctactacctcgccatgctcatcgagtacgaggacggcgacggcgacctgtcgtcggtggacctcatgcagaacggnggcaacggcgcgagctggacca

SEQ ID NO: 92724 - DNA, 404 bp, Zea mays
  Clone ID: MRT4577_184555C.1
gtagcattcccaaaaacttttatttagggcacgagcttattggcgtaattcgaacaagaaccgagaggcgggcccctccaaaagccacaatccatgacccttccaacccggtaaccccaaacatacataagggccgcaggcttgcaccaacgggcgtggattcccgcccccgggcggctcaaatagccctggcgaggaaactctccctgcccccggggacctccccggggcaggggttgatgtccccccccaccctggttttgcgccccaagaaaccctggccccctaggtgaccaagggggggggggggggggttggcccccgcccctgaaacaccgttaaccctctcaaacctttcctttaaaaaatgcttttggaccccccctccctgggggcccaaaccc

SEQ ID NO: 92725 - DNA, 771 bp, Zea mays
  unsure (1)..(771): unsure at all n locations
  Clone ID: MRT4577_184556C.1
cactactctcggcaacggatatctcggctctcgcatcgatgaagaacgtagcgaaatgcgatacctggtgtgaattgcagaatcccgcgaaccatcgagtctttgaacgcaagttgcgcccgaggccactcggccgagggcacgcctgcctgggcgtcacgcacaccaaggccacccctctacttcagtctcttcctccttgtactctagtgatcgtcggtgagaaagagaggcatggccttttccgtggccaagatcccagcgtccttcgccgtgttcatggccctagccttcctcctccgtccctgcgcgtccgtcgagatccaccgcaagctctccggctggtccaacggcggcgccacctggtacggcggccccaacggcgcagggagcgacggtggtgcatgcgggtaccaggacgccgtcgaccaggcgcccttctcctccatgatcgccgcaggcagcccgtccatctaccaggacggcaagggctgcggctcttgctaccaggtgaaatgcaccggccacggctcttgctcgtccagcccggtgaccgtcgtgctcaccgacctgtgcccagctggcgaggcgtgcctgggagagcccgtccacttcgacctcagcgggacggcgttcggcggcatggcgaagcccggccaggccgaccagctccgcgccgccggacgtctccaaatccagtacacacgggtcccgtgcacttggccgnggatggacatagncttnncaggtggacgccggctccaactccta

SEQ ID NO: 92726 - DNA, 291 bp, Zea mays
  Clone ID: MRT4577_184557C.1
taatggttaaggcttcagagtagaacatccacgtaatgggttagatcaaaatcaggggcaaatttctggcttggttaaaaaaatccactagactgtaggagagggataaagggttacgtcatgatagaaaacctcaggatgagcaattgaacagtgagaggtgaaggccagatagtgatggggggaaagggttcggggattttatcagccgggaccatgtttcggtctattcttaatataatacagggagggaggtatttagataaaaggatgagtttctgtttgataaaa

SEQ ID NO: 92727 - DNA, 333 bp, Zea mays
  Clone ID: MRT4577_184558C.1
gagagctaaatacaacgacgggggcgtttttaacagtcatgaatatttagcttaaatgcagggagacaaatttcagggatgatctactgaaaaaggcttttacagggaccgtcatcttctcgggaggggggaacatgtactaactactttcagaggtgaaatggtaaaattttgtctaccgaaaaacgcattgtataaaccactcggatatatgattttgcgaccgatcgaatggacatggaacatgggtgtatggccttggttagggttcacgctttgaatgcagcgttcttgcatagggggtacacgttcttcacctccagccattgattg

SEQ ID NO: 92728 - DNA, 297 bp, Zea mays
  Clone ID: MRT4577_184559C.1
caaggaagttatatgtactccttttaacgatttaaacaaaagtcatatatacataataatggaaggaaaacaaaaacattcagttcatggtttacttattccaaaagatttcataatggtgcgtccagtcttagtatacaactttttctcatgtgtcttttaaaaaagcttttttacaacattcttagttttagaaaatgtatatttattcctctccaagatggacacatcctgcattattattcccatttataaaattgataccattttggagaagacattatcttactaaccatt

SEQ ID NO: 92729 - DNA, 133 bp, Zea mays
  Clone ID: MRT4577_18455C.1
tcttattgacaagttatcagggggcagaagtgctaaggcatatgcgttaaagaatgaaccaactcgccgagagagggggaatgcggattgacgcacatgactacctattctttagagcccaccagactgctgg

SEQ ID NO: 92730 - DNA, 609 bp, Zea mays
  unsure (1)..(609): unsure at all n locations
  Clone ID: MRT4577_184560C.1
cccacgcgtccgcgaagcccgtcgcggcggcagctgtgaagtcagagaggagcggcagcgaggacgacgccgagtcagaggcaatggcggaggtggctgccgcactccgggctgtcggggaggggttcctgcgtatggaggagcgcagtcngtagctatcgctgcagatggagaaggaacggatggaatcggagatgaaacgcacccagacgatgctggacgcccagcagctcttcctcgaggccttcctcggtaagcaactgcagcacaagaaggcctatgtctccccttcctctgccgcaatggaagaggactgatcgatcgatgtatcccggctgctctctgtcaaacttgtgttcatatgcttgcttgatctttgttaactgttgttcatgctggtagttgtggacttcgatgctagtagaattaatcttattgtgtatggatggtgaatttaaccgaacaaaggggtttgggggcaaaggatgttgctgtagggatatagataaggttggaaggatgatgtttgaagtagaaattaggaagtctcggttgtaattagtgaactacatgtgtttggtttcgaggaggagagcaggagtttctggc

SEQ ID NO: 92731 - DNA, 295 bp, Zea mays
  Clone ID: MRT4577_184561C.1
tctatactgagtcgtattacagggtcttccgcatcctcgtcgccgcggcgttcgcgccgctggtctccgcgcaactctctgcagatttctacaagcacgtcttgccgcgacgccgatccgattagcttgggcgtcgtcaagaagcggttcacggcggaccccggtagcgccgccgggatcatccgcatcatcgtccgcgactgcttcgcatgctgctgcgacccatcgagcgtgatcgagccgatgtcgaaccaggcctcctaaatcgaagcgggctcgcacatcatcctcgatg

SEQ ID NO: 92732 - DNA, 426 bp, Zea mays
  Clone ID: MRT4577_184562C.1
tacttcgtccgtgcgcgccggacccggagcaggatttcagcaccgggtacgacggcagggatgtcgtgctccagaacctggtccagatctgcgtgttcagggtcgccaatgggactcgcaggccgtggatgtggtgggactacgtgcacgacttcgctgtgaggtgcccgatgaaggagaagaagtacacgcgtgagtgtgcgaacggtgttatcaattcacttggactggacattgagaaaatcaacaagtgtgttggagatccagaagccgataaagaaaatccggtgcttaatgcagaacaggacgctcatattgggcatggttctcgcggcgatgtaactatactgcctactcttgtcgtcaacaacagacagtacagaggtaaactggaaaaaacatctgtgttaaaaggcagtatgctct

SEQ ID NO: 92733 - DNA, 609 bp, Zea mays
  Clone ID: MRT4577_184563C.1
gaatactctacccatctctcgcctcctctctcctctccagaattatgagacgactcagtatcatgggaaactaggaatgtagttagctgacaacactgcttcgctgtcctccctgctaacgcctgctcctccgctgacgattcgactgcatttggtcatgatgtgcactgcgaacccgacaaagaaaatatggaactcatgatcgccccaaatgactaggaaagacatcaccgagctcattggcgacacgacgtagaacttcgctccacttccatgtagggacgaaagggtcaatcgttgtgctctgtgcagctgttgctgccgaggatgcttctagacgtgaggcaaaaaaagaatacaaggtgtaaaagatacaataaagcgaggaggatatgttgttcagacgcttcaactatgttgcacaatcgtcacagcattgtgacgactgcataaagctgagcaaaccatagcatgtccaaaagttaggctggtgttatgatagtaagtgcttgctggactgctacttgtctttatgtctgtaaattcatccgaatatagctatggtgcccgttattgactcgtgaaccagagcttgtctgactcatatat

SEQ ID NO: 92734 - DNA, 193 bp, Zea mays
  Clone ID: MRT4577_184564C.1
cgggaggccggggtttttaacgggccgctgaggagaaagacccccctatcccccagatttccgggcaaatagtctccagaggccccttagccgaagggttatagtatgggccagggggggataggccctttttttcctggggtccctcgcgcgaggggaccccttttgggggccctccccggggggccccccc

SEQ ID NO: 92735 - DNA, 240 bp, Zea mays
  unsure (1)..(240): unsure at all n locations
  Clone ID: MRT4577_184565C.1
ccgcgatcnacgaggccaccatgtcatcgtcgctgcggttcctgcngccgaagaacgncggcngcggcggagacgacgggnncttcgacngcgtcgagctgganttgacggtnctgtcgncngantcgctnngcctaccgccgtcctactcgccgctgccccgccngctncggccgtacgtgaccgtagcgtcgtcnganacgcccgcnggcncnnnntgcagcanggnngtngcattgg

SEQ ID NO: 92736 - DNA, 208 bp, Zea mays
  Clone ID: MRT4577_184566C.1
gtggtttatcgtttcggcacacaatgtgggctgctgcgtacgaggacctatctaggtcgcgcatcaactgttggtgcacatggtgcatatattaaattctcaccaatcattttagatcgaacgtctttagttgatcattcaattgacaaataacgaccttccaggcttccaccactacagagcaccacattggagggtgcttctagcg

SEQ ID NO: 92737 - DNA, 234 bp, Zea mays
  Clone ID: MRT4577_184567C.1
aggcgcgtccggtccatatggaccaccctgtcggcaatttggtcctccagctccataaccagtgccaccgctgctccgtggatcatctgttcgacccaatccgactccaggataaggtcgccctcgcgcctgctgaagatatgggccacatggcaaatccaacacgctgatcatccttcgttcggcttgtgtccctcccccctgagcacccagcatgcggatcaaggttacggg

SEQ ID NO: 92738 - DNA, 328 bp, Zea mays
  Clone ID: MRT4577_184568C.1
gccacgcgtctttgttgcttttaatcggtttgcagggcgtgacgaccaatcgggccggtttaaagttttgaaagctagcagcctggtttgtttgggtataaggatcaaatggaactttccaagttttggggcaaagatggaaggtatcgagagatacggaacctcgacagctccaatggcaattgaggtctcttccttctgtcttgttcttctcctctccagacgttgctacgtttttttttgatgctggattctgtttttcactctgcaaagacatcgaagcccttgagaataatttttgggcttgttcgttcatcacacacactgc

SEQ ID NO: 92739 - DNA, 673 bp, Zea mays
  Clone ID: MRT4577_184569C.1
cactaactctttgttttttgtttgtcaccttaaagatcaggtatacattttttttgaaacacgatgcagatatgtgtgcataattgcatatatatgcactcacccagtcaccctggcatgcatacgactgaacaagatgggtgaaacagcacagttttcacaaataggtacatggtttgcttctcgcaaactacacggtcatgatggtttgcccgttcttgcacaacatgcattgcatttttgtgccttccaaagaaacttcctccaggccgtggcggcgaaacggagggtcgctggtcgcaggaacagtgcaggatcatcatcatcatctggtcttgaccttgtcagcctgaaacgctgccgagatcttcttccagctcctcgtggcgacgagcgtcggtatgaccacccacaaactgttgttgccgacgaaatacgcccagaagtagaacgggctcgcccagaagctgaagccgtccaggtacgcggtgacgaagtagaacaggcacccgtagagctggcctaacgagactgcgaactgcaggatgtggccgtacggcttccgggatgcgatcgcatagactgcgaggagcgatgcagggcctttgagcccgacggttatcgcttcaagcgcgacgatggcggtgtccctagcggcgtatctggagtcacc

SEQ ID NO: 92740 - DNA, 1423 bp, Zea mays
  Clone ID: MRT4577_18456C.1
ccggccgggacgccgcctctcagtgagatgttgccatcgctggtgcgcgctcgcagcgcccctctccgccgcctcgtctccacgttctcctcgacgctagccgtattgcctcgcgtcccgcacgtcatcagtagcggcggtaacctcaacctcccgttctccgctcacccctcgccggcccgcgacggcccgagcggtccggctggtggagcccagcgagggataagcttcagcacccgcgcggtggacgccagggacgaggcagcctccagctccgccgcggcggactctgacctctccgcgccttacctctccgtccgcatacgatgccgcaggcacgacgtggaagtactctccgaggcgctcttgagcttcggtgctagctccgtgaccgtggatgacatttccgatgctgaaaatctcgatgaaatctccataacttcattatatgctgatggggaagacgtggactccagtgtaagaagtgccgcgaggtcagctggtgtgaactacagtccagtgtatgaaacctctgtcgggaagcagtgcgattggatagcaactgtgcaggaaacatacgagtcgactgaagtggctgatggcctttgggttgttcctaaatggagaactccccctgatccagaggccacaaacataatcatcgatccaggtttggcttttgggatgggggagcacccgacaactaagctgtgccttctatttctacgagaagttattaaaggtggtgaatgtgtgttggattatggaacaggcacgggagtattggggattgcagctctgaagatgggtgctactcaatcaactgggatagatattgaccctcaagccatagcctctgcttcagaaaacttgttgctgaatggtttacattcgaaccaaatgcctgtttatttggtatcaacaaatgcccagccttcatgccttccaagcttcatcgacaaatcagaagagcatcactcaaccaataaccttgacttgaagttatcaagaggaacttatgatgtagttgcagcaaatatccttttaaatcccttactggagctggtcgaggacatagttggttatgcaaaacctggtggaataattgctgtttttggaatattggaggagcaggtgccaaaaatcaaagaagtttactcgaggtatttggacagaatattggtatccgaaatggatgggtgggcctgtcttcagggaaccaggagagtgtagaggaattaagtatttcaccacgttgaagaagggttttgaccttacatgttttgacgattaagagaggactaggtatatacccgtgcgttgcaacaggggacacttgcgcacgcataggtcactatttagtgatgctatcaataatcaactcagcaatcataacaaacatcgaaatctgccatttcgaaca

SEQ ID NO: 92741 - DNA, 335 bp, Zea mays
  Clone ID: MRT4577_184570C.1
ccaacccaaaaaactttttttttgaagtttaccttataaccattttaaaagggggcccccccaatgatgggttgttggaaaaaccctttggggtttgaaaaaccaagttggttaaagggcaaaaattgttccatttgaaaaaggggcccacctttaggcccaccgtgcaggtaaaacggcaacaactgttgttgtgtaaaaaaggcaacagggctaacataaattacctggctaaatgggggaacctttttctgttgaaaaaaaccaccaaatttcattgctcccctttggttaaatgaaaaaaattgctggggggaggcaccacctacctcact

SEQ ID NO: 92742 - DNA, 553 bp, Zea mays
  Clone ID: MRT4577_184571C.1
gtacgcctgcaggatccggtccggaattcccgggtcgacccacgcgtccgctggaaggagggaatcgcccgggcccgcagcggaggagtgcgggaagatggcggccttctccgaaatgggtgttatgccggagattgcacaagctgtggaggagatggattggcttctaccaactgatatccaggcagaatctatcccattgatcctaggaggaggggatgtactcatggctgcagaaacaggaagtggaaaaactggtgcatttagtattcccgttatccagatagtgtatgaaactctgaaagaccaacaggaaggaaagaaagggaaaacaactattaaaactggtgcttcagtgctcaacaagtggcagatgaacccatatgatagagggtctgcttttgcaattggatcagatggtctgtgttgtcagagcagagaagtgaaggagtggcatggatgcagaggaactagaggactgctgaaagggaagcactactatgaggtgtcctgtcatgaccgagggctatgcagagttggcgggtctaccatg

SEQ ID NO: 92743 - DNA, 713 bp, Zea mays
  Clone ID: MRT4577_184572C.1
acgccgcttttttttttttttttttggtatctaaaatatttgaccttctttcaaaggataaaaaccctctgttaatagattactagtggagatgtatgagagaagaggaagatacagaggaacagagagatacggtagagagctggtagcgccgtgacggtcggaaacaagtggaagtttgggttattacatttcataccctctaccgcaacacattcctactatatatatactccagtctctgcttgtgcatcgtgggttcattttcctttgacagaacgccccttctcagcccatcatcagcttgctcttctgacccatcatccaactcagcgttcaaccgctcctgtgccacaaccggcaagacctgctctgtcgaagggctgatgctgacattcccccttcttcgaacgccgcttgtccccaagcgaccactaatggaaagtgattcttctgcgcttcggcgtcctcccaagttgcatgcgaagcatccatccctgaccagatcacttgaaccatataccaactgcatagtgaaaggtgaattgggatatgcagagacgatgaccaattgagtcaataactcttgtgcttacgtatcatgatctttgagagtcggtgtgtactgatagaggcacacagtaaacatatgtgcaccgagtaacagagggatattgtgatcaccaggcctgcttggaggccacccaactaga

SEQ ID NO: 92744 - DNA, 497 bp, Zea mays
  Clone ID: MRT4577_184573C.1
ccacggacgatgagctcgggttcatccggaacgaggacgcgcggaagtacatgcgccacctcccgcagttcccgcgccggccgttcgtcagcctgttcccgcggatgcagcccgtcgcgctggacctcatcgagcggatgctcaccttcaacccgctgcagaggatcacagtggaagaggcgctggagcacccgtacctggaacggctacacgacgtcgccgacgagcccatctgcacggacccgttctcgttcgacttcgagcagcaggctctgacggaagaccaaatgaagcagctgatattcaacgaggccatcgaactcaaccccaacttccgatactagctagctagctagttcggacacacatcttaattatacgtttcaggctgtgtagtctgctgcaggtttcaggtgttcgtgtaatgagctgtaccaagaataaaatgctttggactcatctggtgactggtgggtcccatgttcctcgggcaaaaa

SEQ ID NO: 92745 - DNA, 735 bp, Zea mays
  unsure (1)..(735): unsure at all n locations
  Clone ID: MRT4577_184574C.1
gttcggtcgcgaggggagaaagataggagtctattaatttgcctgttctgcttgctgctgaccttgtgagtgagccgccggtcttccccttcctcgccgaggggaaataataaggcagccacagccagggccgccccgaggaagaagatgagcggaggaggcgtggacggagctccggtcgccgagttccggcagacggtgacgcacggcggccggttcctgcagtacaacatcttcggcaacctgttcgagatcacgcacaagtaccagccccccatcatgcccatcggccgcggcgcctacgggatcgtctgtggaagaggcgctggagcacccgtacctggaacggctacacgacgtcgccgacgagcccatctgcacggacccgttctcgttcgacttcgagcagcaggctctgacggaagaccaaatgaagcagctgatattcaacgaggccatcgaactcaaccccaacttccgatactagctagctagctagttcggacacacatcttaattatacgtatgtatgattcctcngtacgtggtttgtaaatagaagatcgagcgngccgccggtgttattagactgaacgttgcatttgtttgttcgttgacgttcgcgctcgcaggtttcaggctgtgtagtctgctgcaggtttcaggtgttcgtgtaatgagctgtaccaagaataaaatgctttggacccaaaaaaaaaaaaaaaaaaggcccta

SEQ ID NO: 92746 - DNA, 1254 bp, Zea mays
  unsure (1)..(1254): unsure at all n locations
  Clone ID: MRT4577_184575C.1
ctcttagggatcgagaatgcagggaggttcctcgcttctataagaaagatgtgcttttttgttttattttccttgtggagttgtagttcagttcagtttgtcttcatgcatggggagtgcttggttcgattgttcatagccataggtgctacagatttgtctatggccaagacagaagtttttgttttcatgatgttttcatggaagaagatggcgagaagctctccgcccttctcatagttaactttttgattaagtgattaaccaatttagtaacacatatttaatgttttagcttgtttggtttagacatggtccctcagtaatttttaaattttttaattatctttatccataaactaagttggtatgtagtgacgggtaagaaatattgtggtggtttggacctcaattatcgtccagatgaagggcgaaggccattatcagatcctcgtccacctttgggctactgctcacaagtggacgagtggcgtacacctctccaattccccccttcaatgtggtcagtgttgaatcatctacgtcatacagtgagcaagggcatactgatgagggaagggatgacatgtannccactcgttcaagcatcaggttttgtgcgttgattatggtgtggtcgttggtgagactgcgacgtcctcgttaaagtcagctgataatcgtgtcctccaagagcagctactacagaagaatatggaaatcaacgatttataagaaaaagtttttcgcgttgagcaataactctcagcaaaagtggatatatcctctgagaaggaagctgattgtgcacatcaggagactattgatttgaaatctaaacttcagtccaaggaagctaaaattgaaaagatgaaatatgagcatctgggagggaggctgctttggcagaggagcttcttgaagaggagtacaagaaaaggtttgatgaggcaaagaaggaactatctctcgagaatgatctagcaagcatgtgggttcttgttgctaagttgaaaagaggggctttagacatatctgatttgaatgttgatgatcgaactaaagtgtaagggcgtagagatcgccacactgttgtctcataattggtgttaatgaaaaataacatggtgctgcacggaatctctactttgtcttgtaagaaggattgttctgttgatataatttgatttgcatgtctaaaaaaaaaaaaaaaaaaaaaaaaaaaagcttgtacctgcccgggcggccgctcga

SEQ ID NO: 92747 - DNA, 2267 bp, Zea mays
  Clone ID: MRT4577_184576C.1
tgacggagtacgtggtcacgcgctggtaccgcgcgcccgagctgctgctcaactccaccgactactcggcggccatcgacgtctggtccgtcggctgcatcttcatggagctcatcaaccgccagccgctcttccccggacgcgaccacatgcaccagatgcgcctcataaccgaggtgatcgggacgcccacggacgatgagctcgggttcatccggaacgaggacgcgcggaagtacatgcgccacctcccgcagttcccgcgccggccgttcgtcagcctgttcccgcggatgcagcccgtcgcgctggacctcatcgagcggatgctcaccttcaacccgctgcagaggatcacaggtcagtcggcgcgggcctactacagcttagcctgttctttttcctccctagcttcttctctccatgtgcaacttgcaactgggtggctgctgaatcctgaactccgccgcacgtgttctttagttggcgtcggtagtcactgtggtactagcatgtgggggcatgcactcgcgatgcagtgtatagtgcgtagtatgtaggcaaggcaacgcagctgacaacatgtcgcatttccagagagagaggggggggcatgcgtttggtttgtccgcgcaattttgggtgttggactggcctggtaaggactcaggagcatatgcaatcttctttgtctgaactagaaactttcacgcgccaacaaaacggaacgatttggtagtcctctcctcttcgttgaattcattcagagttagagaccataacagaaaacagggcgtcagttctgtgattctagttagctgctgtttaaaattagttggagatataggctattagctgtttttaggtagagacatctaatatctctagctaataggctattaactgcttgtttctttctcctcctgcgtttcccaattctaatattgtgcatccagctcatcaaagttgtgcacgctgtggtctgcgggagctttctccatttgcatccaaattaatgccttgatgttactaccttctacgtttacattacagtactttgggtgctgctgctttgacccatcctcggctttgtatcctcctcctgtcctccatatcgcttttgccgaaatgacgatgacggggctatgtgcatagaaaataaacatgttttaagatagaaaaaaaactatcgatacatagtcttaagggctagtttggtaacactatttttaaaataaaaaaaaaactaattttcctttagaaaatagaaattccttgaaaagataggatgccaaactagccctaaatattagattcctccactggcaacactggcattggcaggcagctatctatctatacatgatcttaaacattagaatatccaggacttggattataccttcattatacttattgctctacaagttcacgacgagtgattgatcataccttcattacactaaataaactctgttgtgccgtgcagtggaagaggcgctggagcacccgtacctggaacggctacacgacgtcgccgacgagcccatctgcacggacccgttctcgttcgacttcgagcagcaggctctgacggaagaccaaatgaagcagctgatattcaacgaggccatcgaactcaaccccaacttccgatactagctagctagctagttcggacacacatcttaattatacgtatgtatgattcctcgtacgtggtttgtaaatagaagatcgagccggccgccggtgttattagactgaacgttgcatttgtttgttcgttgacgttcgcgctcgcaggtttcaggctgtgtagtctgctgcaggtttcaggtgttcgtgtaatgagctgtaccaagaataaaatgctttggactcatctggtgactggtgggtcacatgttcctcgggcatacagaatcacagttttgtctgccaaagttatagcagcttctcttctcaaaaaaaaaaaagaaaaaaaaaaaaatggtttaagaagggggaaaaaagctttaaatccctaccctggagggctagttaggcacacccattttctcaaaagaaataaactaatttcttttaagaaaatgaaaattatttggaaagacgaggatgtcaaagtagccctaaatattagattcctccgctggcactggcaggcagctacctatctatacatgatcttaaacattagaatatccaagacttggattataccttcattatacttgatctacaagttcacgacgagtgattgatta

SEQ ID NO: 92748 - DNA, 1001 bp, Zea mays
  Clone ID: MRT4577_184577C.1
atgagaagtctccaaatttcttaaggtagtcagattttgatattgttgctatcaaagtagacaaactatatttttaacgatattcactaaagttataaagttgagcggggcgtagctgctaccaaggttccctgttcaacgcttgcagccgcatccctttgccagccaggcggtggtggggagggagactgggatggagcatgtgccgatgtggctgcgtgcgttcccggatctgcacagctatgtcagcatgtaggtgtgggttgagccgtcggtgactaatgacatgatggacaaggtggagcaggtgcggcaacggaggaaggccgagaagtccctgctcagcttgcaatgaaggttggctatggcaagcgcggaagaattaaagaataatggttgtcagaagacatatgagagccctggaaaagtgattattacaaaattaacaactcagtgcagtgagtaggcttttgagttagagttaaagtcagctgataatcgtgtcctctaggagcagctactacagaagaatgtggaaatcaacgatttacaagaaaaagtttttcgcgttgagcaacaactctcagcaaaagtggatatatcctctgagaaggaagctgattgtacacaacatggaagctaaaattgaaaagatgaaatatgagcatctgatgagggaggctgctttggtagagaaggagcttcttgaagaggagtacaagaaaaagtttgatgaggcaaagaaggaactatctctggagaatgatatagcatgcatgtgggttcttgttgctaagttgaaaagaggggctttagacatatctgatttgaatgttgatgatcgaactaaagtgtaagggcgtatcgatcaccacattgttgtctcataattggtgttaatgaaaaataacatggtgttgcacgaaatctctactttcttttgtaagaaggattggtctgccagcataatttgatttgcatgaaaaaaaaaaaaaaaaaaa

SEQ ID NO: 92749 - DNA, 663 bp, Zea mays
  Clone ID: MRT4577_184578C.1
aattcggcacgagggagccctggaaaagtgattattacaaaattaacaactcagtgcagtgagtaggcttttgagttagagttaaagtcagctgataatcgtgtcctctaggagcagctactacagaagaatgtggaaatcaacgatttacaagaaaaagtttttcgcgttgagcaacaactctcagcaaaagtggatatatcctctgagaaggaagctgattgtacacaacatggtattattgatttgaaatctaaacttcagtccaaggaagctaaaattgaaaagatgaaatatgagcatctgatgagggaggctgctttggtagagaaggagcttcttgaagaggagtacaagaaaaagtttgatgaggcaaagaaggaactatctctggagaatgatatagcatgcatgtgggttcttgttgctaagttgaaaagaggggctttagacatatctgatttgaatgttgatgatcgaactaaagtgtaagggcgtatcgatcaccacattgttgtctcataattggtgttaatgaaaaataacatggtgttgcacgaaatctctactttcttttgtaagaaggattgttctgccagcataatttgatttgcatgtataaaaaaaaaaaaaaaaaaaaaaaaaaaaaaaaaaaactcgagg

SEQ ID NO: 92750 - DNA, 408 bp, Zea mays
  Clone ID: MRT4577_184579C.1
atggcctcagggcggacgccgctgcagcgatgccctcgcccacatctacgctcgaggggcgaggacaagtacaaagagccggaggtccggggcgcggatggtggcgctgatcccgtcggcgacggggacttcttcagccgccgccacctcagcaccgacgacgggagccgtctgcccaccggcagatccccacacggatcctcccggacgagcagggcaccgacctccgcgcaaaggcaccgtaccggggcaaaggcaggacagccccagaacacgaacgccgccctagcagcgcgcgatgtcttgggcggtcctccggtgcacgcggcgcgacaaccgctcttgcggcgggagggggaaccggaagccgagccagagccagctcagccagcgagcccaacgtgctga

SEQ ID NO: 92751 - DNA, 570 bp, Zea mays
  unsure (1)..(570): unsure at all n locations
  Clone ID: MRT4577_18457C.1
agcggcgagcaagaccatcagcttagacagtgccatggcgaggggaactctgggagcaacaagccagcgagcctggttacaagatcaggatacaccgccccctggcgacagcagcgccaccaagagctgaaggcctgcttgcaacgccaagacggggaggaccaggcactttttttttgccgagaggaagagcggaacgcgctccaggaaagcgaggaggcagagacgccgcccccgngccggaaggacgacgacgagcngaagaccccacacgcaccaccggagcaggaagaaggagaagcagaagcaccggagcccgaggaggacgagcacaacgaacaacagcaacgaccagacgaagagcaggagagaccacaaacagancaagangaggagaagaaaccacaccaggaccagagcccaacagacgacacgcacgccaggagcacaccgaggcaaagacgagggaccaacacaanaccaaaaccaggagcanangacaccaaaccnaccagagaaggagaccgcagcagagcgaaacccagaagcggagcagcgggcgacaccaaa

SEQ ID NO: 92752 - DNA, 451 bp, Zea mays
  Clone ID: MRT4577_184580C.1
gggggcctgtgaaggccgcaacgcttggctcaacctcactaggttcaccaggtacgctggcagcaggccgcgagatctcttgtcgacgccatcgactgatgatgacccgccctgctttgctctgctctgatgcagggttcattcacttaagatcagctggtcacctcacttcacgccgtgtctctctttgtttatctgctgccgcactatacatatactcgctatctcttattcttttccctgtctatctatggtttacgtctccactcttgaggacaggagattcatttctttgcattgtttggcctttttgtggatcgcctaggaacgataggaacataaacacggtattggcgggtccacagttaatttacacacgccacacttgcatgtacgggcccaattcgccctataacgaagtaggtttgaacctgctcgggcgggcgttaca

SEQ ID NO: 92753 - DNA, 1171 bp, Zea mays
  Clone ID: MRT4577_184581C.1
tgtccacgttaagcaatgggtcagcggcggcgtgggaaatccggggaagaagccagtggccgagagacaacagaccgcgtgaggcagcgacagtacgaggcacgccacctagcctgcagagagggtcatctgcacaccaacagggtttgcgacaatgtctagaccttcattctaacagatgcaaccttaaagagtgctgagattcaagaaacactgagcaagatgggtctcgatgccgtggtggccgcctgctacgtctttctagtacttgtctctgtgctcacagttcgcttcttctacgtactgtggcacagtggccaaccagagtcaaggttgtgcaccaccagattgcgttgtctcaatgtccttggctccgaaaaggtccagattaccagctccgggtgatgctgatgagctatctgtcattgaagaccaaattgcatggattgttcacataattacatccattgtcaagaagagcccgcagagaggtcgaggagcagcactagttgtttctctaacgttgatcaaggcaagcacatcaaggggtctcgggcacctccctctcattggtgttgtcgttgaactagttatggtacattggtatggctgcaaattgagagagaaagacctggaaacagtgatgcagcatgttcacacgaagatggcaacaatggtaacatttgcattggtcctgtaaataaggtattgaatatgcttgcttgatggactaaagatccaaactcgaataccttctaacttcataagttcatatcccacgagtctgattacttgtggcttgctgaagatgacatgaagatgcaggaagctaaaattgaaaagatgaaatatgagcatctgacgagggaggctgctttggcagagaaggagcttcttgaagaggagtacaagaaaaagtttgatgaggcaaagaaggaactatctctggagaatgatctagcaggcatgtgggttcttgttgctaagttgaaaagaggggctttagacatatctgatttgaatgttgatgattgaactaaagtgtaagggcgtaccgatcaccacattgttgtctcataattggtgttaatgaaaataacatggtgctacacggaatctctactttctcttgtaagaaggattgtttgtcagcataatttgatttgcatgt

SEQ ID NO: 92754 - DNA, 2069 bp, Zea mays
  Clone ID: MRT4577_184582C.1
aaaaaaaaaaaaaaaaaaaaaaaaaaaaaaaaaaactcgagttttttttttttttttttttttaaagcatgaagacattatacatacaaatcaaattataccgacagaacaatcctgcttacaagacaaagtagagattccgtgcagcaccatgttattttttattaacaccaattatgagacaacagtgtggcgatctctacgcccttacactttagttcgatcatcaacattcaaatcagatgtgtctaaagcccctcttttcaacttagcaacaagaacccacatgcttgctagatcattctcaagagatagttccttgtttgcctcatcaaactttttcttgtactcctcttcaagaagatcctctaccaaagcagcctccctcgccagatgctcatatttcatcttttcaattttagcttcctaccaaagtacatcatcaaagttggttggcttaaatatcaacaaggaaagcataaaatacaagcagtttgcatatagccatctaatgaacatgcatactatttctatcaagtagaattacaggaaggacataacagaaaatttggtgaaaggtcagtaaccaaaccatgaatattgtatgttgaagaatatgcactacacaaggggctcaaatacacaaagtgaaagaacattatcagtaaaagaaccttggactgaagtttagatttcaaatcaatagtctcctgatgtgcacaatcagcttccttctcagaggatatatccacttttgctgagagttattgctcaacgtgaaaaactttttcttataaatcgttgatttccacattcttctgtagtagttgctcttggaggacacgattatcagctgacttgaacgaggacgtcgcagtctcaccaacgagcacaccataatcaacgcacaaaacctgatgctcgaacgagaaaaatccatgtcatcccttccctagtaaaatgaataaggttaacaagatacatttcaaaggaatgacgagtaagcaaacatttagttgattgtcattctcactgcatgctcaggtagatagctgaggaaaatagctcagataatgaggctagcctcatcagtatgcccttgttcactgtatgacgtagatgattcagcactgaccacattgaaggggggaattggagaggtgtacgacactcgtcctcttatcagcagtagcccaaaggtggacgaggatctgataatggcctccgcccttcatctggccaataactgaggtccaaaccaccacagtatttcttacctgtcactacatacaacttagtttccagataaagataatacaaaaaattacaaaattactgacgaacctccatatctaaaccaaacaagctaaaacattaaatatgtgttactaaattggttaatcacttaatcaaaagagttaactatgataagggtggagagcttctcgccatcttccatgaaaacatcatgaaaacaaaaacttttgtcttcgccatagacgaatctgtagcacctatggctgtgaacaatcgaaccaagcactccccatgcacgaagatgaactgaactgaactacaactccacaaggaaaatgaaacaaaaaggcacatatttcttatagaagcgaggaacctccctatattctcgatccctaagagaagagcgcagacaacctgaactgaagtgaaacacaaacagaaactgaaacagagagtggttcctaccaattgtctagttctcatccaactcacacacaagacgaagagacacccgcgtacaacagatagagaaagtgaagctgaagacactcgcggaatgaggagctggtatcaggagtaacttaataaaaaggtttcttaaatggatcactttttctttaaaaatacttgctctaagccattttcttgcctttcctatttgtacatgttagtggtagtagcatcacaactggtctgtaaaaccttgcatttgtgcctagtgtggtcactgttttacaccaatgtaagattgtaagttaagagacaactctaagctacacaattcatatcagaaacaaatagagatgccc

SEQ ID NO: 92755 - DNA, 2587 bp, Zea mays
  Clone ID: MRT4577_184583C.1
cctaatgggatcgagacggcgagctaagcttttcatcaagaggcgcttgtaaattacttctctactatttgagttaactgatgctatctatctatttgtaaataaccgaacatgttgttatctatggatctctctaccccatacttccatggacaccggctgctacaactgatgccaagtactactgcatatatgctgcttgagctagatgctgctgcttcacacctgcttctgctagctggtaccaaacactgcatatatgctgcttcacgcctgcagaactgatggtgaattctatgtgtctgaactgagttcattggttccttggttcaaggtttgttttattggagcatacatttacataaaattagaatggcaattccatacacaactcactagctacttgcaacaattgttcagttcttaattatattaatgttatccgatcatatttcagagcgttagttctgcaggtgaggtgcttgagacaaggaaaagtagggagtcaaaatcatgatgaatgttgtcatcttgaaacatccctaagttaaaaacattgtcaggggttagccttttttgccgtgatagaaaccatcaaatgaatgaaattctttcagttgattgaaaaactcttgtctaaacttatgccagtgattttcttttaaatcataagcatgaagtgcatcattttacattttactgtccttacaaagcaaaacactagcactggtctgtcatcatccaagcacgccatacaattactatttctaactctggttatctgtacacttatggttggaagcggtgcatttttaaaattgttttttatctctatatttctttactgcagattggagagtagtacacaggtatttgtagttctttcatgtgaatttttactactgtgtgatgaaccttcatacacgacagaccttacaagtttgagagttttagatttcagttagctaatttaggcttagttccatagggctgtatgagtgagtgcaacgacgccattataatcattgaagtgatgttttgtggaacaaccagatttgtaaactttaattggatctaagtgaccattataagaaaaatcattgattattacttggttcatctttatgactttatccaacttattataggttttcacgtatttttgttatgagtgcaaggtgcagtttctgtatctaactacccctttcttaacatcatgtggctattctattactttgttttgtgtatataattaccaaacacatgtttgctactagatttatcggcatgaataattgatgagacaaactcaatgttaaacgtctttctttgagttttcttcattgatagagtcaaaggcataaagataggtgtgtgtttcatttcttcattgattagtcctagatcttatttcaactatttcttcattgattagttctagatctgtgaaaagtactacctttatgttgcatggacctcctacaagttccctcattaaccaaaagaaatgagaagtctccaaatttcttaaggtagtcagattttgatattgttgctatcaaagtagacaaactatatttttaacgatattcactaaagttataaagttgagcagggcgtagctgctgccaaggttccctgttcaacgcttgcagccgcatccctttgccagccaggcggtggtggggagggagactgggatggagcatgtgccgatgtggctgcgtgcgttcccggatctgcacagctatgtcagcatgtaggtgtgggttgagccgttggtgactaatgacatgatggacaaggtggagcaggtgcggcaacggaggaaggtcgagaagtccctgctcagcttgcaatgaaggttggctatggcaagcgcggaagatttaaagaataatggttgtcagaagacatatgagagccctggaaaagtggtaaggcatcagttgctaatgcatccatgatggatatgcaacagattattacaaaattaacaactcagtgcagtgagaaggcttttgagttagagttaaagtcaactgataatcgtgtcctctaggagcagctactacagaagaatgtggaaatcaacgatttacaagaaaaagtttttcgcgttgagcaacaactctcagcaaaagtggatatatcctgtgagaaggaagctgattgtacacaacatgagactattgatttgaaatctaaacttcagtccaaggaagctaaaattgaaaagatgaaatatgagcatctgacgagggaggctgctttggcagagaaggagcttcttgaagaggagtacaagaaaaagtttgatgaggcaaagaaggaactatctctggagaatgatatagcatgcatgtgggttcttattactaagttgaaaagaggggctttagacatatctgatttgaatgttgatgatcgaactaaagtgtaagggcgtatcgatcaccacattgttgtctcataattggtgttaatgaaaaataacatggtgttgcacgaaatctctactttcttttgtaagaaggattgttctgtcagcataatttgatttgcatgtataatgtcttcatgcttt

SEQ ID NO: 92756 - DNA, 1314 bp, Zea mays
  unsure (1)..(1314): unsure at all n locations
  Clone ID: MRT4577_184584C.1
tcgaggccgtgccgggcattaaagtccttaacatcacagctcaaggatatggctgaaagactacctccagatcagggagcctatgatggtagcgaagcaaaacaagcacatgttccaaatggcattgagatgtatgcttctatttacactagcatgaatggtattcatcagccacgaaatgagtctgtcagtgccctaagcacgcctggcctgcatattggacgatcatcgcacccaaatggaatctcaaatcatcatcaatcaccaggaagtattactgaaaacagtgaagtgagtgctcacacccatagggtttcaggtcctcccgacgttgaaaatccgaatcgaaggggacatagcagtagtgacgagatgctcagtgcaagtagtagagcagacgatagtagcagcagggacgctagatcccttttgaatggtgaggatggttacaaatctcggagtgcagtatctttgcccagcaaccaagttcaggctgagtggattgagcagtatgaaccaggtgtatacataacactgacaactcttcgtgatgggacccgagatctaaagcgtgtacgcttcagtcgaaggcgttttggggagcatcaggcggagagctggtggaacgagaaccgcgacaaggtctatgagaagtacaatgtaaggagctccgaacgagtctcgtcggcatcatcgatccggtcaggtcgatgacccctcctccgtaccacactaccctgcagtagtcatcagaaaacttcaagtgggagcgcagagccaaagtcagagtggcaagggtgccgaggaattcttttttgtccgtgtaatgtcgataattcttgttactgttgttatgaaattgagtcagtgggacttgttaggttgtcttgttcagatgtaatgcacatagagttgtggaacaccgaaacatgttgtagggggtggggcggtagcagagggtggacagtaacagtagcgcgcccagccctctacggcctacccttttgaaagccttggttgtagccaatgcagctagctgtaaagaagtggcattttttttttgtcgtctccaaaaggtgtcacgcttcacaatttggctatattgcatttgatgacattcaaaatattcggatccagtagcacctcatattcccaccccacatcatctgagttcccctcttcaaactagtgggtgtagatgctgagctgaaactgacgttgaaaagagtgtaaatgctggagctgaaactgaaattgntaagatgatccatactgatagagctgtaaatggtatggatattatctgactaaaaa

SEQ ID NO: 92757 - DNA, 456 bp, Zea mays
  Clone ID: MRT4577_184585C.1
tgcaaggaaaaatcaacttcgttactactgtaacttgccatgaagcttatgctgaggactgtaatctatcagttgagcacctctacacagtcatgttgacttgcgccagagcaaaaatttatgcacagtgcctctgctttcaagcgacattgttttcagttaacacctatacgtactatcaactcatagaaaaattaggcctcagctgtggtcattagtcaatatatcaacggttgtaacatgtagtacatgtctggtaaatatggcgacatagtaagtataaacagaagctgttcttataaacctgatatctttttgttcatcttgaacgcatcgcctattcttgacttcttgtaaaccaacagaaatctgttgccttttggcgcctcttattattatataaacagaagctgaaacccgggggtcgcgctggtgatcatcaggtcattcatacat

SEQ ID NO: 92758 - DNA, 540 bp, Zea mays
  unsure (1)..(540): unsure at all n locations
  Clone ID: MRT4577_184586C.1
aaaatattgccatggtaaatggaatgattaaaagattccagtacaaatggctctcaaagtttgaagagtggggactttctgtcaatttcactgtggagcagaatggaaggactctataaggagattgagcttctcaaggaaaacagaagagcaagatttgctaccccagctacagaggaatctaccctagctacagaaggatctactccagctacagaggaatgagctccctgacaatcagaggttcagttgtgatgtgaagatgactccctattactgccctaccctctgctggatgttttggtgtcaacgagcatacaagagcaattgtggctgcctggtggtggtacatactgtagtaagataaatagtttcgcttgtaactatggttgtttcctcatgtagggacgttttgattattagtgcttaatttaggtgcatttagggttccgtaatctatatcaaagtgtgcgtttcaaaaaaaaaaaaaaagggcaaaaaccctaaaaaaaaaaaaaaaaaaaaaaaaaaaaaaannaa

SEQ ID NO: 92759 - DNA, 206 bp, Zea mays
  Clone ID: MRT4577_184587C.1
acttattatgttaaatcatatccagagggaatcctacagattccagtagagaatataaaaataacacaaccctctacaacaactacaatatcttactaacttaccaacctaccacgacctttatcagctctaattaatttgacttaatgacacacacacactacatccatcaatttctaattaaaatttgctaaatttaaccacca

SEQ ID NO: 92760 - DNA, 506 bp, Zea mays
  unsure (1)..(506): unsure at all n locations
  Clone ID: MRT4577_184588C.1
gggggaagggggaacggagcggccagcgggggagaaaaccaagaggagaaaggggaaaagggggcaagaagagaaaggggggaacgacaagggaaggccagggggagaaanggaaaacgacgggcagggaaangaaanannannnannanagcttgaggggggggctcgggacgcagcccggagcgcccggcagcggccggcagagngccagaaaaaaaaaataagcagtggtaacaacgcagagtacgcgggggccatggtcaaaccagaggccctgtcgccgtacgtggcgtataaaagctcgcgtatggccccgcctcttcgcgacttcgcctcacaagctcacaagccacaagctagcaaaaaaaaaaaaaaaaaaaaaagtactctgcgttgttaccactgcttaagggcgatttccagcacactggcggccgctgctggtggctccggcctgggttccgtgcttgccgttctcctgagcttcgctgttttctgcgtgccc

SEQ ID NO: 92761 - DNA, 728 bp, Zea mays
  Clone ID: MRT4577_184589C.1
agggatgctaagatacttattgtgtgacatagatcccctcacaaaaagagcagctgcctgcctgtgtagggacaacagatcacggttctgagatatgaactgtgtggtctgcaacggcctgctcgtcctgcagaagaaacaaaaccgatcattgccttgatacttgactgataatccagtttcgattcgtgtggctaagacttcctctgtggtgtggacgcacgtacgcaggtgggtggctgcgcagagcgtgttctaccacctgtacaaccaggtgtcgtacatgtcgctggacgagatctcgccgctcacgttctccatcggcaacaccatgaagaggatctccgtcatcgtcgcctccatcatcatcttccagacgcccgtccagcccatcaacgcgctcggagccgccatcgccatcctcggaaccttcatctactcccaggcaaagcagtaacgccttgcattaattggcgtctatatggcctgccctcatcagttcaccgcggatcagctcggtgctcgaagatgacagcttatgacctttgagaatgtctactaagaatcgccctttgtataatactactagatcctctctttttttgtattttctttcctaggactagcttccagtgttactgggctcatttcgtggtgtttctattatgactaagattagagagagaatgagagatggatccatctaaataaaggttccagattttttt

SEQ ID NO: 92762 - DNA, 538 bp, Zea mays
  Clone ID: MRT4577_18458C.1
atgaaccgcaagtacttgtttaacgctgataacgacaccggttcattacagggccacacattttctggttgtttttttttcagggcccagccttacgtttccaggaatttgggttccgggcggcgcccttgttttaacagtgtggggtgggagcgttccgttgcgtgggcgttgggcggtttaagggaaggggggggggtttttcccttccgaccgagttttttttttttttattagggttcatgtgtaggggagcctaccccaacttgtttaggacttaaattaaagggtttgtttattgttattggggggaactccttttctgtttttacaaagaatggccattgaaatttgaaatttagggggttggattattatttggtactggggcacaaacatttttttttaaggaaacaaaaagcaagggttactttcaacagtggggctttttaaggatttattttttggcagcaaccgaaagtctttgaattttttctattataataaaaaatagaatgttttgctcaacatttttaat

SEQ ID NO: 92763 - DNA, 204 bp, Zea mays
  Clone ID: MRT4577_184590C.1
gtgggagacggaggcggaggcggtgccggagcagccggccccaggattattaggaggaggaagcggtggcgaaggttctcgttccgcccgctgcttctccgtggattcgatctattgattgatacgtgcttccggcgacccgcagaccaatcctcatggccggctggaccgattccggcggcagccgagggcgaggaggaggag

SEQ ID NO: 92764 - DNA, 2083 bp, Zea mays
  Clone ID: MRT4577_184591C.1
ccctcgagtccggccgggtccacacaaggcaataggcagccgcccagccctgaagccgtcagcgtcgacccgcctcacgcttgttcgcccgttctccctcttcccggagtggtactggtacgacgacgtgccgccgctaggtacctccgcgcgaagacgacgcaccgctggtaggtaggccgtaggcgcgcagccgtagagctgcccaggcccggccgactcccgatctgcatctctcggaccgcccgatgccctgcgggctgcgtccagcgtaacctcgcctcccagcgccagggtaagccggccccagcgagggacgcgcctcaagcggagcccaacagaccggcagctgaaacccttgccaactggctcctgttttgccgggttgaggagaaccatgcaggacatgaagcccgccgctgctgcagtcgccaaggtggtggctggtgactcgcctccctctgctgctagccctgctcctgcgccggcagtggccaacagcaatgggacgccacagaagccgcctcctattcctgccgctgccttcgacatgcccaagccaaacctccggggccttaacaagcccaagtgcatcttgtgtggtaacatcgcccgctcccggtgcccattccagtgttgcaagagctgctgctacaaggctcagaatccttgccacatccatgttctgaagcagacaaacacattgccagataagccgtcacctgcaactgctcctgcaacaacagaacatcaatctaacaatttacctgcaaccagttcagcgtcaaggctggctgccttgcaaaagcttccccagcactttctgaagtttctccaaacaaagaaatcagttaccaaaaaggatgttgcgggtataaacaagtggaggtttatgaagctaaaggaacatatgcaaggagataccgacgctgaaaacgaagcgtacgagaggtatacgcagaacgtcgggttactggaggaagcattctgtcccatggaagaagatgctgatgttgatcctgaggctgaagcaacttcttcttcagaggaagaaaggatggacctgttggtttcggcggcaaaggcgaggttgaagtcggataacgaagctgccaatagcttcagggagagggttgccactatcttggaccagaagctgaaggacctgcgcgggagccaaagcgccagtgagggtgacgaaccgtctggcccaagtctggacgatcgtctaaccccgaccccgatgaagttcagcacagcgcagaagatggggagagccacggaactgaacgagctgctgggtaagctgacaggagcacggagcgaggacgatctgaagccttgccgtgatattgccgagcagctgtttgggaaggagaacggctcctctgttggcaattcgaacagagtggatacggagacggagccgggcgatcaggagtcagctgcagcagtagcacggcgctattccgtcccaacgctgtgcagcaggatggaggtgggtgaggatttcgcctcagagatgaacgatgaattctgctctttgactcaggtggcccagctatgaaacctgaaacctggactaatcgcaatgtgacattttttaggggatttcatcacatttaagcctagtttagaaactcaaatttcatccgaaattcgagtgaactgagggaaaaataaaataatttctctttcaatcccctccaactcctgagatttaagttcctaaactaatccttagggaacttaaatttttggaattgaattgaaggggattaaggaaaaatatagttacctcaatgtgctttccaatttagaaggagatttgagtttttggaactcgcactgtagtgtcagcaagtgtttggctgttcgaagtgaggccagagtgggacgttttgtcgtaccaaaacttcctctcacgaaaaaaaaaaaaaaaaaaaaaaaaaaaaaaaaaaaaaaaaaaaagaaaaaaaaaaaaaaaaaagcggccccttttcttagcccgtatttgttctggtacacacgaaagaagcatggagtgaatggatcgaacacgtcccctcgaagttgcatggac

SEQ ID NO: 92765 - DNA, 205 bp, Zea mays
  Clone ID: MRT4577_184592C.1
ggggatgggaagttttaatccatgggtgtcactgacttcggcgggccttccatatgaatacatggggtcagaacgaggtgagcgaaccattaaaaactgttgcacgcggcacatggtatgtcctctctgattataccatggagatcacttgccagagcagactggaacaggactacttctacgatgccgggggacgcgttggggc

SEQ ID NO: 92766 - DNA, 271 bp, Zea mays
  unsure (1)..(271): unsure at all n locations
  Clone ID: MRT4577_184593C.1
aggaaaagannagaggcaggggaggcgaaacgaggcagcgaggggagggcanaccgcaaacccnnnggacaagggggcgnncanngaccaaccaaaaggnaaaggggcagcacaacagnannacanagnncaaagcccangccgggggggggggngcccccaaaacagganannnnnncnnnnnancnacagaaacaaaacaaggcgccaaaggcgcnaaagggngcaaagcagacaaggcaagagcagacagaggaacgaaccggggcaa

SEQ ID NO: 92767 - DNA, 639 bp, Zea mays
  Clone ID: MRT4577_184594C.1
tcgagttttttttttttttttttttttttttttttttttttttttttttttttttttttttttttttaagggccgtgtcctgctactgccccttcaacaactaaaaaactaaccaccccactattttactaaacaccctgttcctttttcctccttttggacatggagcgggcatccttgggggggggggtaatggcctccctggtaaaaaaactaaacgccatcctaaagcccaagaacaaactcatgggaggcgcgagggccgacgtccttttcctccgggcggagctcaaaagcatgcacccctttctcaaaaagcttttgggggggcgtgacccgagcccccaggtcaaggcctggaccaaggaagggagggagctggcctacaacatcgaggacaccatggacaagttcatgccccgggttaactacctccacggttccgggcctttcgggtcaagaaaaggcctcctaaacttggccggccgcgtaacacggtttgggaacacggggtggacccacctccgcctcaccgggaagctaaagggcctaaaggccccccccgtcaaggggagcaagcgggggcccaagtataggttcggcggggaggaccacttttgggcttttggggaccgcatg

SEQ ID NO: 92768 - DNA, 529 bp, Zea mays
  Clone ID: MRT4577_184595C.1
gggagcacgaacttgccaaaatgcctgttgcatgctaagaaccagtgtagtaggcgccaggttttgcacacagcacacatccatgcgcacctccaggttcctgccgaggaaccgaccggggttagtttattccacgatgcagttacacagctattccactccgtgaaagaatcgctgatggctagtctgtccagcatgacattttagtgtccgcaatgcccgccccatcagccttgtgcattctccgctgcgggttcgacctccacgtgcacctgttgaagcacggacagcagctccgggtcctgaaaatccttgaccagcaagctggcccctgcgtctttcagcaccttcccggggttcctcgtcgtcaggccaaccacgggcactccggcagccacaccggcccggacccccgatgcagagtcctgcgacagcacgagatgcacgaacacgcacagacagcattaccgttggttactgactgtttcgactagtgacgatgaaacaaacaacaaagcttcttcactga

SEQ ID NO: 92769 - DNA, 800 bp, Zea mays
  unsure (1)..(800): unsure at all n locations
  Clone ID: MRT4577_184596C.1
cctcgaggccggccgggagcaccagcgccagcaacagcaacagctgtggtttcagcgcaagaagggccaggaagaagcgcagctgcgtttcttggacggtgagcgcggctactccggcggacatggcgaccaacagcggcagtgccctggcgaagctggcgccgctggaagccatcctgttcgacatcgacggcacgctctgcgactccgaccccatccacttctgcgccttccgagagctcctgcagcagcgtctccgctctgcccgcccgcaggccggcttcaacggcggtgtccccatcacggaggagttctacagcgccaacatcagcgggggccacaacgacgacctcgccaggtcgctgttcccgggcatggatcaccagaaggcgatgcggttcatggatgacaaagaagctatgttcagaaagttggcacctgggcagctgaagcccgtggatgggctgcaggagctgtgcggatggatggaaggccgcgacctgaagcgcgcggcggtgacgaacgccccgagggcgaacgccgagctgatgctgtcgctgctggggctcaccgacttcttcccggtgctcgtcatcgggagcgagtgcgacgnggccaagccgttccctgacccgtacctcaaggcgctccagctcatcgacgcatcgcctcaacacaccttcatatttgaagactctggcatcgggggtcccgggccggtgtgggctgccgggagtgccccgtggttggcctgacgacgagaaaccccgngaaagtgctgaaagacgcaggggccagct

SEQ ID NO: 92770 - DNA, 1314 bp, Zea mays
  Clone ID: MRT4577_184597C.1
tcgaccccgcgtccgggcggagcacacagacagacgccagagccgggagcagaggaggcggtcatggcgagcggcgagccacaggcacgggcacctatcgttgaattgaacgaaaggagagcgggagaaagcgactcgtcactcgtcagtctctcgtcctcatgccgtcgccgctgggtggacgaatccaattcgggcctggcaaggctggcatgccgtcggcctccctagctcgccgcctcctctctactattatatcatctccagcgatcccttcacgcagtaccagcaccagcgccagcaacagcaacagctgtggtttcagcacaagaagggcgaggaagaagcgcagctgcgtttcttggacggtgagcgcggctactccggcggacatggcgaccaacagcggcagtgccctggcgaagctggcgccgctggaagccatcctgttcgacatcgacggcacgctctgcgactccgaccccatccacttctgcgccttccgagagctcctgcagcaggccggcttcaacggcggtgtccccatcacggaggagttctacagcgccaacatcagcgggggccacaacgacgacctcgccaggtcgctgttcccgggcatggatcaccagaaggcgatgcggttcatggatgacaaagaagctatgttcagaaagttggcgcctgggcagctgaagcccgtggatgggctgcaggagctgtgcggatggatggaaggccgcgacctgaagcgcgcggcggtgacgaacgccccgagggcgaacgccgagctgatgctgtcgctgctggggctcaccgacttcttcccggtgctcgtcatcgggagcgagtgcgaccgggccaagccgttccctgacccgtacctcaaggcgctccagctcatcgacgcatcgcctcaacacaccttcatatttgaagactctgcatcgggggtccgggccggtgtggctgccggagtgcccgtggttggcctgacgaaggaaccccgggaaggtgctgaaagacgcaggggccagcttgctggtcaaggattttcaggacccggagctgatgtccgtgcttcaacaggtggaggtcgaacccgcagcggcgaatgcgcaaggctgatgcgtcggtcactgcggacaactaagaaatgaaatgtcgtgctggactagccttcagcgattctttcagagtggaatagctgtgtaactgcatcgtgtaataaactaactccggtcggttcctcggctggaacctggagactagcttcttggtggattcaaacagggcccaaatagaccctaagtt

SEQ ID NO: 92771 - DNA, 1840 bp, Zea mays
  Clone ID: MRT4577_184598C.1
tcagaattcagatctgctggttcactctttcaggcctagtttgaaatctgggtttgtaaaatctgaacccgcagtagaaagtactgcaagatagatactacagtccgacgatccaaatttgccaatttttttgtactaaaaggcatcaatgtttgttggtgtttttttttccccttttgctaaaaggcatcaacgcgaagctgaaaccttacacagtcagaattccaatatgctggccggggtcagtctctcctctctcgtcctcatgccgtcgccgctgggtggacgaatccaattcgggcctggcaaggctggcatgccgtcggcctccctagctcgccgcctcctctctactatatcatctccagcgatctcttcacgcagtaccagcgccagcaacagcaacagctgtggtttcagcacaagaagggccaggaagaagcgcagctgcgtttcttggacggtgagcgcggctactccggcggacatggcgaccaacaggtgcaccaccgaggcccgcgtgctctcttgttcgccaccggaaacacgggacaccgctcatctgctccgctcttgccttctgaactccgaaagcggcagtgctctggcgaagctggcgccgctggaagccatcctgttcgacatcgacggcaccctctgcgactccgaccccatccacttctgcgccttccgagagctcctgcagcaggccggcttcaacggcggtgtccccatcacggaggagttctacagcgccaacatcagcgggggccacaacgacgacctcgccaggtcgctgttcccgggcatggatcaccagaaggcgatgcggttcatggatgacaaagaagctatgttcagaaagttggcgcctgggcagctgaagcccgtggatgggctgcaggagctgtgcggatggatggaaggccgcgacatgaagcgcgcggcggtgacgaacgccccgagggcgaacgccgagctgatgctgtcgctgctggggctcaccgacttcttcccggtgctcgtcatcgggagcgagtgcgaccgggccaagccgttccctgacccgtacctcaaggcgctccagctcatcgacgcatcgcctcaacacaccttcatatttgaagactctgcatcgggggtccgggccggtgtggctgccggagtgcccgtggttggcctgacgacgaggaaccccgggaaggtgctgaaagacgcaggggccagcttgctggtcaaggattttcaggacccggagctgctgtccgtgcttcaacaggtggaggtcgaacccgcagcggagaatgcacaaggctgatgggtcgggcattgcggaaaatgtcatgctggacagactagccatcagcgattctttcacggagtggaatagctgtgtaactgcatcgtggaataaactaactccggtcggttcctcggcaggaacctggagccggtgcgcatggatgtgtgctgtgtgcaaaacctggcgcctactacactggttcttaacatgcaacaggcattttggcaagttcgtgctcccagtcccaggtgtcttcggccgtgtttggttcggcttcttgacttcttcacagaatgtggcgaccatctcgttccctaataataataataacaataatataggagtataaggcttttactatgtcaattaagaaactgtttggatgcaatctagttcttaaaaatccagttccgtctccagtttttatacactggtttatgaaacaaaactaggttatagtgtgtggaaccatctcagtttttataaactgagtttagttagggaaaaaaaaaaaagggcggccgccaccgcggtgga

SEQ ID NO: 92772 - DNA, 372 bp, Zea mays
  Clone ID: MRT4577_184599C.1
caagcaatgctagtggcatcatacgtgagacttgcgggtgggacccgcctgctagtgcatgatgtagatggttggcgcgagatggtcagttgggcccagggtcgcgcacttaatgggccgaggcaggatggggttactagggccgcgtagaagcgaagccgttccaagagcaggtccgctgcatcggaagctgtcttggaccagtagaatccttgtctaaaaactttgcgaaggagtggcatggatgcaaggtgggctccacatattcctaagtgtatttccatcatcaattcttgacctttggctctggatagacactttagtaatggggagtatactccttgcttgaacaattcaacttcagactgtgtc

SEQ ID NO: 92773 - DNA, 299 bp, Zea mays
  Clone ID: MRT4577_18459C.1
acgcagaccattagctctatctactccatatctcacaagaacccgatcgacaccatgagggtggtgctcgtcgccctcgatatacctgctctaactgcgagcgccacctctacgcatacaagcggaggatgcggttcccatccaccgccgccacctcatctaccgcatcctgtgcatctgcctgctccggtctcacctaccacctccagtgcatctacaaccgccggtccacctgcacccgccagtccacctgccacagccattacatatgccgtcatcggatcacatgtcgatgccac

SEQ ID NO: 92774 - DNA, 302 bp, Zea mays
  Clone ID: MRT4577_1845C.1
cggccttagcgtggaacacggccgaggaacaaagcttaaaatataaatttaaaataaaaaaaaaaagacaacaaatatgtagaacagtttgtataatgtagaggacaaacaaaaaactaaaaaaggttgtccctgggccgcaccccccctgggggcgtttttccgcgccttcccccccccgggggggcggctctgctcgcttgtggggggcccatttatccctcttgggtgttggcctcctgttctcgggccgccctttaacacctccttctctgggaaagcccggtggtccccactttgtt

SEQ ID NO: 92775 - DNA, 364 bp, Zea mays
  Clone ID: MRT4577_184600C.1
cggggcggaccacaggcgtccggttggattgggttaaaaggcaattttggtttctaggtttccaggggggtccggggaagaggaggccggttttttgatatttttgggccacgacaggaatccagggaaatttgaagtaaaggttttggttgcaaagccattgtttgttgttccagttgcgggggtggagcttcctaatagggttcctaatggattccatgccttttttgtaactggggaccaactggttcgccaggcggaggggcagggaaaatacggaacctgcagattttgaacacccgggtccatgtgggaggttatggcaggccttgtttttgtttaggccaggttttttccacatgtt

SEQ ID NO: 92776 - DNA, 465 bp, Zea mays
  unsure (1)..(465): unsure at all n locations
  Clone ID: MRT4577_184601C.1
gggccccgggagaagnaaagtgtacagtttgctattgttatccaccatccactggtaccccccttctagtcaaccggcataacattcttcatcatgtaggaacccgaatatatggagctgttctagggtggctttgttctgctggtccttgctggcagcgccgtgtctcagatacaagcgagggttgtggttgacaggacaccaccgattaaattaccgtcctgggttttattgccgtctccgttttatctgacgccacaaaagaaaacggacccatgggaacatccaactcaaccaccggagctctatcccgtggcagtaattgcccatcctggggtgacagtggcatcgctagtccgctgctgggacagggcgtccagttcctgaggcaccaatgatacccggcggaaactccctacgatttgccacagtgccagacgctgcaagagaactcctattaccaga

SEQ ID NO: 92777 - DNA, 628 bp, Zea mays
  Clone ID: MRT4577_184602C.1
cggtcagattggttcaaatatgaacccagatgaggaactccggaagctcaaggaccgctttgcgacatggaaaaaagactacaaatcgcggttgaaggagacgaaggtaaaccttagtaaggttggcacccatgatgagaaatcacggaaaagatggtggggaaagaagagctcgaagtgaaacgtgtaagagaatctccacaacattttgcaacgacactgggtcaaggaaagtggccaggaatgccagggcaggcgagaagaatctgcctcgggccttctctcatcccaaaagcctggtgagatgatgaactcccatgttggtggcagtgccgttactcatctgatgtcacgagtgtcgaaaagatcaaagtagccaataggtgaagccagagttctgtacatgtatattagtcagctctgagtcatcacttgacagtgtgtttatgtcatcgtgtatgtagagtgataaatccgaggcgtggaagggtaactaaatgcagattatccaccatgagcgaagagatgcgaaagcagagtactgtaatatgtgtacagtgagaacattgttgaaatgtgcaaggcattttactctgaaaactgtgattgcatcgccccatatttaaaa

SEQ ID NO: 92778 - DNA, 783 bp, Zea mays
  unsure (1)..(783): unsure at all n locations
  Clone ID: MRT4577_184603C.1
cacgggaatccagacccaggaaggacaggacagcagccaggaggcccgaccgagaggctgcataagtaaccgcggctttccgcgccgattcgcacctaatcccatcgttaccagtcatcaccttccaactcgcaacgcacccacagtccctcaccgcccgcaccgcacacaggcgcgacgaagcagaaaagtatggccgctgccacagcgacggcggcggtgctgggatgcagcaggctccagagcgacattgcgggcgccggcataccgaagaagggaaaggtggggaggtcgccgccggcggaggaggtggaggcgttcctcgccgcagcggagcgcggcatggcgcggcgcttcgcggtcaagtacaactatgacatcgtcaaggacgctcccatggacggcggccggtacgagtgggtccgagtgcggcccggttaactgccagatgcccagatccaatccaagaggtcgcctcgtgtcctctcctgtctgtctctacttctcttgtaaaagtcgcttaagtactacccgtgtaacgcttcgcttagctataactaaattatgctcacgagatgggttaatcatgtgaaggcccaaccttgtacctacgttagtggtgtgcggttaacgtgtccttccttggtccagagaggaaaagctgtaacttgtctctgtagttcttccatttgtcgagtctctgttcatactacatcaatgaaacagatattcaggcaggcccaaaaaaaaaaaaaaaaaagcggccnnnnnnnnnnnnnnnnn

SEQ ID NO: 92779 - DNA, 470 bp, Zea mays
  unsure (1)..(470): unsure at all n locations
  Clone ID: MRT4577_184604C.1
caccgagctgctacccgncgccgccgccgcgaaaggccgccggcgcgcgcccccnggncnccgggagggcccnggagggcgacanggccacggacnccgncggngncccgcnnccggacgnccnccgcgcgccganccgcccagacancgnccgcnncgnccacaagcnccngnccngcaacagccggggggcgnacgcggngncgcgncgcgccggccaccagaccnccgcggagnccgggggcacggggcgngcggngncccgnancccccgcgnnccgggcggnggnacccaccgcgccggccagggagccnncggcaacangngccgnggcggacgcangnnngcgcccaccaagancnggcgccgcnggcaccgccgcgncaacaaacaccnccgccgngnggccancgccnccgcccncgcngccaccgccgncccgncccncgnccccgcccgcggccaccgc

SEQ ID NO: 92780 - DNA, 438 bp, Zea mays
  Clone ID: MRT4577_184605C.1
aacctttgggctgatttatgtgcttggaggagacggacctctggctagcacctaccggaaacgccgatcacgtgcgtatcttagaagaagcgtagtagtatcctaacctccgcggaatcgctaatagagccataacttcgatcgataagcccgggtaattaaaaggccccgtccatgcggaacccgcggaagccgaagtcgcctaggaagtcactaagccgaatgagctagagccgtatggctgttaatctaaggcggtattgaagaggatcaatgccttcgggacgaagtaattttgtggctgaggccctaacttgcattacggttattttcatacgaggttgcacggccacagcttccacggccacgggagaccttttagaccttgttgtttgtgaagattccacccccgaagtctggcctttacccggtagaata

SEQ ID NO: 92781 - DNA, 549 bp, Zea mays
  Clone ID: MRT4577_184606C.1
gggacggggaaaaaccagggtccccggaaggaccggggcccctttggggaaaaaataaagggggggacaacgacgaccccccccccccgggggacccggggggcttgggttcaccatgggaaaaaaaaaccccgggcttgggggttaacaactttcctttaagcagggccttttgccggggggggacaaggccaaaaacccccccggcccataattttgggttgggggggaaaaaacccaggggcctcccctccaaaggcccaaaatccccgggcattttgtaaatttaaaaaatcccgggggtggaaccaaccttgaggatttcccccccccccgtaattgaaaaaggggcggggggaataataaccccggccctggggagggggcccatttgggggctggggctcggattcggaaccctgatttggggggtttttctaaccttcctttgggaaacccttttcttttggaaaacttttttggggggtttaaattggccccgttccgggggggaacttttattgtccaaggggggggggggaccggaac

SEQ ID NO: 92782 - DNA, 576 bp, Zea mays
  Clone ID: MRT4577_184608C.1
cggcaacgtgggcggccgcgagggataaacctaacacgacgacacgaaaaggtcttcgatgtagcaaggaggctgactctgtcagctgcatgaagctcagtactggagtatacgagtgtctcgtgcgggaagggctcgaaaggctggactctgacggtgcccgtcctcctgacgacgatgtatgtatgtccgccgggtgtgcccactgacctacgacactagatgcaacctgcgcgtcaatccgctaccggaaggaccataatgcgcaggtcgtgcgcagacacatacaaaggcaccaaggggaacgtggacgaatgcttacacgcacgcacgataggtatagtatcaacttgagaggatcacccgcaagaaaggggaaatgatgactacatgaacagcgtgatgctgccgtcaaaagtgatctgtaccagcctgatgttatagcaggaccgtaagggtttcctggaccgcaaggtcctgaagcccatgcgcctgaaaaggtaagggcaaatgtactgcctacgacggacttacacacaccagtggtagctgcgcaactagcgcatctatccatga

SEQ ID NO: 92783 - DNA, 214 bp, Zea mays
  Clone ID: MRT4577_184609C.1
ccgggcatgtaaatccagctgtgcaaggtcaaggctacatcaacccccaggagcgtaacatcttcttgcgggggcacgcacgaggttctaggcctgctggaccttcatcacctgggtcttatcgcctaccatcagcacctggatactatggactaccttatacacttcctaactatgatcgggtacctacatctatgcatcctagggggcacaa

SEQ ID NO: 92784 - DNA, 560 bp, Zea mays
  Clone ID: MRT4577_18460C.1
ccgagggaaataatcacttgcattcgcccatttttattaagttaaattgactgcaccccaacaggacacacaaaccctgaccaagtcacacttgttttccacaccgaacacaaactcacaaacccctgccctagctaccgttgccggcagttgcaacacttttgacctgaataaaacctcctgctgctgtggatggccggggccaaaggcaaggggaccctaaacgttgttccgtaccccctcgcgctttctttttccgttcaccttaaactgcggaggaggaaaacctgaatacccccccgacaaaatggccctaggcgttgctccggaaggagccgtcccccctggccctggcccggaggacaatctggtggtatagcgctgcaatcgccgccccaataaacggccccacccaaaaaacccactggtcgctccaggctttgctgttgttgtacacaacggcggccccaaggctcctcgccgggttgataccagtgccagtgatcggaatcgtcgccgggtgcaccatgaacacagcgaacccgatcggaagcggcccc

SEQ ID NO: 92785 - DNA, 371 bp, Zea mays
  Clone ID: MRT4577_184610C.1
ggggcgttggaaccaagggggggggccatctccagagcgacattccttgccggctgtcaagattttgctcatgttattattacaaaggaaaattacgtgcagtttcaagccgcaccctgttacaaactcgaaagccacgaattattttaaatgcccactatctttgctcgctggaatcacttttctaactaccatctattgaatggggggggggtgggctaattacaagtaaatggctgaaaatagacatttgcaccttgctgtagtctgctccaacacaggatcggaggcctcctccgaatgccatgaagtgtcttgacccacggtttatctcccgtttatccttgaaccttgtggggttaaagataaga

SEQ ID NO: 92786 - DNA, 426 bp, Zea mays
  Clone ID: MRT4577_184611C.1
atgagaattgttctcaagcaagagaaaaaggagtatgttcttgagaccccctatcctaatgagccagcgaagagtgcaactgatgttgaccaaatatcttttgagaagcacaaggatgactcccttgacggcaagatcaaggctaaagatgagatatcaaagccaaatgcaaagcctacatctagcccttctcttaaagacaaatccttccattgtattgactttgggcattggtctaggaactggaagaagtacttggaagacaataaaaagaagaaaagtgagacttctacttcagattatgaaatttggcaggtggatgtcaaagcgactttcctcaatgaaagcctaagtgaggatgtgcacatgatgcatcctaaatgtttgttgatcctaaaaatattagaaaatatgcagattttataa

SEQ ID NO: 92787 - DNA, 204 bp, Zea mays
  Clone ID: MRT4577_184612C.1
cccacgcgtccgtttccgccggctacgagtttcgtgtgacatctgccacggtccgatagggttcgatcaatacctgtagcgggcggacctgcacctctgcgaggtatgctaccgtctagtggcggtctttgggctaagcgcgctcgctgagcacgcgcgctgcgactggctgctccataccgcctgtggcacgccctcgtacgt

SEQ ID NO: 92788 - DNA, 282 bp, Zea mays
  Clone ID: MRT4577_184613C.1
gtcctttttttttttttgttaccaaatgcaggggggagaaacacgttattacaaaaaggctacatgttacaattcgattacattatgcaattctaggagcgattccaaaagaaaatgcttaaacacaggggcgggcctgtttggtaaaacataaataagctttaaaagacatgctagcctttgtggcagaccccaatagagaaacccacgctgtcttatacttatataataatgacaagccctgcgtgccttatcaccattctcaacacaacaaacttgtta

SEQ ID NO: 92789 - DNA, 792 bp, Zea mays
  Clone ID: MRT4577_184614C.1
ctcgaggccggccggccgggatcttgactgttacgttactgtacctcaattcttgagcctcattcaacagaccacaccactcctccaccccaataccgcagccatggatattcgactcctcacaaacgcagacttgcccctcattcagcatgcaaacctcgagaaccttcccgagaactacttcctcaagtactacctctaccatgccctctcgtggccccagctgagctacgtcgccgtcgatgtctcaaggcccaagaaggacccatacgagtaccccaagattgtcggatatgtccttgctaagatggaggaggagccgtcagacggcattccccacggccacatcaccagtctgagcgtcatgcgcacacaccgaagactcggtattgctgagaagctgatgcgccagagtcaactcgccatggtcgagacattccaggccaaatacgtctccctgcacgtccgtgtctccaacgcagcagcccgccatctttacgagaacacactgggtttcactaacgagaagaccgagtccaaatactacgccgacggcgaagatgccttttgcatgcgtctagacctcggtgacatcaagaagcaagtcgacgaaaccctcgccgcagaggaagcggacgccgcggatgagggtgacgccgtgggcgaggttggccgtgatcccgaagctggcaaggacaaggaggacggcgaaggacgaaagatgaaggtcgccgtggggagaggattgggagtcggatcattggtagaaaaggatgagtcaaagaactaaac

SEQ ID NO: 92790 - DNA, 752 bp, Zea mays
  unsure (1)..(752): unsure at all n locations
  Clone ID: MRT4577_184615C.1
agctcgcggccgcactcgcatgctcctccgccctcctcgcctcccacgcctctctcctcgccgcctccgctcggactctccgatggcttccacgctcgccttgctcaggccgtccgcgccgagcccggcgacgaacctgagggcgccattcagatctcgggtctccactagagtgtccgtcgggtcggcagtcgcagcgggcgccgacacgctcttcgccgactacaaacccaccaccgcattccttttccccggccagggtgctcaggctgttggaatgggtaaagaagctcttaatgttcgagcagctgcagaactatttgataaggcaaatgatatacttggctatgacttgctgaatctttgcatcgatggaccaaaagaaaagctgaactcaacagtgatcagtcagccagctatatatgttaccagccttgcagctgtagaagtgttgcgcgcacgtgaagaaggccaatctgtaattaactccgtagatgtcacatgtggtctcagcttgggagaatataccgcgcttgcatttgctggtgcctttagctttgaggatggtctgaagcttgtcaagcttagaggagaagccatgcaggatgcctcagacgctgccaatagtgcgatggttagtgtcattggtctagattcaganaaggtgcaacaattatgcgatgctgcaaatgaggatgtggatgaaaaggaaagagttcaaatagcaaattttctctgtcctggtaactatg

SEQ ID NO: 92791 - DNA, 256 bp, Zea mays
  Clone ID: MRT4577_184616C.1
aagggtgactatttcaggtatgttagcggaattgaagactggtcctgagaggaaggaatctgttgagagcacgatgatggcctacaaggctgctcaggacattgcgctgactgagctggcacctacccatccaataaggcttgggcttgctcttaacttgtcagtgtactattatgagatactgaactccccagacaaagcttgcaaccttgcaaagcatgcgttatgatgaaactgtatacgaggttaacaccct

SEQ ID NO: 92792 - DNA, 1207 bp, Zea mays
  Clone ID: MRT4577_184617C.1
tcggccgggatactccccctagtccctcggggtcccaacccgcgcgccagcccaacttagcctcatgcaatgcatggagggctccatacctgactcctcgagcacaaggatcgccgtggtgaccggcgggaataaagggatcgggttggaggtctgccggcagctagccgcctcctccaccagcggcctcgccgtcgtcgtcgtcttgacggccagggacgaggcgaggggcgcagctgccgtcgggaagctcagaggcctggggctctccaacgtcgtcttccaccagctggacatcacggacgccccgagcatcgctcggctggccgatttcttgaagacccggtttgggaagctggatatcctggtgaataacgccgggtttgttggccttgagtacatccaagatcgtatagatggcacttcaacgacgagcgaggagttttgtggcatggacatggacaagaggctggagctgctgctgaaatggtgcctccgggagacttgcgatgctgggaaggaatgcatgaggataaactaccacggcacgaagcaagtcacccgagcactcctgcctctgctgctggcctccgacagcggaaggatcgtcaatgtctcctcggtgcttgggcagctcaggtttttcggcagcgaggcgctgaagcgggagctggacgacgtggcgagcctgaccgaggagaggctggacgaggtggcgggcgcgttcgtggcggacctggaggccggcgccgtggaggcgcgggggtggtggcccgccgggttctcggcggcgtacatggtgtccaaggcggcgctgaacgcctactcgcgcgtcctggcgcggaggcaccccgcgctgcgcgtcaactgcgtgcacccgggcttcgtcaggaccgacatgaccgtcaacttcggcatgctcacgcccgaggaaggcggcagcagggtggtggccgtcgctctgctccccgacggcgggcccaccggcgcctacttccaggagcgccagcaggcgccgttcgtgtgacgcgctctgcctctgctctgcttccttcaccacccgatgcttgatagctatgtatctcttgaagttttcgcttgataatagttgatacacattcaatccccgcgcgtaatctctccgttgcaaaaataatggaatcctaagttttggacaagtaaaaatttctcaacttttgatcaacct

SEQ ID NO: 92793 - DNA, 303 bp, Zea mays
  Clone ID: MRT4577_184618C.1
cccacgcgtccggcggatggaggcacactctggccctctccgagaagaaaaatgtcttctcctgggggaggggcactagcggacagctcggcaacggtgaaatagtcgacaggtggttcttaccccgtgcgcgagctctcagtgtctatgtcttcccctgccccttgtaggaacacgcctgtgctgatctgatctgatctgacaactaacgtctcaccatcctgaaggaacacacctgtcctgtccaatgccctgacctcaaatggtcctgcctgcagaaacctaaagtattccacggaagcc

SEQ ID NO: 92794 - DNA, 963 bp, Zea mays
  Clone ID: MRT4577_184619C.1
tctcgcacgcacccctcactttccttgtcaatcgactcgcgatcgaatccgccccgaggttccaaaccctagctttctctcatcctccacgaaccctagatccaaaatctaacacacgtcatcctcttattatcgccgtgcttgacgcttctctctgcagtcgattccgccgcggaccgcccggttcacttcccttttctcccgagatctcgactctcgagcaagtatgggtgaggcgaaggacaacgaggtgtacgaggaggacctagtcgactatgaggaggaggtggagaatgtcattgatggcgcccccaccaacggctcctcagatgtcgtcaagaaggggtacgtagggatccacagctcggggttcagagacttcctgctcaagccagagcttcttcgcgccattcaggattgcgggtttgagcatccttctgaagtgcaacatgagtgcatccctcaagctattcttggaatggatgtcatctgtcaagcaaaatctggaatgggtaagactgcagtttttgtcctgtcaactcttcagcagattgatcctgttgctggccaagtagctgcacttgtgttgtgccacacaagagaattagcttaccagatttgccatgaatttgagaggtttagcaaatacctgcctgaattaagagtagctgttttctatgggtggtgttcacataaaaaaccacaaggatctgctgaagaatgaatgcccccatattgtggttggcacgcctggaaggatactagctctagctagagataaggaccttcccttgaagaatgtgcggcatttcattcttgatgaatgtgacaagatgctcgaatcacttgacatgcgcagagatgtccagggagatcttcaaatgactccgcatgataagcaagtgatgatgttttcagcaacactcagcaaggagattcgacctgtttgtaagaggtcatgca

SEQ ID NO: 92795 - DNA, 611 bp, Zea mays
  Clone ID: MRT4577_18461C.1
cctcgaggccggccgggccgggagtatctggctgacctcttagcttatctttcggtcctcctcgacccagcgactcgcgctcccgtaaaccgagtaaggcaacactcatactgacagggacgcagaggagcaggaattcgcataccaagatgtcactggcgttcagcgcggatgacacagcccccttcttctgttacctcggctggctgcgtctgtcctcgtgcttaatcatcgcatggcgcgtgagcgcatgggaaaccgcgcaagagtcggcgtgcggcgtgccgtcgatgcgtgtgatgctgccgtagctcgtcatgaaatgcatcaagtgcgtgaacatgactggagtggtcgccatctacagttatctatcatcgacgtaatcatcagcactgctatcaaccccaaaggcaaaccctactacctttttgatggataagctcacctttcatacgggcttgcctgtgcgcttgctggacttgaatatgctatgaccatcggaattgttattgatgatgtatgcaaggcgaatgaacaaactacggagcttgttgcggatatgatcctcatcctcattttcacataaaagattgctctgtaaggtctca

SEQ ID NO: 92796 - DNA, 1277 bp, Zea mays
  Clone ID: MRT4577_184620C.1
ctcgtgcgctgatattccgctcctgtccctgtgtcctccccggatggagctagagccggctctgctcatcattatatcgtcgcgcacaaatgcagcacttgtgttgtcgtgggggtgtgtggcatattagctagcggataagcggccggccgggcagctagcagaagagagcaagctcggacctcggatcggaggaggtcggcatggggaggggacgcgtcgagctgaagcggatcgagaacaagatcaaccgccaggtcaccttctccaagcgccgcaacggcctgctcaagaaggcctacgagctctccgtgctctgcgacgccgaggtcgcgctcatcatcttctccggccgcggcaagctctacgagttcggcagcgccggcgtaactaaaactttagaaaggtatcaacattgctgctacaatgctcaagattccaacaatagtgcactctctgaatctcagagctggtaccaggaaatgtcaaaactgagggcaaaattcgaggccttgcagcgcactcagaggcacttgcttggcgaggaccttgggccactgagtgtgaaggaattgcagcagctagagaaacagctagaatgtgctttgtcacaggcaagacagagaaagacgcaagttatgatggagcaagtggaagagcttcgcagaacggagcgtcacctgggagaaatgaacaggcaactcaaacacaagctcgaagctgaaggctgtagcaactacacaaccttgcagcatgccgcctgctggccagctcccggcggcaccatcgtggagcatgacggcgccacctatcaagtgcatccgcctgcccactcagttgctatggactgtgaacccactctgcaaatcgggtaccctcatcaccagtttccgccccctgaggcagccaataatatcccaaggagcgctgccacaggcgagaacaacttcatgctgggatgggttctttgagttcttctgttaatccatccatcagatggatccatgttgaaaccaataaaaggcattcagtgctatatatatcatatgcatatccgtgctcaagtgcttgatttgccacgacgttggattgtatcgttctgtgtgtaatagctaatttagaacggcacatctattctattctatgtggttgtggtgtggcacttatactgtttattcatttggaccatgaatcggggtagtttgtaaaaacacatctatatatgctgccggtgcatagaattcaaagttatctgcaccgtaattattatatgctcc

SEQ ID NO: 92797 - DNA, 1445 bp, Zea mays
  Clone ID: MRT4577_184621C.1
tggaccctcgaggccggccgggtacaggggcagccaggcacacacacacacagtgaccctgccccttttcccggccgtctcgctctccaccgatattccgctcctcctgtccagtcctcctcccccgagccggctcattatatcgtccgtcgcgcagcacaacgcaagtttgctagcggccggatcagcagccacaaaacgaggagagcaaccacgctgcacacagagacgcccgtgtgtgagatatagagcaagctcgatcgaaggaaggagggaagctagagatcgtacgtcgccatggggaggggacgagttgagctcaagcggatcgagaacaagatcaaccgccaggtcaccttctccaagcgccgcaacggcctgctcaagaaggcctacgagctctccgtgctctgcgacgccgaggtcgcgctcatcatcttctccagccgcggcaagctctacgagttcggcagcgccggcataacaaaaactttagaaaggtaccaacattgctgctacaatgctcaagattccaatggcgcactctctgaaactcagagctggtaccaggaaatgtcaaaactgagggcaaaattcgaggccttgcagcgcactcagaggcacttgcttggggaggaacttggcccactgagtgtgaaggagttgcagcagctagagaaacagctcgaatgtgctttgtcacaggcaagacagagaaagacacaacttatgatggagcaagtggaagagctccgcagaaaggagcgacacctgggagaaatgaacaggcaactcaaacacaagcttgaagctgaaggttgtagcaactacagaaccctgcagcatgcagcctggccagctcccggcagcaccatggtggagcatgacggcgccacctatcatgtgcatccaacaactgctcaatcggttgcaatggactgtgaacccactctgcaaatcgggtaccctcctcatcaccagtttctgccttccgaggcagccaataatatcccaaggagcccccctggaggcgagaacaacttcatgctgggatgggttctttgagttgctctgttaatcatccatccatcagatggatgtccaaactaataaaaggcactcagtgctaccatatgcatatccatgcttaagtgcttgatttgccacgacgtgggatatcttttaaatttatcgttctggtgtgtaataactaattaagaacggcaccttcattctatggttgtggtgtggcacttctatctatggtttttgtatttggaccacgaatgttgtaatttgtaaaaaaaatttaaagatttatctatgctgccggtgctgcggtgcatagcccggtgcatagaatccaaaaaaaaaaaaaaaaaaaaaaaaaaaaaaaaaaaaaaaaaaaaaaaaaaaaaaaaaaaaaaaaaaaaaaaaaaaagaaa

SEQ ID NO: 92798 - DNA, 859 bp, Zea mays
  Clone ID: MRT4577_184622C.1
ggccgcttttttttttttttttttactagtttcaggcgatagcttcatgtattcttaatatggtaactttctgtgcattcccatcaggccgccgtcctcagcgtgcttcacgccgacagaacctccttgagtttctcagcgagcggcttggccgacgcagggttggcgccggtgatgaccaggccgtccacaaagaccctctccgagtagttgggctcggcagcctggtagtggccgccgctgagatccttgagcttgtcctccaggctgaagggcagaatgttctcgtagtcgttgtacggcgtcgtgtcctcctcggcgtcggaaaacccggttaccttcttgccgtccaagatggactttcccgtggccgggtcctgggcgagcacgagtgccgccgggccatggcacaccgccgacacgatcttctttttgctgtacagccggccaacgaggtcggcaaagcccttgtccttcgccagatcgatcatcgggccatggcctccgacaacgaaaatggcatcgatagcatcggcgtccaggtcactgatctgctgcgtctcggccacaaacttcttggcctcggggtcgtccaggaacttgacgctctcgtcgtcggtgaacattttcttcgagttctcgtcgaggggcacgacgcctccctttggcgaagcagagatgagcttgaagtggggcttgagtacgtagtacgggtgcgccgcctcgggcagataccacccagtggccgcgccattgagaagcttgtccgcggacgtgaagatgaagcagacggtcttggacatggtgtgctggtcttgatccgctcagcgaaggcgaaagattgggaagagaggccccg

SEQ ID NO: 92799 - DNA, 4192 bp, Zea mays
  Clone ID: MRT4577_184623C.1
atggctatcactttccagcacaagatcatcctccgccctggatccatgttctgctttggaactatttcatcagtggcagacgaagaaggaactctacatcgcatcgcggatccgccggagagaaagccttcctcaatagtctccgggaaagtcggagcgaagcaggataaagcgcaacctccagtgctccgagcgaaaactacctcctgcaagccgggagcagaggatccgtctacccggagaactttgctgtccacctcttctaaggaaaaatggacacggatcacaaggaaaaaggaagcaaacaaggtaaaggctcgtcaagctgctcttctggtatctccgccctcaaaagaaaacaggaagaagcttgtcactacgacggttccattctatcccgacgtcctctttatcgggggaagagtggaatcaacccccgtctccgacgatgaaccaaccgcgccgggagaagaacaccttcaacaggaatctcgccgacgaaggaatcgacgccgaaatattcggcgacatcatgaagccggagagcgggatctggcgcagcctgtatcacgagatgagatctcggagatgggagaaacctcggaagaacgggtcttcagggaaagaaggaattcccgacgtcgtgatcgtcggcaagctcaagagcaggccgaacaggaggcgagacaacgccaagagaaccctcttctcggacggaacctgaaccccgacttcgcccgagccatgaacacgccgagtgaggtcgctggagtgttggctcggatagccgatggcctcccctggactccggacgccgagggctatcggcggctgctcactcaggcagctaatcatctcctacctctcgcccctccaccgagtgatttacgacacgccatcaacagtcggcgggacacacagagctccatcaacgcttcatgcgaacgacgacacgagaacaagattgggcgccgagaacaatatgatcgggatcacggcatccctgcgcgaagtcaggccaccagagttgagttggcaatggcttcgaccggcggcacgacctggggacgggccattcaatggccccctaacttcaaagtctccaacgtcgacaagtacgagcctaagcaggacccgagaggctggttggctatctacaccaccgctgcccgagccgctggggcaactgaagatgtgatgaccgcgtacttgcccatcttcctcgggcaggatgcgttgcaatggctacgacacctaccccgacactgcatcgacgactggagcgactttagtcggcgcttcattgccaacttccaatccctctccgacaaaccagcacagccatgggacctcaaatccatcaagcgccgaggggatgaggctctccagtcgtacctcaaaagatttcagaccataaggaatcgtatccccgaggttgcggaagcagtagtaatcgaggacttctaccggggatctagtgactcggccttcgtccgagccatactgcaaaaggcgccgactacctccgagcagctattctgggaagcggacctctacatcaccgccgacgaacgagctcaggacctcattggaggagcaaagtctgcactggcggtaccgcgacgtgacacgaaccaacaacccgacaagcgttgggagaagaggcctcgtgaagaagtccatgccgccggaccacccgcctctcgcgcccgaggagcacctcgtggagagacttcaatcactttgttgggaacggccgacccttccaacctctaccacctcccccacctcgaggaggacccggagaaccttgacagcctcaataataggcaggaggaggaggcggagcattcccacgcgtcgatggagaagtcaacgtcatcttcggtggacatgggtcacaagaaagcaagaggcaacagaagctcaacgaccgtcagatactggtggcggccaccgtggctcaactttgatcacccgggcaagtacccgctcctcgtcgatccggtgatccgagagagcagggtaaagaaggtgttagtggatgggggaagcagcatcaacgtcaccttcccccagacgctgcaaggcttaggagtcgcactcaaagagctccacgagttagacactcctttcttcagcattgtgccgactgaaggagaatatccactcggacacatctacatgtcggtcaccttcggaactccggaaaactacagaaccgagttcctaaggttcgaggtggcgaacttcgactgcggatacaacaccatcatcggcaggcctgaattggcaaagttcatggccattccgcattatactctgcggcgatatcggtggaagcttaatccagaaaaatgtgtctttcgaataccagcaggaaaattactcggattcattgtcagccaccaaggaattgaagctaacccagaaaagatcgaagctatcatgaggatggaagcaccacggtcacagaagaaagtacaaagacttactggatgcatggcagctttaagcaggttcatatcaaggttgggagaaaaaggcctaccgttctacaagttgctcaagaagaagaaatatcctcaagttcaaaaactattgtatgcagtacttctaactgcacgcaagctctgtcactactttgacgaccacaaagtcatagtagtcactggatttccaataggggatattctccacaacaaagaagccatcggaagaatagccaagtgggcctgtgagctgggagctcacaacatcgagtttcgacctcgcactgcaataaagactcaagcactagttgacttcgtatcagaatggaccgagcaacaagtgccagataacccagagattacaaaaacatggcggatgtatttcgatggctcgttgaagctgcatggagcaggagtggggatcctctttattgcacctggaggtgaacaactcaaatatgctcttcaattgttattctcagcgttcaataatgcggcagaatatgaagctttgattcatggactgaacattgccgtatcactaggcattaagagactaatgaaagctcaaggaggatacactcacttgctggttgccattgacaaattcactaaatggatagagtacaaacccatcgcttatctgacttcagctaaggcagtggaattcatacaagatataatattcaggttcagaatactgaatagcattataactaacctgggatccaatttcactagctcagaattctttgatttctgcgaacaaagaagcatccagatcaaatatgcatcagtagcacacccaagagccaacggtcaggtagaaagggctaatggaatgatattggaagcattgaggaagaaagtcttcgacaagaatgaaaagttcacagggaagtggatcagagagttgtcgtatgtggtctggagcttaagaactcaacctagtcgagctttgcatggtaatactcccttcttcatggtctatggttcggagacagtactacctgctgatctcaggtttggggcaccaaggctgatcttcgaaaatatagctgaagctgaaactactagactggaggatattgaaatactggaagaagaacgatcgaatacagtaattcagtcagccaggtaccagcaaactctgaggcgctatcatgataaggccatacggcatcgatccttcgcagtgggagatctagtcctccgccgaattctaacgggggaaggacaacacaaattgtcaccactatgggaaggtccattcatggtagcagaagtcactcggccagccccatatcgacttactcaaatggatggaattccaatagggaattgcagcattatggagaatctcaggaagccacatccctagtcattctcctccactaacccgcctccaccagcatccccctccgcgaccagttttccctcgtccttcccgaccgccaactgcttccagcccccctccgccacgccacccagccacagttgccgccgccggcacgagcagcgggaggagaacggaaacggataggacagccgcgaggataagttggtgggtgggtcgcttcgacgggtgtgcccttcccttcgccatggctcgacagacggatacaggatcgaataatcgaggacaggagcacgctgcagtcgtaatacgagtcactgtagaggcgtgtgtcgacccgcga

SEQ ID NO: 92800 - DNA, 760 bp, Zea mays
  Clone ID: MRT4577_184624C.1
tcggccgggactatacatgccatctgcaacgccaccaccaaacggcaaacgggaacgggggcagttggtgagttgggacttgggagccgacgctgtcggggtgatccagtcgccgccgacgccgccgaacgcgcccgcgcccgagcccgaccctccctctacgcgggaggacccttccactcccagagccgggcgtgtccgatcgtgagcccatggcggaatccatcgtctccggcgccgccgccccgccgccgggcgcgccctcgttctcctacctggccgtgttctccaactgcccactcgtcgccgcggtgctcgccttcgccatcgcgcagtccatcaaggtcctcaccacctggtataaggagaaccggtgggacgcgaagcagctggtgggctccggcgggatgccgtcctcgcactcggccaccgtcaccgcgctcgccgtcgccgtcggcctgcaggaggggttcgccagctcgctgttcgccaccgccgccgtcttcgcctccgtggtgggttcccctccacgcttccccctctccctttcgacactaaaaacgcgctgaccatctttggcaggcggtggatctgatagacagccttatgattttgggacgcgttgtggtgatctgggggaggcaaatgagtgtcctttgcacttcaaagctcctgcttgatgaattgcttccttaggtcacctcacttagcttcaagtttggaactcagttgtggaaggtacattcctgccgtgtagatt

SEQ ID NO: 92801 - DNA, 109 bp, Zea mays
  Clone ID: MRT4577_184625C.1
cttaattcccgcttcgacccactcttccgccctcacttcatcaataacattatcactcttttctcccacgctaactaaactttccttaggggggacttcaccactggtg

SEQ ID NO: 92802 - DNA, 475 bp, Zea mays
  Clone ID: MRT4577_184626C.1
tcgcgttttttggtgtcgaaagggagaggggaacccaccacggaggcgaagacggcggcggtggcgaacagagagctggcgaacccctcctgcaggccgacggcgacggcgagcgcggtgacggtggccgagtgcgaggacggcatcccgccggagcccaccagctgcttcgcgtcccaccggttctccttatacctgcacgtcggtcgcgcgcgcggaggaggggtgggcagatgcagatcccgtcagggagggagctcagatccgggcaccgcgtggaggggagagggcgtaccaggtggtgaggaccttgatggactgcgcgatggcgaaggcgagcaccgcggcgacgagcgggcagttggagaacacggccaggtaggagaacgagggcgcgcccggcggcggagcggcggcgccggagacgatggattccgccatgggctcacgaacggacacgcccggctctgggagt

SEQ ID NO: 92803 - DNA, 170 bp, Zea mays
  Clone ID: MRT4577_184627C.1
ccccttgccctgggacgagttgccacaatacaggatgttaccgttctctcttaacagactacaccgattgggtcagccctcaacacctgggatagctctggaggcacaaggagagagtccttggcccagaatgaggcgacgcaagtttcatgctcgagacccccactatg

SEQ ID NO: 92804 - DNA, 1641 bp, Zea mays
  Clone ID: MRT4577_184628C.1
aattcggcacggcgtccggttggtgagttgggacttgggagccgacgctgtcggggtgatccagtcgccgccgacgccgccgaacgcgcccgcgcccgagcctccctctacgcggacgcgggaggacccttccactcccagagccgggcgtgtccgatcgtgagcccatggcggaatccatcgtctccggcgccgccgccccgccgacgggcgcgccctcgttctcctacctggccgtgttctccaactgcccgctcgtcgccgcggtgctcgccttcgccatcgcgcagaccatcaaggtcctcaccacctggtacgcactctcccttccacgcggtgcccggatctgagctccctccctgaccggatctgcatgtgccctcacactcctccgcgcgcgcgaccgacgggcaggtgtaaggagaaccggtgggacgcgattcggcacgtggcctccggctaccgcgcgtccgcccccccctcgctcccgctctccctctcccccccctctctccatccaaagcctacgcgccgccgccccgccaccgggcgcgccctcgttctcctacctagccgtgttctccaactgcccgctcgtcgccgcggtgctcaccttcgccatcgcgcaatccatcaaggtcctcaccacctggtataaggagaaccggtgggatgcgaagcagctggtgggctccggtgggatgccgtcctcgcactcggccaccgtcacagcgctcgccgtcgccgtcggcctgtaagaggggctcgccagctcgctgttcgccaccgccgtcgtctttgtctccgtggttggttaccctccccactccccctctccctttcgacaccaaaaaaacgcactgaccatctttggcaagctgtcgcccaccccaccccaaaaccctagctctattccatcgctcccgtactccctgttgcggcggttgagaacagtggcgacaagatctcatggagagaagctatgcggaccccaggaaaggtgaaatcgtcgtgcgatggtggagatggccgatgggaggctccaccagccctagggtgtggccaacaagacgctactcgccactgcgtgggtcggcagtgagatctcagggagagaagccatgcaaccccatgaaaggcgaaactgtcgcacgatggtggagacgaccggcggtaggatgcaagtatgagcatttggcaaagagagtattcctccccatgctcccgctccctcctgcaccccacgctcgccgacgagccgctcgacctcgtcgcagcttgccgagccatcatgcgccccggtgcggtggtcaacatcaatccacgccgtcaatcgcgtgttggtcctacgctcagtgcatgagtccttcaactggcggtggtggagcaaccgtactaccacagcgcatacacaggacgtagagaacaactccagaaggtgagccccagatctccgctgccgtcttctcgcctgaaaaaagaggggcatctctatcgccaccaaccactagcaggcggcggacgctgctcgcagcaggcacaataagccacttcaggctccagtctgttctgtgatcagcagaacattatgggctctaaagcaggaggactttttgagggattttgatgccaaaattttta

SEQ ID NO: 92805 - DNA, 2005 bp, Zea mays
  Clone ID: MRT4577_184629C.1
acccaagtgccagtggccaccaccaccaaacggcaaacggaaacgggggcagttggtgagttgggacttgggagccgacgctgtcggggtgatccagtcgccgccgacgccgccgaacgcgcccgcgcccgagcctccctctacgcggacgcgggaggacccttccactcccagagccgggcgtgtccgatcgtgagcccatggcggaatccatcgtctccggcgccgccgccccgccgccgggcgcgccctcgttctcctacctggccgtgttctccaactgcccgctcgtcgccgcggtgctcgccttcgccatcgcgcagtccatcaaggtcctcaccacctggtataaggagaaccggtgggacgcgaagcagctggtgggctccggcgggatgccgtcctcgcactcggccaccgtcaccgcgctcgccgtcgccgtcggcctgcaggaggggttcgccagctcgctgttcgccaccaccgccgtcttcgcctccgtggtgatgtatgatgcctttggtgttaggctacatgcagggaagcaagcagctctacggcgctgacggattagttaaggaacgaaatatcacatcgtgtccggtaaccagattcagatgtgggcaccatgtgtgggtgcaaggccaggccgaggcgaaagagattcttggatttgcagtagccacatttacagcgatgattggtgggcttggtagttggaagagcgtgaccaagaatttcctgattttccatcatttattccattcttacctcctctgagtgcagctaacctaaaggtctactatgccacacgtttcaccatcatagttgggataatggtgttcggtggctttcttgcaccaatcttaaacttggtctaggggcacatcttatgaagactccatccgcagcgttcatctgtcgacgtagttgagaagtgcactcaggttatacatctagtaaagagcaagacatttgaaagcttatgggccagctgtgttactgttgatgcaagcgaaagttggctggtggagcctatataaacagctctgaggtcactcaccgcactatccgagccaatatgatttcttctgccccatggcatacattctcatctttggcattgaaagaattgaaccatataaaaaataaagacaggagcacttctccagattcaatgctaatgaaagaacttatcgttgttgcacaagctagaaggagtccgtttgataatattcaacagaagaaattagcagcgcttggagccaatgcagcgcgaaggcctttcaaagattttctcagtacattgacaagaaccaaagaaagtatatcgcgcgcgacacgtcttgctatggaatgtgctaaatttggcattctggtgaggtgatgtatgatgcctttggtgttaggctacatgtagggaagcaagcagaggtcttgaaccagattgtgtatgagcttccgtcagaacatccactagctgaaacaagaccgctgcgagagctgctagggcacacacctccacaggttcaatcttttgctcctcctggattgagctgttgggaacaaggaatgtctgaattaaattttgttaaccaattggtttctcctcaaatcatttcactggaaaatctattgtgtgtggatatttggtattcttctcacgtgctgcacggtatcattaattccaagttctgtcaccaggtatttgctggcggagtgcttggatttgcagtagccacatttacagcgatgatcgctgggcttggtagttgactccgcatttgaagaaatggtcaacattcgcattgaagttctggaattcaaattggacacatgtttcctagccagcttatgatagataatgcgttgtgtatagctgtattaatatgcaaattgatgtcaatttgttgaagagaaacttgggccattcttttgtagttaatcgacgactgaactacatgctgtattcgttcctgtccaaagtatttggagtgattgaaag

SEQ ID NO: 92806 - DNA, 326 bp, Zea mays
  unsure (1)..(326): unsure at all n locations
  Clone ID: MRT4577_18462C.1
agcagtggtaacaacgcagagtacgcggggtatagcaatgattttctttttgtacaagattttccttctttgccttagggtgatggcgcgagcgcattggtgtccgtttcggttgggcaattgcttcattcttagagcaaagctgggtacataagattttggtaggaagcgtgtatacaggcaggctgtatctgtatagttgtggctctctcggcttaaaaaaaaaaaaaaaaaaaaaaaaaaaaaaaaaaaaaaaaaaaaaaaaaaaataaaaaaaaaaaaaaaaaaaaaaaaaaaaaaannncctttggggtgttaccactgtt

SEQ ID NO: 92807 - DNA, 315 bp, Zea mays
  Clone ID: MRT4577_184630C.1
gatatctaaattgttttttaaggtacttttagttttttttgctctacaaagttaagacctactcttctttgcccacaaggacaaagaaaagttactcccatgccttaggaaaggaccacaaactctcccgaaattcacacacaacttaatcttaaaaaaaaaactggcccgaatacggcttcgaacccgggcattgaaactgaaacgtcttttataggcggacccaaattcaatttacgggccggtttttaacaacgcctggactgggaaaaccccggtgaaaaccaaaaaaaataccatggaaacaatgccccc

SEQ ID NO: 92808 - DNA, 497 bp, Zea mays
  Clone ID: MRT4577_184631C.1
aaaaaaaaaaggccctttttttttgggcccccaacagggggggggcccgcctgggccaaaaaaaaaaaaaggggggggccaataggttttaaaaaaaacatggcccaggggggcccaccttaccccgccggggccagggggagggggggggtaactggggggggcccccatggggggggcagggccaacgggggggggggagccttgtccggggaataatgggacaaatcgtcgtggggaaacgggccatttggaaattaatcccccaaggggccgggggcccccaaggggccggggggctttttttggctttttttttggggcccttggggacccgggccagggccaaaaacaagggttttggccttaaacagctccttagggggcaggaacttggagcaagggtaaacggggagggggtcgccccccctaacgggggcctggagggggggggggacaacgggggggtcaaccggaacggggtcccccttgccccc

SEQ ID NO: 92809 - DNA, 230 bp, Zea mays
  Clone ID: MRT4577_184632C.1
ggtgggctggcttctgctccccctccggttcgggatcaggttcgtgaggatctacggggttcagtttggtggtgtgagctgatcgagatggcgatgtaggtatgatgagtaccgctgcttgttccgcggtctcgactgagccactgacgacgactctctccacaactccttcatcacctactgcaaggtcctctagtacaatatcatactcgatcggttgactcagaggt

SEQ ID NO: 92810 - DNA, 840 bp, Zea mays
  Clone ID: MRT4577_184633C.1
ctcgagggcccggccgggaaaaaaaaaaaaaaaaaaaaaaaaaaaaaaaaaaaaaaaaaaaaaaaccaccaggtggcccgtacgtagcttgtcgcagccggactgcagggcagaggtagacaaacatggagcgcaaatcttcctcctgcagagacacagcgagctgcctcgcgctgctcgccgtcgcgctgtgcctcggcgccgccgggggggcgcggggccagctgacggacgacttctacgacgactgctgcccccaggccgagaacatcgggagggcgcgcgtgtccgccgcgatgaaggccgagccccgcatgggcgcctccctgctcaggctccatttccacgactgcttcgtcaacgggtgcgacgggtcgatcctgctggacgggaacaacaccgagaagctggcggggccgaacctgaactcggcgcgcggtttcgatgtcgtcgacgccatcaaggccgacctcgagaaggcgtgtcccggggtcgtctcctgcgccgacatcctcgccatcggggttaagtacggagtgctgctgagcggagggccggactacaacgtgctgctgggaaggagggacggcctggtggcaaaccagtccggcgccaacagcaacctgcctagcccgttcgatcccatcagcaccatcacaaagaagttcagcgatgtgggtctcaacacaaccgacgtggtcgttttatcaggaggccacacgatcgggcgagcgcggtgcgtgttgttcagcggccggctggccaacttttcggcgacgagctccgtggacccgacgctgaacgcgtccctggcgtccagcctgcaggcgctgtgccggg

SEQ ID NO: 92811 - DNA, 3753 bp, Zea mays
  Clone ID: MRT4577_184634C.1
atgtcgatcaagcagatgtttctgatgcaaactcaggcagttcaggccatcgatcagactttggccgccattcagcagcagcagcagcagcaagcaccacctcagcctcagatgcctcagatgcccagagacaagcgtgctgaattcatgagaggtcatccaccaacgttcgctcattcttctgaccccatggatgctgaagattggctgcgcactgtggagcgggagttgcataccgctcattgcgatgacagggagaaagttctgtatggtccccgtctgttgagaggagcagcccagtcatggtgggagtcttacctcgccacccatgccaaccccgacaccatcacctgggaagaattcagaggtagctttcgtcagtaccatgtacctgcaggtctgatgacagtgaagaaggaggagttcctggcccttaagcaagggccattgtctgtcagtgagtaccgagacaggtttctgcaattgtctcgctatgctcctgaagatgtcaacactgacgccaagcggcagtaccgtttcctgagaggcttggttgaccccctgcaataccaactgatgaatcacaccttcccaacattccagcacctgattgatagagcgatcatgacagagagaaagcgcaaggagatggaagatcgtaagcgcaagatcagtggaccccagcctggaagcagcaaccgtcctcgtttctcaagtaatcaaccccagcagttcaggcagaatcagcgtccacctcagcagcatcagcagtttcaaaggcagtaccctcagaaccagtaccagaaccgtcagagcaatcagtcaggagccggtggtagaattcgagccgatagcatttgtttgaatataagtgtgaaaataagggggatagcatttcccgccaaccttatagtaatgggtactcagggaatagatgtcatcctagggatgaattggctagataagtaccaggcaattatcagttgtgataaaaggacaatcaagttggtgtccccactaggagaggaagtggtgactaagttagtcccgcctgagccaaagaaaggaagttgttatcagatagctgttgatagcagtgaagcagacccaattgagagtatcaaggttgtgtccgagttcccagatgtgtttccaaaggatttaccgggtatgccaccagagcggaaagttgagtttgccatagagcttcttcctggaaccgcccctatctttaagagagcttacagaatatctggaccagaattggttgagcttaagaagcagattgatgagctgtcagagaaaggttacatccggccaagcacctcgccttggtccgcccctgtcttgtttgtggaaaagaaagatggcaccaagaggatgtgcatcgattatcgagctttgaatgaagtcacgatcaagaacaagtatcctttgcccagaatagaagatctgttcgaccagttgagaggagccagtgtgttctccaagattgatctgaggtcaggttatcatcagctcagaatccgaccttcggacattccgaagacggcattcatttccaagtatgggttgtacgagttcacagtgatgtcttttggtttgaccaatgcgccagcattcttcatgaacttgatgaacagtgtattcatggattatcttgataagtttgtggtggtattcattgatgacattctggtttattctcaaagcggagaagagcacgcagatcatttgaggatggtattgcaaagattgcgagagcaccagttgtatgcaaagttgagcaagtgtgagttctggatcagtgaagtcctgttcttgggtcacataatcaacaaggaaggattggctgtggatccgaagaaagtggcagacattttgaactggaaagcgccaacagatgctagaggaatcaagagcttcattggaatggccgggtattatcggcgattcattgaagggttttcgaagattgcgaagccaatgacagcgttgctaggcaacaaggttgagttcaagtggacccagaaatgccaagaggcctttgaagcgctgaaagagaagttgactacaacgcctgtcttagtcttgcctgatgtgcacaagcccttctcggtgtattgtgatgcttgctacacaggtttgggatgtgtgttgatgcaagagggaagagttgtggcttactcgtcccgacagttgaaggttcatgagaagaactacccaatccatgatctagagttggcagcagtggttcacgcactgaagacatggaggcactatctgtatggacagaaatgtgaggtttacacagatcacaagagtctgaagtacatattcactcagtcagagttgaacatgaggcaacgaagatggttagagttgatcaaagactatgagttggagattcattaccatccaggcaaagcaaacgtagtggcagatgctttgagcagaaagagtcaatctattcgggagttgattcttaaggaagctcatgagacagcttactcgattcaccctggtagtgagaagatgtatcaggatctgaagaagaaattctggtggtacggaatgaagagggaaatcgcagagcatgtggctatgtgcgatagttgccgaagaattaaggcagaacaccagagacctgctggattgttgcaaccgttgcagatccctcagtggaaatgggatgaaattggtatggatttcatagtcggattgcctcgcactcgagccggctacgattctatttgggtagtagtggaccgtttgaccaagtcagcccacttcatacctgtcaagaccagctacaacagtgcagtattggcagagttgtatatgtcttggatcgtttgtcttcatggtgtgccaaagaagatagtgtcagacagaggaacgcagttcacctctcatttctggcagcagttgcatgaagccttgggcacacatctgaatttcagttcagcttatcacccacagacagatggccagactgaaagaaccaatcaaattcttgaagacatgttgagagcatgtgcgttgcaagatcagtccggatgggacaaaagattgccttatgcagagttttcctataacaacagttaccaggccagtttgaagatgtcaccgtttcaagcgctttatggaaggagttgtagaactccgttgcaatgggatcagcctgaagaaaagcaagtgtttgggccagacattttgcttgaagccgaggagaacatcaagatggttcgagagaatctgaagatagcgcaatcgaggcagcgaagctatgcagacacaagaagaagagagctgagtttcgaagtcggagactttgtctatctgaaagtgtcaccgatcagaggagtcagaagattcggagtgaaaggcaagttagcaccccgctacattggtccgtatcagattcttgcaagacgaggagaagtggcctatcagctcagtttgccagagaatttgtctgctgtgcataatgtctttcatgtgtctcagttgaagaagtgcttgcgtgtgccagaagagcagttgccagtggaaggtcttgaggtccaggaggacttgacctatgttgagaagccagctcagatccttgagattgcagacagagtcacccgaaggaagaccatcagaatgtgcaaagtcaggtggaatcaccactctgaggaagaagcaacctgggagcgtgaagatgatctgatggctaagtacccagagctctttgctagccagccctga

SEQ ID NO: 92812 - DNA, 3192 bp, Zea mays
  Clone ID: MRT4577_184635C.1
atgtcgattgagcagatgtttctgatgcagactcaggcagttcaagccatcggtcagactttggccgccattcagcagcagcagcagcagcagcagcaagcaccaccccagcctcagatgcctcaggtgcctagagataagcgtgctgaattcatgagaggtcatccaccaacgttcgctcattcttctgaccccatggatgctgaagattggctgcgcactgtggagcgggagttgcataccgctcagtgcgatgacagggagaaagttctgtatggtccccgtctgttgagaggagcaacccagtcatggtgggagtcttacctcgccacccatgccaaccccgacaccatcacctgggaagaattcagaggtagctttcgtcagtaccatgtgcctgcaggtctgatgacagtgaagaaggaggagttcctggcccttaagcaagggtcatcgtctgtcagtgagtatcgagacaggtttctgcaattgtctcgctatgctcctgaagatgtcaacaccgacgccaagcgacagtaccgtttcctgagaggcttggttgaccctctgcagtatcagctgatgaatcacaccttcccgacattccagcacctgattgacagagcaatcatgacagaaaggaagcgcaaggagatggaagatcgtaagcgcaagatcagtggaccgcagtctggaagcagcagtcgccctcgcttttcaggcaatcaacctcagcagttcaggcagaaccagcgtccacctcagcagcatcagcagcgtcagcagtatcagcagttccaaaggcagtaccctcagaatcagtaccagaaccgtcagagcaatcagtcaggaggtcagtttcagaagcagaatcagcaagcacctcgtcttcctgccccagcaaatcagcagaacagtcaggcagcaccagctccggttggaaacagggcatgtttccactgtggagagcaaggccattgggtgatgcaatgtccaaagaaggcagcccagcagcagtcaggccccaatgccccagcaaagcagaatgtgtctcagcctggagcaggcaatcgctctcagcagcgctataatcatggaagattgaaccacttggaagctgaagcagttcaggagacccccgacatgacagtaggtatgttcccagtcgattcccatattgcagaagtgttatttgatactggagcaacacattctttcattactgcatcatgggtagaagcacataatcttccaactactaccatgtcaacccccattcaaattgattcagccggtggtagaattcgagctgatagcatttgtttgaatataagtgtgaaaataagggggatagcgtttcccgccaaccttatagtaatgggtactcagggaatagatgtcatcctagggatgaattggctagataagtatcaggcagttatcagttgtgataaaaggaccatcaagttggtgtccccactaggagaggaagtggtgactgagttagtcccgcctgagccaaagaaaggaagttgttatcagatgactgtcgatagcagtgaagcagacccgattgagagtatcaaggttgtgtccgaattcccagatgtgtttccaaaggatttaccgggtatgccaccagagcggaaagttgaatttgccatagagcttcttcctggaaccgcccctatcttcaagagagcttacagaatatctggaccagagttggatgagcttaagaagcagattgatgaactgtcagaaaaaggttacatccggccaagcacctcgccttgggccgcccctgtcttgtttgtggagaagaaagatggtactaagaggatgtgtattgattaccgagctttgaataaggtcacgatcaagaacaagtatcctttgcccagaatagaagatctgttcgaccagttgagaggagccagtgtgttctccaagatcgatctgaggtcaggttatcatcagctcaggatccgaccttcggacattccgaagacggcattcattaccaagtatggtttatatgagttcacagtgatgtcttttggtttgaccaatgcgccagcattctttatgaacttgatgaacagtgtattcatggattatcttgataagttcgcagtggtattcattgatgacattctgatttattctcaaagcgaagaagagcatgcagatcatttgaggatggtgttgcagagattgcgagagcaccagttgtatgcaaagttgagcaagtgtgagttctggatcagtgaagtcctgttcttgggtcacataatcaacaaagaaggattggctgtggatccgaagaaagtggcagacattctgaactggaaagcaccaacagatgctagaggaatcaagagcttcattggaatggccggatattatcggcgattcattgaagggttttcgaagattgcgaaaccaatgacagcgttgctaggcaacaaggttgagttcaagtggacccagaaatgccaagaggcctttgaagcgctgaaagagaagttgacaacagcgcctgtcctagtcttgcctgatgtgcacaagcccttctcggtgtattgtgatgcttgttacacagaaatgcgatgtttacacagaccacaagagtctgaagtacatattcactcaatcagaattgaacatgaggcaacgaagatggtccgagagaatctgaagatagcgcaatcaaggcagcgaagctatgcagacacaagaagaagagagctgagtttcgaagtcggagactttgtctatctgaaagtgtcaccgatcagaggagtcagaagattcggagtgaaaggcaagctagcaccccgctacattggtccgtatcagattcttgcaagacgtggagaagtggcctatcagctcagcctgccagagaatttgtctgctgtgcatgatgtctttcatgtgtctcagttgaagaagtgcttgcgtgtgccggaagagcagttgccagtggaaggtctggaagtccaggaggacttgacctacgttgagaagccagctcagatccttgaggttgcagatagagtcacccgaaggaagaccgtcaggatgtgcaaagtcagatggagtcaccactctgaggaagaagcaacctgggagcgtgaagatgatctgaaggccaagtacccggagctctttgctagccagccctga

SEQ ID NO: 92813 - DNA, 441 bp, Zea mays
  Clone ID: MRT4577_184636C.1
agtcccctaacaacgaacttttattacaaggaatagcaactctggagtggacaattataggttcagagcacagcagcacagttagtttacatgaaccgcccaacggatcagccggtggaggcaggtactaaacacagattagctagagaacggcacttggcgacctaccagatacatgtcatgtgccttgggggaacacgacaaggcctacccgcgctacatactccaaaaactatctccataagtgcccaaggggaacaccttaacccttacagtggatgacggagaacaccctctcttaaactaattaagctcacacataacttgctatgatggcacccccagttgagcgcactggtgataagcaagctaacacatatgggacttgaaacaagcaggactaaccttgtagtccatgctatgctgtttcataacaatacg

SEQ ID NO: 92814 - DNA, 184 bp, Zea mays
  Clone ID: MRT4577_184637C.1
acgatcaggtagtagtcggatacatgtagagactgctatattgcactgaattgtgttgacacagaaatgacggcaagattctgacgcctgtcatgtggtgtaaccatcatgcaatggctgttggagcatatccttttgaagcttcagaagagcctaagaacttccgcgagacaattcagcgtat

SEQ ID NO: 92815 - DNA, 4275 bp, Zea mays
  Clone ID: MRT4577_184638C.1
atggttttggttatgactatggtgctgtccagccacttggagaggctgtgccaccgcctgcatgaggagcaggaacgtcgacgacaggagcagcagggctcttctttctcgctccaacaggagatagagtccgtgaggagctgctcccctgtgcttcccctggaggcgccccctgcaccaccactgggcgccccagcctctggagtagctgctcgaggagacccagacgacggaggtagcgacgacagctcgagccacgacactgacctctctgctgaccaggagctggaaggatgggttgctcgacccatcactcgcgacaccgctcgcgggtgtcacttccacgatgcgctcgacaccctgctacgtcgggcacttaaccggcgtacttggtccatcgagtatcgctgtgtggtctaccagcatagtcgcggggtctacccggaccgctgggaggcaacctgcttggtgcgccgcccggagaacagtctccagggtgcggaggcttgctcagagcactattctatctctgagcgggactcagctgaggcggccatgcaagatgctgcacggcgtgcgctttcgcactactgctcggttctcggtggggtagctgacggtcttgacctgaagtattacccccgccgtccatctggcagcacaggaggcgtgattgtctcacctgtcggtgaggacaatcctaggttgagcagcacgatgtcagagaacaggcgcagaggaggaaggtgtgctcagcaggagcgagacgctcaacaggaagaggtaccccagcaacagcacctgccgcccccgcccccgatgtcgatcgagcagatgtttctgatgcagactcaggcagttcaagccatcggtcagactttggccgccattcagcagcagcagcaacaacagcagcaggccccacctcagcctcagatgcctcagatgcccagagacaagcgtgctgaattcatgagaggtcatccaccaacgttcgctcattcttctgaccccatggatgctgaagactggctacgcactgtggagcgggagttgcataccgctcagtgcgatgacagagagaaagtcttgtatggtccccgtctgttgagaggagcagctcagtcatggtgggagtcttacctcgccacccatgcccaccccgacaccatcacttgggaagagttcagaggaagctttcgtcagtaccatgttcctgtaggcctgatgactgtaaagaaggaggagttactggctctcaagcaagggccattgtctgtcagtgagtaccgggacaggtttctgcagttgtctcgctatgctcccgaagatgtcaacaccgacgccaagcggcagtaccgtttcctgagaggcttggttgaccctctgcaataccaactgatgaatcataccttcccgacattccagcacctgattgatagagcaatcatgacagagaggaagcgtaaggaggtggaggatcgtaagcgcaagatcagtggaccccagcctggaagcagcaaccgtcctcgtttctcaggcaatcaacctcaacagttcaggcagaaccagcgtcaacctcagcagcatcagcagttccaaaggcagtatcctcagcatcagtaccagaaccgtcagagcaatcagtcaggagaagtgttatttgatactggagcaacacattcgttcattactgcatcatgggtagaagcacataatcttccaactactaccatgtcaacctccattcaaattgactcagccggtggtagaattcgagccgatagcatttgtttgaatgtatgtgtggaaataagggggatagcatttcccgccaaccttatagtaatgggtactcagggaatagatgtcatcctagggatgaattggctagataagtatcaggcagttatcagttgtgataagaggacaatcaagttggtgtctccactaggagaggaagtggtgaccgagttagtcccgcctgagccgaagaaaggaagttgttatcagatggctgtcgatagcagtgaagcagacccaattgagaggatcaagattgtgtctgagttcccggatgtgtttccaaaggacttaccgggtatgccaccagagcggaaagttgagtttgccatagagcttcttcttggaaccgcccctatctttaagagagcttacagaatatccagaccagagttggttgagcttaagaagcaaattgatgagctgtcagagaaaggttacatccggccaagcacctcgccttgggccgctcctgtcttgtttgtggaaaagaaagatggcaccaaaaggatgtgcatcgattaccgagctttgaatgaggtcacgatcaagaacaagtaccctttgcccagaatagaagatctgttcgaccagttgagaggagccagtgtgttctccaagattgatctgaggtcaggttatcatcagctcaggatccgaccttcggacattccgaagacagcattcattaccaagtatggtttgtatgagttcactgtgatgtcttttggtttgaccaatgcaccagcctttttcatgaacttgatgaacagtgtattcatggattacgttgataagtttgtggtgagattgcgagagcaccggttgtatgcaaagttgagcaagtgtgaattctggatcaatgaagtcctgttcttgggtcacataatcaacaaagaaggattggccgtggattcgaagaaagtggcagacattctgaactggaaagcgccaacagatactcgaggaatcaagagtttcattggaatggccggatattatcggcgattcgttgaagggttttcgaagattgtgaaaccaatgacagcgttgctaggcaacaaggttgagttcaagtggacccagaaatgccaagaggccttcgaagcgctgaaagagaagttgacaacagcgcctgtcctagtcttgcctgatgtgcacaagcctttctcagtgtattatgatgcttgttacacaggtttgggatgtgtgttgatgcaagagggaagagttgtggcttactcgtcccgacagctgaaggttcatgagaagaattacccaatccatgatctagagttggcagcagtggttcacgcactgaagacatggaggcactatctgtatggacagaaatgtgatgtttacacagaccacaagagtctgaagtacatattcactcagtcagagttgaatatgaggcagcaaagatggttagagttgatcaaagactatgagttggagatccattaccatccaggcaaagcaaacgtagtggcagatgctttgagcaggaagagtcaagtcaatctgatggtcgctcgtccgatgccttatgagttggctaaggagtttgataggttgagtctcggatttctgaacaattcgcgaggagtcacagttgagttggaacctaccttggagcgtgaaatcaaagaagcgcagaagaatgatgagaagatcagtgagatccggcgacttattctagatggcagaggcaaagaatttcgagaagatgcagaaggtgtgatatggttcaaagaccgcttgtgtgttcctaatgtccaatccattcgggaattgattcttaaggaagctcatgagacagcctattcgattcaccctggcagtgagaagatgtatcaggatctgaagaagaaattctggtggtacagaatgaagagggaaatcgcagagcatgtgtttgggccagacattctgcttgaagccgaagagaacatcaagatggttcgagagaatctaaagatagcacaatcaaggcagcgaagttatgcagacacaagaagaagagagctgagttttgaagtcggagactttgtctatctgaaagtgtcaccgatcagaggagtcaaaaggttcggagtcaaaggcaagctagcaccccgctacattggtccgtaccaaattctctcaaggcgtggagaagtggcctatcaactcagtctgccagagaatttgtctgctgtgcatgatgtctttcatgtgtctcagttgaagaagtgcttgcgtgtgccagaagagcagttgccagtggaaggtcttgaagtccaggaggacttgacctacgttgagaagccagtgcaaatccttgaggttgcagacagagtcacccgaaggaagaccatcagaatgtgcaaggtcagatggaatcaccattcagaggaagaagcaacctgggggcgtgaagatgatctgatagctaaatacccagagctctttgctagccaaccctga

SEQ ID NO: 92816 - DNA, 1611 bp, Zea mays
  Clone ID: MRT4577_184639C.1
atgtgcgtcgattaccgagctttgaatgaagtcacgatcaagaacaagtaccctttgcccagaatagaagatctgttcgaccagttgagaggagccagtgtgttctccaagttagatctgaggtcaggtttgggatgcgtgttgatgcaagagggaagagttgtggcttactcgtcccgacagctgaaggttcatgagaagaattacccaatccatgatctagagttggcagcagtggttcacgcactgaagacatggaggcactatctgtatgggcagaaatgtgatgttttcacagaccacaagagtctgaagtacatattcactcagtcagagttgaatatgaggcaacgaagatggttagagttgatcaaagactatgagttggagattcactaccatccaggcaaagcgaacgtagtggcagatgctttgagcaggaagagtcaagtcaacctgatgtttgacaggttgagtctcggatttctgaacaattcgcgaggagtcacagttgagttggaacctaccctggagcgggaaatcaaagaagcacagaagaatgatgagaagatcagtgagatccggcgactaattctagatggcagaggcaaagatttttgggaagatgcagaaggtgtgatatggttcaaagaccgcttgtgtgttcccaatgtccaatccattcgggagttgatcctcaaggaagctcatgagacagcctattcgattcaccctggtagtgagaagatgtatcaggatctgaagaagaaattctggtggtacggaatgaagagggaaatcgcagagcatgtggcaatgtgcgatagttgtcgaagaatcaacgcagagcaccagagaccagctggattgttgcaaccgttgcaaattcctcagtggaaatgggatgaaatcggtatggacttcatagtcggactgcctcgcactcgagctggctacgattccatttggtccggatgggacaagcgattgccttatgcagagttttcctataacaacagctaccagaccagtttgaagatgtcaccatttcaggcgctttatggaaggagttgtagaactccgttgcaatgggatcagcttggagaaaagcaagtgttcgggccagacattctgcttgaagccgaagagaacatcaagatggttcgagagaatctgaagatagcgcagtcaagacagcgaagttatgtagacacaagaagaagagagctgagtttcaaagtcggagactttgtctatctgaaagtgtcaccgatcagaggagtcagaaggttcggagtcaaaggcaagctagcaccccgctacattggcccgtaccaaattctctcaaggcgtggagaagtggcctatcagctcagtctgccagagaatttgtctgttgtgcatgatgtctttcatgtgtctcaattgaagaagtgcttgcgtgtgccagaagagcaattgccagttgaaggtcttgaagtccaagaggacttgacctacgttgagaagccaacgcaaatccttgagaccacagacagagtcactcgaaggaagaccatcagaatgtgcaaagtcaggtggaatcatcactctgaggaagaagcaacctga

SEQ ID NO: 92817 - DNA, 577 bp, Zea mays
  Clone ID: MRT4577_18463C.1
gtacatctcagaaccttcttcttcctgcttcccccatatcccggcggcggccacggctgatcggagaagggggaagaatgccgtgctgccactgggtgctctccgtggccgagagcagcagcaacaacaaaacgccgtcatggctccaccgcctccacaccaagggcggcctctccttcccctcccacctccaaatcgatgacctcctctacggccgaatccagctgtcccctccctctcctcctccgcctgtcccccctccgccgccgccgtccgaccgcgacgccgccgccaccaacccccaagaccctgtctccttcttcgctcgcccggcgtcgttcttggcactagcgaggagctggggtccttttggtctcgcggatctgagtgtttacgatcctgcgagttggtcgtcgtcgtcatcgggcaccgctgggctctttgatgtgcaaacacggaggagcaagccggaggattacctgcagaaagaggggcgggttgaccggattcaactgccggtgtgggaacctgtactgcgcaacgcactgttactcggacaagcacgagtgcaagtttg

SEQ ID NO: 92818 - DNA, 457 bp, Zea mays
  Clone ID: MRT4577_184640C.1
aaaggaacaacggaaacagccataatttttttaaaaaacccgggggcaaggggggggaaaaaaaaacttttacaaaaaggggggggggaaaccacacaattctttaaaacagacccccataacacgggggggggggcaactttggggaaaacaggggaaagggggagcacacgggccgggggggggggaaaaaaaaaaattttttaggactgggaaccctgggggccatcctggcccttaaagaaataaaaaccgaccccctgggagtcctttttgggcaccccggggcctaaggggcctaaaaaaaaaaacctttttccatacccttaccgaagtaccaagggaaaaagggcccctgggggtaaaagagggcaaacttgggggggatgggggagaacacccccacaacacgggggggggggggagaaaagcacacgggacgctgcaccttgggcag

SEQ ID NO: 92819 - DNA, 3411 bp, Zea mays
  unsure (1)..(3411): unsure at all n locations
  Clone ID: MRT4577_184641C.1
tatttatagnnncaaccacccacaacttgaccgttggctgggttgtctgttcgatggcgcaccggacagtccggtgcacaccggacagtccggtgccccctgccacgtcatcactgccgttggattctgaccgttggagcttctgacttgtgggcccgcctgggtgtccggtgcacaccggacaggtactgtttgctgtccggtgtgccagcatgggcgattctgactcctgtgcgcgctgcgcgcgcatttattgctctacagagagccgttggcgcggagatgtcagaaaacaggcgcagaggaggaaggcgtgctcagcaggagcagttagctcagcaagatgaggtaccccagcaacagcagctgccgcccccgcccccgatgtccatcgagcagatgttcctgatgcagacccaggcagttcaagccattggtcagactctggcttccattcagcagcagcagcaacagccaccacctcagcctcagatgcctcagatgcccagggacaagcgtgctgaattcatgagaggtcatcccccaacgttctctcattcttctgaccccatggatgttgaagactggctgcacactatggagcgagagttgcataccgctcagtgcgatgacagggagaaagtcctgtatggtcctggtctattgagaggagcagctcagtcatggtgggagtcttatctcgccacccatgccaaccccgacaccatcacctgggaagagttcagaggtctgatgacaatgaagaaggaggagttcctggccctcaagcaagggtcattgtctgtcagtgagtaccgggacaggtttcggcagttgtctcgctatgcccctaaagatgtcaacaccgacgccaagagacagtaccgtttcctgaggggtttggttgaccctctgcagtatcagctgatgaatcataccttcccgacattccaacacctgattgacagagcaatcatgacagagaggaagcgcaaagagatggaggatcgcaagcgcaagatcagtggaccccagcctgaaagcagcaatcgtcctcgtttctcaagcaatcaacctcagcagcagcccaacagcagtcaggccccaatgcccccagcaaagcagaatgtgtctcagcctggagaaggcaaccgctctcagccgcgctataaccatgggagactgaaccacttagaggctgaagcagttcaggagacccccaacatgatcgtaggtatgttcccagtcgactcccatattgcagaagtgttaattgatactggagcaacacattctttcattactacatcatgggtagaagcacataatcttccagtaactaccatgtcaacccccattcaaattgactcagccggtggtagaattcaagccgatagcatttgtttgaatgtaagtgtggaaataagggggatagcatttcccgctaacctcatagtaatgggtactcagggaatagatgtcatcctagggatgaattggctagataagtatcaggcggttatcagttgtgataagaggacaatcaagttggtgtctccactaggagaggaagtggtgaccgagttagtcccgcctgagccgaagaaaggaagttgttatcagatggctatcaaaagcagtgaagcagacccaatcgagagtatcaaggttgtgtccgagttcccagatgtgtttccaaaggacttaccaggtatgccaccagagcggaaagttgaatttgccatagagcttcttcctggaaccgcccccatctttaagagagcttacagaatatctggacctgagttggttgaactcaagaagctgatcgatgagctgtcagagaaaggatacatccggccaagcacctcgccttgggccgcccctgtcttattggtggagaagaaagatgacaccaaaaggatatgtattgattatcgagctctgaatgaggtcaacatcaagaataagtaccccttgccaagaatagaagatctgttcgaccagttgagaggagccagcgtgttctccaagatagatctgaggtcaggttatcatcagctcaggattcgaccttcagacattccgaagacgacattcattaccaagtatgggttgtgtgagttcactgtgatgtctttcggtctaacaaatgcaccggccttcttcatgaatctgatcaacaatgtattcatggattatcttgataagtttgtggtggtatttattgatgacattctgatatattctcaaagcgaagaagagcatgcagatcatttgaggatggagggaagagttgtggcttactcgtcccaacaggtgaaggttcatgagaagaattacccaatccatgacctagagttggcagcagtggttcacgcattgaagacatggaggcactatctatatggacagaaatgtgatgtttacacagaccacaagagtctgaagtacatattcactcagtcagagttgaatatgaggcaacgaagatggttagagttgatcaaagactacgaattggagattcattaccatccaggcaaagcgaacgtagtggtagaagctttgagcaggaagagtcaagtcaatctgatggtcgctcgtccgatgccatatgagttagccaaagagttcgacaggttgagtctcgggtttctgaataacactcgaggagtaacaattgagttgaaacataccctggagcgggaaatcaaaaaagcgcagaagaatgatgagaagatcagtgaaatccgatcaaggcagagcaccaaagaccagctggattgttgcaactattgcaaattcctcagtggaagtgggatgaaatcgtccggatgggacaagaggtttccttatgcagagttctcttataataacagttaccaggccagcttgaagatgtcaccatttcaggcgctttatggaaggagttgtagaactctgttgcaatgggttcagcctagaaagaagcaagtgttcaggccaaacattctgcttgaagctgaagagaacatcaagatggttcgagagaatctaaagatagcgcaatcaaggcagcggagctatgcagacacaagaaggagagacctgagttttgaagttggagattttgtctatgtgaaagtgtcaccgatcagaggagtcagaaggttcggagtcaaaggcaagctagcaccccgctacattggtccgtatcagattctcgcaaggcgtggagaagtggcctatcagctcagtcttccagaaaacttgtctgcagtgcatgatgtctttcatgtgtctctgttgaagaagtgtctgcgagtgccagaagagcagttgccagtggaaggccttgaagtccaggaggccttgacttacattgagaagccaacgcaaatccttgagattgcagacagagtcacctga

SEQ ID NO: 92820 - DNA, 5472 bp, Zea mays
  Clone ID: MRT4577_184642C.1
atgaagctgtggaaggagacttccaggagttccaagattacgacgagttctaggtgtgggttagcggcaacccccagtcggctgcctgtgaaggccgcgatggctcgacttagacacactgcacgaaagtccgtcatccccttcttaccctctcgccttgctgagcgtccgcttcgccgtcccgtggccggacagtccagccacttggagagactacaccaccgcctgcgtgaggagcaggaacgtcgacgacaggagcagcagggctcttctttctcgctccaccaggagatagagtctgtgaggagctgctcccctgtgcttcctctggaggcgccccctgcaccaccattgggcgccccagcttctggagtagctgctggaggagacccagacgatggagatggcgacgacagctcgagccacgacaccgacttctctgctaaccctgagccggaaggatgggttgctcgacccatcactcgcgacgctgctcgcgggtgtcacttccatgatgcgctcgacaccctgctacgtcgggcatttgaccgacatacttgtcgcggggtctacccggaccgctgggaggcaacctgcttggtgcgctgcccggagaacagtctccagggtgcagaggcctgttcagagcactattctatctctgagcgggactcagctgaggcagccatgcaagatgctgcacggcgtgcgctttcgcactactgctcggttttcggtggggcagctgacggtcttgacctgaagtattacccccgccgtccatctggcagcacaggaggcgtgattgtctcacctgtcggtgagggcaatcctaggttgagcagcacagtcaacctagccgccgtgctaaacacggagctggaccatgcattagacgagctgagtagggctcgtgctgagatcgccctgcttcgggctgagcgcgcagaacgtcatcacctggatggtggttcccccgctcccatgtcagagaacaggcgcagaggaggaaggcgtgctcagcaggagcgagccgctcaacaggatgaggtgccccagcagcagcacctaccgcccccgcccccgatgtccatcgagcagatgtttctgatgcagactcaggcagttcaagccatcggtcagactttggccaccattcagcagcagcagcagcaacagcagcaggcaccacctcaacctcagatgcctcagatacccagagacaagcgtgctgaattcatgagaggtcatccaccaacgttcgctcattcttctgaccccatggatgctgaagactggctgcgcactgtggagcgggagttgcataccgctcagtgcgatgacagggagaaagttctgtatggtccccgtctattgagaggagcagcccagtcatggtgggagtcttacctcgccacccatgcccatcctgacgccatcacttgggaagagttcagaggtagctttcgtcagtaccatgttcctgcaggtctgatgactgtgaagaaggaggagttcctggccctcaagcaagggtcatcgtctgtcagtgagtaccgggacaggtttctgcaattgtcccgctatgctcctgaagatgtcaacaccgacgccaagcggcagtaccgtttcctgagaggcttggttgaccctctgcagtaccaactgatgaatcacaccttcccgacattccagcacctgattgacagagcaatcatgacagaaaggaagcgtaaggagatggaagatcgtaagcgcaagatcagtggaccccagcctggaagcagcaatcgtcctcgtttctcaggcaatcaatctcagcagttcaggcagaaccagcgtccacctcagcagcatcagcagttccaaaggcagtaccctccgcaccagtaccagaaccgtcagagcaatcagtcaggaggtcagtttcagaggcagaatcagcaggcacctcgtcttcctgccccagcaaaccagcagaacagtcaggcagcaccagctcaggttggaaacagagcatgtttccactgtggagagcaaggccactgggtgatgcaatgtccgaagaaggcagcccagcagcagtcaggccccagtgcccctgcaaagcagaatgtgcctcagcatggagtaggcaatcgctctcagccgcgctataatcatgggagactgaaccacttggaggctgaagcagttcaagatacccccggcatgatagtaggtatgttcccagtcgactcccatattgcagaagtgttatttgatactggagcaacgcattctttcattactgcatcatgggtagaagcacataatcttccaattactgccatgtcaacccccattcaaattgactcagccggtggtagaattcgagccgatagcatttgtttgaatataagtgtggaaataagggggatagcgtttcccgccaaccttatagtaatgggtactcagggaatagatgtcatcctagggatgaattggctagataagtatcaggcagttatcagttgtgataagaggacaatcaagttggtgtctccactaggaaaggaagtggtgaccgagttagtcccgcctgagccaaagaaaggaagttgttatcagatagctgttgatagcagtgaagcagacccaattgagagcatcaaggttgtgtccgagttcccagatgtgtttccaaaggacttaccgggtatgccaccagagcggaaagttgagtttgccatagagcttcttcctggaaccgcccctatcttcaagagagcttacagaatatctggaccagagttggatgagcttaagaagcaaattgatgagctgtcagagaaaggttacattcggccaagcacctcgccttgggccgcccctgtcttgttcgtggaaaagaaagatggcaccaagaggatgtgtattgattaccgagctttgaatgaggtcacgatcaagaacaagtaccctttgcccagaatagaggatctgttcgatcagttgagaggagccagtgtgttctccaagattgatctgaggtcaggttatcatcagctcaggatccgaccttcggacattccgaagacggcattcatttccaaatatggtttgtatgagttcacagtgatgtcttttggtttgaccaatgcgccagcgttcttcatgaacttaatgaacagtgtattcatggattaccttgataagtttgtggtggtattcattgatgacattctggtttattctcaaagcgaagaagagcatgaagatcatttgaggatggtattgcagagattgcgagagcaccagttgtatgcaaagttgagcaagtgtgaattctggatcagtgaagtcttgttcttgggtcacataatcaacaaggaaggattggctgtggatccgaagaaagtggcagacattttgaactggaaagcgccaacagatgcccgaggaatcaagagcttcattggaatggccggatactatcgacgattcattgaagggttttcgaagattgcgaaaccaatgacagcgttgctaggcaacaaagttgagttcaagtggacccagaaatgccaagaggcctttgaagcgctgaaagagaagttgactacagcgcctgtcctagtcttgcctgatgtgcacaagcccttctcggtgtattgtgatgcttgttacacaggtttgggatgcgtgttgatgcaagagggaagagttgtggcttactcgtcccgacagctgaaggttcatgagaagaattacccaatccatgatctagagttggcagcagtggttcacgcactgaagacatggaggcactatctgtatggacagaaatgcgatgtttacacagaccacaagagtctgaagtacatattcactcagtcagagttgaacatgaggcaacgaagatggttagagttgatcaaagactatgagttggagatccattaccatccaggcaaagcaaatgtagtggcggatgctttgagcagaaagagtcaagtcaatctgatggtcgctcgtccgatgccttatgagttggctaaggagtttgacaggttgagtctcggatttctgaataattcgcgaggagtcacagttgagttggaacctaccttggagcgcgaaatcaaagaagcgcagaagaatgatgagaagataagtgagatccggcgactgattctagatggcagaggcaaagattttcgagaagatgcagaaggcgtgatatggttcaaagaccgcttgtgtgttcccaatgtccagtccattcgggaattgattcttaaggaagctcatgagacagcctattcgattcaccctggcagtgagaagatgtatcaggatctgaaaaagaaattatggtggtacggaataaaaagggaaatcgcagagcatatccctcagtggaaatgggatgaaattggtatggatttcatagtcggattgcctcgcactcgagccggctacgattccatttgggtagtagtggaccgtctgaccaagtcagcccacttcatacctgtcaagaccaactacagcagtgcagtattggcagaattgtatatgtcttggatcgtttgtcttcatggtgtgccaaagaagatagtgtcagacagaggaacgcagttcacctctcatttctggcagcagttgcatgaagctttgggcacgcatctgaatttcagttcagcttatcatccgcagacggatggccagaccgaaaggaccaatcaaattcttgaagatatgttgagagcctgtgcgttgcaagatcagtccggatgggacaagcgattgccttatgcagagttttcctataacaacagttaccaggccagtttgaagatgtcaccatttcaggcgctttatggaaggagttgtagaactccgttgcaatgggatcagcctggagaaaagcaagtgtttgggccagacattttgcttgaagccgaagagaacatcaagatggtccgagagaatctgaagatagcgcaatcaagacagcgaagctatgcagacacaagaagaagagagctgagtttcgaggttggagactttgtctatctgaaagtgtcaccgatcagaggagtcagaaaattcggagtgaaagacaagctagcaccccgctacattggtccgtatcagattcttgcaagacgtggagaagtggcctatcagctcagtttgcccgagaatttgtctgctgtgcataatgtctttcatgtgtctcagttgaagaagtgcttgcgtgtgccagaagagcagttgccagtggaaggtcttgaagtccaggaggacttgacctacgttgagaagccagtgcaaatccttgaggttgcagacagagtcacccgaaggaagaccatcagaatgtgcaaagtcagatggaatcaccactctgaggaagaagcaacctgggagcgtgaagatgatctgatggccaaataccctgagctctttgctagccaaccctga

SEQ ID NO: 92821 - DNA, 295 bp, Zea mays
  Clone ID: MRT4577_184643C.1
gggggggggggaatgcgcaggcgcgggcccggatggtccgcgccaacgtgcgccttgggtgacctcttaggcggtgtgcggggaacgcgtggccacgggggctctttgccgtacttggggggggggggggggggccagaaaatggattggggccgctgcgaggcgcggcagcttgacgtggggcctgaggggtgggccacatcgctagcggaggggtccgggtgttgggcgcagtggatggtggattggatcaagggcgcgtgggggggcggcaggacttgttggtggggggggg

SEQ ID NO: 92822 - DNA, 5091 bp, Zea mays
  Clone ID: MRT4577_184644C.1
atggagagtcatgatctccgggcagaatgggaatcacggcttgtgggtggttatgagatcgatgattctggttatgactatggtgctggtaagtggtattctttccgtttggaaaggatggctcgacttagacacactgcacgaaagtcagtcatccccttcttaccctcccgccttgctgagcgtccgcttcgccgtcccgtggccggacagtccagccacttggagagactacaccaccgcctgcgtgaggaccaggaacgtcgacgacaggagcagcagggctcttccttctcgctccagcaggagatagagtccgtgaggagctgctcccctgtgcttcctctggaggcgccccctgcaccaccactgggcgccccagcttctggagtagctgctggaggagacccagacgacggaggtggcgacgacagctcgagccacgacaccgacttctctgctaaccctgagccggaaggatgggttgctcgacccatcactcgcgacttctctgcattttggtttatctattatgttaatgaaatgtcagagaacaggcgcagaggaggaaggcgtgctcagcaggagcgagccgctcaacaggaggaggtgccccagcagcagcacctgccgcccccgcccccgatgtccatcgagcagatgtttctgatgcagactcaggcagttcaagccatcggtcagactttggccgccattcagcagcagcagcaggccccacctcagcctcagatgcctcagatgcccagagacaagcgtgctgaattcatgagaggtcatccaccaacgttcgctcattcttctgaccccatggatgctgaagactggctgcgcactgtggagcgggagttgcataccgctcagtgcgatgacagggagaaagttctgtatggtccccgtctgttgagaggagcagcccagtcatggtgggagtcttacctcgccacccatgcccaccctgacgccatcacttgggaagagttcagaggtagctttcgtcagtaccatgtccctgcaggtctgatgacagtgaagaaggaggagttcctggctctcaagcaagggccattgtctgtcagtgagtaccgggacaggtttctgcagttgtctcgctatgctcctgaagatgtcaacaccgacgccaagcgacagtaccgtttcctgagaggcttggttgaccctcttcagtatcagctgatgaatcacaccttcccgacattcaagcacctgattgacagagcaatcatgacagagagaaagcgtaaggagatggaagatcgtaaacgcaagatcagtggaccccagcctggaagcagcaatcgtcctcgtttctcaggcaatcaacctcagcagttcaggcagaaccagcgtccacctcagcatcagcagtttcaaaggcagtatcctcagcaccagtatcagaaccgtcagagcaatcagtcaggaggtcagtttcaaaggcagaatcagcaggcacctcatcttcctgccccagcaaaccagcagaacagtcaggcagcaccagctcaggttggaaacagagcatgtttccactgtggagagcaaggccactgggtgatgcaatgtccgaagaaggcagcccagcagcagtcaggccccaatgccccagcaaagcagaatgtgtctcagcctggatcaggcaaccgctctcagccgcgctataatcatggaagactgaaccacttggaggctgaagcagttcaggagacccccggcatgatagtaggtatgttcccagtcgactcccatattgcagaagtgttatttgatactggagcaacacattctttcattactgcatcatgggtagaagcacataatcttccaattactaccatgtcaacccccattcaaatcgattcagccggtggtagaattcgagccgatagcatttgtttgaatataagtgtgaaaataagggggatagcatttcccgccaaccttatagtaatgggtactcagggaatagatgtcatcctagggatgaattggctagataagtatcagacagttatcagttgtgataaaaggacaatcaagttggtgtccccactaggagaggaagtggtaaccgagttagtcccgcctgagccaaagaaaggaagttgttatcggatagctgttgatagcagtggagcagacccaattgagagtatcaaggttgtgtctgagttctcagatgtgtttccgaaggacttaccgggcatgccaccagagcggaaagttgaatttgccatagagcttcttcccggaaccgcccctatcttcaagagagcttacagaatatctggaccagagttggttgagcttaaggagcagattgatgagctgtcagagaaaggttacatccggccaagcacctcgccttgggccgcccctgtcctgtttgtggagaagaaagatggcaccaagaggatgtgtattgattatcgagctttgaatgaggtcacgatcaagaacaagtatcccttgcccagaattgaagatctgttcgaccagttgagaggagccagtgtgttctccaagattgatctgaggtcaggttatcaccagctcaggatccgaccttcggacattccgaagacggcattcatttccaagtatggtttgtacgagttcacagtgatgtcttttggtttgaccaatgcgccagcgtttttcatgaacttgatgaatagtgtattcatggattaccttgataagtttgtggtggtattcattgatgatattctggtttattctcaaagcgaagaagagcacgcagatcatttgaggatggtattgcagagattgcgagagcaccaactgtatgcaaagttgagcaagtgtgagttctggatcagtgaagtcctgttcttgggtcacataatcaacaaagaaggattggctgtggatccgaagaaagtggcagacattctgaactggaaagcgccaacagatgctagaggaatcaagagtttcattggaatggccggatattatcggcgattcattgaagggttttcgaagattgcgaaaccaatgacagcgttgctaggcaacaaagttgagttcaagtggacccagaaatgccaagaggcctttgaagcgctgaaagagaagttgactacagcgcctgtcctagtcttgcctgatgtacacaagcccttctcggtgtattgcgatgcttgttacacaggtttgggatgtgtgttgatgcaagagggaagagttgtggcttactcgtcccgacagttgaaggttcatgagaagaattacccaatccatgatctagagttggcagcagtggttcacgcactgaagacatggaggcactatctgtatggacagagatgcgatgtttacacagatcacaagagtctgaagtacatattcactcagtcagagttgaacatgaggcaacgaagatggttagagttgatcaaagactatgagttggagatccattaccatccaggcaaagcaaacgtagtggcagatgctttgagcagaaagagtcaagtcaatctgatggtcgctcgtccgatgccttatgagttggctaaggagtttgacaggttgagtctcagatttctgaataattcgcgaggagtcacagttgagttggaacctaccttggagcgcgaaatcaaagaagcgcagaagaatgatgagaaaatcagtgagattcggcgactgattctagatggcagaggcaaagattttcgagaggacgcagaaggcgtgatatggttcaaagaccgcttgtgtgttcccaatgtccagtctattcgggagttgattcttaaggaagctcatgagacagcctattcgattcaccctggcagtgagaagatgtatcaggatctgaagaagaaattctggtggtacggaatgaagagggaaattgcagagcatgtggctatgtgcgatagttgccgaagaattaaggcagagcaccagagacctgccggattgttgcaaccgttgcagatccctcagtggaaatgggatgaaattggtatggatttcatagtcggattgcctcgcactcgagccggctacgattccatctgggtagtagtggaccgtttgaccaagtcagcccacttcatacctgtcaagaccaactatagcagtgccgtattggcagagttgtatatgtctcggatcgtttgtcttcatggtgtgccaaagaagatagtgtcagacagaggaacgcagttcacctctcatttctggcagcagttgcatgaagctttgggcacgcatctgaatttcagttcagcttatcatccgcagacagatggccagaccgaaaggaccaatcaaattcttgaagatatgttgagagcctgtgcgttgcaagatcagtccggatgggacaagagattgccttatgcagagttttcctataacaatagttaccaggccagtttgaagatgtcaccatttcaggcgctctatggaaggagttgtagaactccgttgcaatgggatcagcctggagagaagcaagtgtttgggccagacattttgcttgaagccgaagagaacatcaagatggtccgagagaatctgaagatagcgcaatcgaggcagcgaagctatgcagacacaagaagaagagagctgagtttcgaagtcggagactttgtctatctgaaagtgtcaccgatcagaggagtcaagaggttcggagtcaaaggcaagctagcaccccgctacattggtccgtatcaggttcttgcaagacgtggagaagtggcttatcagctcagtttgcccgagaatttgtctgctgtgcatgatgtctttcatgtgtctcagttgaagaagtgcttgcgtgtgccagaagagcacttgccagtggaaggtcttgaagtccaggaggacttgacctacgttgagaagccagtgcagatccttgaggttgcagaccgagtcacccgaaggaagaccatcagaatgtgcaaagtcagatgggatcatcactctgaggaagaagcaacctgggagcgtgaagatgatctgatggccaaataccctgagctctttgctagccaaccctga

SEQ ID NO: 92823 - DNA, 1284 bp, Zea mays
  Clone ID: MRT4577_184645C.1
catcgggagcctcgacggcgcccccccacgcgtccgggaagcggaagcgaggcgcccgtcatgctctgcctcagcctggtcgcgccaccaccgatggcccccgccggccggcggcggcggcggcggcatccgacttctgtgacccgccgcggccaaaccctcgccgccctcccgtgccactgtggacggcggcacgtcatcggtgcctcctcggctgccgctctccttcctttcctcgcccctccttctctggccgctccgcccgtcgaccccgacgtggtgctccagcgagtgcacccgtcgaggccggactggtatgaggagttctatgcctcggccatggaccagggaatgaaatcatacgaagcagagatcgcaggatacaaagtaaagctcttctctcatctgtcgcctgcgggaaagaacattctcgagctcggtgttgggacagggcctaacttcaaatactatgcaagtgaagatggggttaatgtgatcggagtggaccctaacaagcacatggagaagtatgcaagggctgctgttgtgtctgctggactcgcgtcgtcgagcttcacattcaggagaggggttgctgaagccttgccggcagaagacaattccatggatgtggtggtcggcacactggtgctgtgctctgtaaacaacatcgacatggcactgagagaaataaagcgagtcctaaagcccggtggtctctacgtgttcattgaacatgttgccgcaccagatggtacgttgctccgcttggttcaaggtgcgcttgatcccttgcagcaattggtagcggacggatgccacctcaccaggagaaccggacagagcatccgagatgctgggttctcgagtctgagcctggacggtgtccgactgtcgaacgcctacatcattagccctcatgtttatggcgtagcctgcaagtgaggtaccagtccctaaatcctcattggcaaagtccttcgacgagttgtctatatcttatttagcacttcggcttggtatctttgtctttgtaattggcgaaaaagaaatcgggaatggactataggaatacaagtacttcaaagaaaatgggaaggaagtgcttttgccttctaaaaggttcaggtgcgcttgatcccttgcagcaattcgtagcggacggatgccacctcaccaggagaaccggacagcccatctctattgcctgagccgggattccctgtccataagaaaagggccgtaaaagggtagttgagaggacgtaagaggttactctgcttt

SEQ ID NO: 92824 - DNA, 463 bp, Zea mays
  Clone ID: MRT4577_184646C.1
gggaaaaaaaaaggggaacccaaccctttgggaaatttcacactttgggaaagcaattacaacaaaacagttccttgttttggggaacggggccggttcccggttgttaatgtaaggcccaggcccgtgggaacccattttttggtttggcccaaaattttataaaaaaaaacatttccctcaaaaaaaaaaaaagtttttttaaaaaaacccggtcgataaatgttaaaaaagccccggattcctttgggggtttaatttaaaaccttttgatcaacctcggattgggaaaacacccccccatgcttttgagttttctcactcgggggggagaaaaccgggggctttttccctccaggtttggaggagggattcccaaaccaaataatgccgataactgccaaaaacatgccaagggcgacggggaaattgaaaccctttttcccaaaaaaaaaaaacccca

SEQ ID NO: 92825 - DNA, 4116 bp, Zea mays
  Clone ID: MRT4577_184647C.1
atgtcagagaacaggcgcagaggaggaaggcgtgctcagcaggagcaagccgctcaacaggaagaggtgcctcagcaacaacaactgccgcccctgcccccgatgtccatcgagcagatgtttctgatgcagactcaggcagtccaagccatcggtcagactctggccaccattcagcagcagcagcagcaggcaccacctcagcctcagatgcccagggataagcgtgctgaattcatgagaggtctgatgacagtgaagaaggaggagttcttggccctcaagcaagggtcatcgtctgtcagtgagtaccgagacaggtttctgcagttgtctcgctatgctcttgaagatgtcaacaccgacgccaagcgacagtaccgtttcctgagaggcttggttgatcctctgcagtatcaactgatgaatcataccttctcgacattccagcacttgattgacagggcaatcatgacagagaggaagcgtaaggagatggaggatcgcaagcgcaagatcagtggaccccagcctggaagcagcattcgtcctcgtttctcaggcaatcaatctcagcagttcaggcagaaccagcgtccacctcagcagcatcagcagttccaaaggcagtatcctcagcaccagtatcagaatcgtcagaacaaccagtcaagaggaggccagtttcagaggcagaatcagcagacacttcgtcttcctgccctagcagcccagcagaacagtcaggcagcaccagctcaggttggaaatagagcatgtttccactgtggagagcaaggccactgggtgatgcaatgtccgaagaagacggcccagcagcagtcaggccccaatgccccagcaaagcagaatgtgtctcagccaggagcaggcaaccgctctcagccacgctataatcatggaagactgaatcacttggaggctgaagcaattcaggagacccccgacatgatagtaggtatgttcccagtcgactcccatattgcagaagtgttatttgatgctggagcaacacattctttcattactgcatcatgggtagaagcacataatcttccaattactaccatgtcaacccccattcaaattgactcagccggtggtagaattcgagccaatagcatttgtttgaatgtatgtgtggaaataagggggatagcgtttcccgccaacctcatagtaatgggtactcagggaatagatgtcatcctagggatgaattggctagataagtatcaggcagttatcagttgtgataagaggacaatcaagttggtgtccccactaggagacgaagtggtgaccgagttagtcccgcctgagccaaagaaaggaagttgttatcagatggttgtcgatagcagtgaagcagacccaattgagagcatcaagattgtgtctgagtttccagatgtgtttccaaaggacttaccaggtatgccaccagagcggaaagttgaatttgctatagagcttcttcctggaaccgcccccatctttaagagagctttcagaatatccgtaccagagttggttgaacttaagaagccgattgatgagctatcagagaaaggttacattcggccaagcacctcgccttgggccgcccctgtcctatttgtggaaaagaaagatggcaccaaaaggatgtgtatcgattatcgagctctgaatgaagtcacgatcaagaacaagtaccctttgcccagaatagaagatctgttcgaccagttgagaggagccagtgtgttctccaagattgatctgaggtcaggttatcatcagctcaggatccgaccttcggacattccgaagacggcattcattaccaagtatggtttgtatgagttcactgtgatgtcttttggtttaaccaatgcaccagccttcttcatgaatctgatgaacagcgtattcatggattatcttgacaagtttgtggtggtattcattgatgacatcctgatatactctcaaagcgaagaagagcatgcaagtcatttgaggatgaaagtggcagacattctgaactggaaagcgccaacagatgctcaaggaatcaagagtttcattggaatggccggatattatcggcgattcattgaagggttttcgaagattgcaaaaccaatgacagcgttgctaggcaacaaagttgagtttaagtggacccggaaatgtcaagaggcctttgaagcgctgaaagaaaagttgactacaacgcccatcttagtcttgcctgatgtgcacaagcccttctcggtgtattgcgatgcttgttacactggtttgggatgcgtgttgatgcaagagggaagagttgtggcttactcgtcccgacagctgaaagttcatgagaagaattacccaatccatgacctagagttggcagcagtggttcacgcactgaagacatggaggcactacctgtatggacagaaatgtgatgtttacatagaccacaagagtctgaagtacatattcactcagtcagagttgaatatgaggcaacgaagatggttagagttaattaaagactatgagttggagattcactaccatccaggtaaagcgaacgtagtggcagatgcgttgagcaggaagagtcagatcaatctgatggtcgctcgtccgatgccttatgagttggccaaggagttcgacaggttgagtctcggatttcttaacaacacgcgtggagtcacagttgagttggaacctaccctagagtgggaaatcaaagaagcgcagaagaacgatgagaagatcagtgagatccggcgactgattctagacggcagaggcaaagactttcgagaagatgcagaaggtgtgatatggttcaaagaccgcctatgtgttcccaatgtccagtctattcgggagttgatcctcaaggaagctcatgagacagcttattcgattcaccccggaagtgagaagatgtatcaggatctgaagaagaaattctggtggtacggaatgaagagggaaatcgcagagcatgtggctatgtgcgatagttgtcgaaggatcaaggcagagcaccagagaccagctggattgttgcagccgttgcaaatccctcagtggaaatgggatgaaatcggtatggatttcatagtcggattgcctcgcattcgagccggctacgattctatttgggtagtggtggaccgcttgaccaagtcagcccacttcatacctgtcaagaccaattacagcagtgcagtattggcagagctgtatatgtctcggatcgtctgtcttcacggtgtgccaaagaagatagtgtcagaccgaggaacgcagttcacctctcatttctggcagcaattgcatgaagccttgggcacacatctgaatttcagttcagcgtatcatccgcagacagatggtcagactgaaaggaccaatcaaattcttgaagacatgttgagagcctgtgcgttgccagatcagtccggatgggacaagagattgccttatgcagagttttcctataacaacagttaccaggccagtttgaagatgtcaccatttcaggcgctttatggaaggagttgtagaactccgttgcaatgggatcagcctggagaaaagcaagtgttcgggccagacattctgcttgaagccgaagagaacatcaagatggtccgagagaatctgaagatagcgcaatcaaggcagcgaagttatgcagacacaaggagaagagagctgagtttcgaagtcggagactttgtctatctgaaagtgtcaccgatcagtggagtcagaaggttcggagtcaaaggcaagctagcaccccgctacatcggtccgtatcagattctcgcaaggcgtggagaattgaagaagtgcttgcgtgtgccggaagagcagttgccagtggaaggtcttgaagtccaggaggacttgacctacacagagaaaccagcgcaaatccttgagattgcagacatagtcacccgaaggaagaccatcagaatgtgcaaagtcaaatgggatcaccactctgaggaagaagcaacctgggagcgtgaagatgatctgatggctaaatacccagagctctttgctagccaaccctga

SEQ ID NO: 92826 - DNA, 507 bp, Zea mays
  Clone ID: MRT4577_184648C.1
gcgaggcgcccgtcatgctctgcctcagtctggtcgcgccaccaccgatggcccccgccggccggcggcggcggcggcatccgacttctgtgacccgccgcggccaaaccctcgccgccctcccgtgccactgtggacggcggcacgtcatcggtgcctcctcggctgccgctctccttcctttcctcgcccctccttctctggccgctccgcccgtcgactccgacgtgaggtcctccttatgggctacggcgcctcgtctacgttctctatgcgtctagccagcctggtgcgtgcgcgcccgaaccaactttgatcttgcttggttgggcaggtggtgctccagcgagtgcacccgtcgaggccggactggtatgaggagttctatgcctcggccatggaccagggaatgaaatcatacgaagcagagatcgcaggatacaaagtaaagctcttctctcaactgtcgcctgcgggaaagaacattctcgagctcgtgttgggaca

SEQ ID NO: 92827 - DNA, 2340 bp, Zea mays
  Clone ID: MRT4577_184649C.1
atggagagtcatgatctccggacagaaagggaatcatggcttgtgggtggcaatgagactgatggttttggttatgactatggtactggtaagtggtattatttccgtttggaaagggcaccccctgcaccaccactgggcgccctagcctctggagtagctgctggaggagacccagacgacggaggtggcgacgacagctcgagccacgacaccgacttctctgctgaccaggagccggaaggatgggttgctcgacccatcactcgcgacgctgctcgcgggtgtcacttccacgatgcgctcgacaccctgctacgttgggcacttaaccggcgtacttggtccatcgagtatcgctgtgtggtctaccagcatagtcgcggggtctacccggaccgctgggaggcgacctgcttggtgcgccgtccggagaacagtctccagggtgcggaggcctgctcagagcactattccatctctgagcgggactcagctgaggcggccatgcaagatgctgcacggcgtgcgctttcgcactactgcttgattctcggtgggatgtcagagaacaggcgcagaggaggaaggcgtgctcagcagaagcaagccgctcagcaggaagaggtgccccagcaacagcagctgccacccccgcccccgatgtccatcgagcagatgtttctgatgcagactcaggcagttcaagccatcggtcagactctggccgccattcagcagcagcagcaacaggcaccacctcagcctcagatgcctcagatgcccagggacaagcgtgctgaattcatgagaggtcatccaccaacattcgctcactcttctgaccccatggatgctgaagactggctgcacactgtggagcgggagttgcataccactcagtgcgatgacaggaagaaagtcttgtatggtcctcgtctgttgagaggagcagctcagtcatggtgggagtcttatctcgtcacccatgccaaccccgacaccatcacctgggaagagttcagaggtagcttccgtcagtaccatgttcctacaggtctgatgacagcaaagaaggaggagttcttggccctcaagcaagggtcatcgtctgttagcgagtaccgggacaggtttctgcagctgtctcgctatgctcctgaagatgtcaacaccgacgccaagcgacagtaccgtttcctgagaggcttagttgaccctcttcagtatcagctgatgaatcatactttcctgacattccagcacctgattgacaaagcaatcatgacagagaggaagcgtaaggagatggaggatcgcaaacgcaagattagtggacccccgcctggaagcatcaatcgtccttgtttctcaggcaatcaatctcagcagttcaggcagaaccagcgtccacctcagcagcatcagcagttccaaaggcagtatcctcagcaccaatatcaaaatcgtcagaacaaccagtcaggaggaagccagtttcagaggcagaatcagcaggcacctcgtcttcctgccccagcagcccagcagagcagtcaggcagcaccagctcaggttggaaacagagcatgtttccactgtggagagcaaggccactgggtgatgcaatgtctgaagaaggcatcccagcagcaatcagggcccaatgccccagcaatgcagaatgtgtctcagcctggagcaggcaaccactctcagccgcgttacaaccatggaagactgaaccacttggaggctgaagcagttcaggagacccccggcatgatagtaggtatgttcccagtcgactcccatattgcagaagtgttatttgatactggagcaacgcattctttcattactgcatcatgggtagaagcacataatcttccaattactaccatgtcaaccctcattcaaattgactcagctggtggtagaattcgagccgatagcatttgtttgaatgtatgtgtggaaataagggagatagcgtttcccgctaacctcatagtaatgggtactcagggaatagatgtcatcctggggatgaattggctagataagtatcaggcagttatcagttgtgataagaggacaatcaagttggtgtccccactaggaaaggaagtggtgaccgagttagtcccgcctgagccgaagaaaggaagttgttatcagatggctgtcgatagcagtgaagcagacccaattgagaggatcaagattgtgtctgagttcccagatgtgtttccaaaggacttaccaggtatgccaccagagcggaaagttgaatttgccatagagcttcttcctggaaccgccccctgtgggggatag

SEQ ID NO: 92828 - DNA, 607 bp, Zea mays
  Clone ID: MRT4577_18464C.1
ttttttttttttttttttttttttttttttttttttttttttttttttttttttttttttagtatatatatatatatataggatcaaatcatatcatcggggaccaattaatatatggttacaggaaacccaatcggatcaaccaacatgcttgtaaacacccgtacatgagcacaaaaactggccccaaacatgcaaagagagaaatagcaaactgaaaaactttgtttttttttttttttcacacaccacacaatacctatgtttggcacccagctcggcctcctttattattgttcaacccccaccacaagctaaatagataataatcatatccatgggcggcgatcgatgggatcaacagttgcaggggtcgcacttgcagttgttaccgaaaccgcaggcgtggggggcctccccgggctcccccggggccttaaaaaactcgggcgcggcctttttttccggggccaccccaaggacaacgggggcctgggcgggggtgcttgtttcctccaggtaagggtactttttgccgcacttgcagtttgagccccacccgcattttgatcccgcagttgcaaaacatcctcaacctttggggggc

SEQ ID NO: 92829 - DNA, 512 bp, Zea mays
  Clone ID: MRT4577_184650C.1
tcgttgacgcgtggggtcggcacactggtgttgtgctctgtgaacaacatcgacatggtactgcgagaaataaagcgagtcctaaagcccggtggtctctacgtgttcattgaacatgttgccgcaccagatggtacgttgctccgcttggttcaaggtgcgcttgatcccttgcagcaattggtagcggacggatgccacctcaccaggagaaccggacagagcatccgagatgctgggttcttgagtctgagcctggacggtgtccaactgtcgaacgcctacatcattagccctcatgttatgggcgtagcctgcaagtgagtttttttttctttccagcccatctctatgccgggagccgggattccctgttcataagaaaagggcgtaaaaaggttgttggagaggacgtaaagaggttactctgctttgttggtgatcttgatttccttagacttgggatcgatttgaaaggaatggagccgcagatcttacgggcccacggagtc

SEQ ID NO: 92830 - DNA, 469 bp, Zea mays
  unsure (1)..(469): unsure at all n locations
  Clone ID: MRT4577_184651C.1
actggaaaagccgcagccgcaggcgggttaaagccgcagcgaacaagccacaaaattaaagcggggggaacaggggggggggggggggggcgacaaggaaaacaaaacaaaatccaaatccctttccatccatccatccggccggccaccactggctcataatgcataccccataccaaacgcgaagtaactgggttccgggtggccggatgggggcttgagcaagggagcgtaatcttaggagatacattccaacctctggaggaagctgcaactggtgtattttttggtggggggggggggggactctttttttttttttttttttnactaaatcactcactcactcaccggaggattttataaagcggaaaactggctcgccattggctcggggggtggcgtctaaaagctcctcctcctcctcctcacctttggtcctgactttgggcggtggctggtggtgcca

SEQ ID NO: 92831 - DNA, 237 bp, Zea mays
  unsure (1)..(237): unsure at all n locations
  Clone ID: MRT4577_184652C.1
ttttacaaactggaatgaatgtcttctacacaccctaaccaaccatcccgctacataacattattccctgctgaaccattatcttcacattcctgtttccttgcccttcaacccacaacacacactctgtccttctacctgtcccttcccctcaactttggtttgcttcctcggtcctgttacctttctgcttttgtgtcctctaaatttccaatttccctgtcgcccnttcgtttc

SEQ ID NO: 92832 - DNA, 741 bp, Zea mays
  unsure (1)..(741): unsure at all n locations
  Clone ID: MRT4577_184653C.1
ccggccgggaatccgcctccgctgcctccgtgccgaccctgcttcccacccgcggtaaacatgatgacgaggacgtcgacgaggcccacgtgacgatggccttcatggctccaatccacctcggtgccgccctcgctccccgcccatgccgagcccgaggagggcagcgacgccaaggtggaagggacaggcaacgcttgcggttgctgtgaaatcgctgagcagggagacagtcgccgcgttgggtagtccggcttgggcgcggcggcgtggactgctgcgggtccatcggtgttggcgcgggagcgcgtgccggggtcggagggcgtcatggaccggctctttcgtcggaaggttgcagtcagcgacgcgcacttttgtggagcaggtctatatctagaaccgaaggccttcgccgaggagggtgtggtcgccgggagctacaaggtgcggtactgcggtgggtcagaagcggggcacgaggacatccatagcctgcggcgtcgtgggtgtgtgctcgttgttgtttcccctagaagaagccatgcatctttgaaaggttgaacaagtgaatcacatttctctccccatgtccagacctacgatttgcattgggaggttagggatttggtcaactaatatccatggtttctagaattttgtaatttatgcatacatcaggtgcatggatatgggcacaagtattgtttttcccaaaaaaaaaaanaaaaatttgcggnc

SEQ ID NO: 92833 - DNA, 4509 bp, Zea mays
  Clone ID: MRT4577_184654C.1
atgtatgcggctcgctccgccaaggttgattcgtcccttggggaggagtgcggtggcaatgagactgatggttttggttatgactatggtgctggtaagtggtattctttccgtttggaaatggttgtcagcattgcaaccactgctcgggagaagatgaagctgtggaaggagacttccaggagttccaagactacgacgagttctaggcgtgggttagcggcaacccccagtcggctgcctatgaaggccgcggagatagagtctgtgaggagctgctccccagtgcttcccctggaggcgccccctgcaccaccactgggcgccccagcctctggagtagctactggaggagacccagacgatggaggtggcgacaacagctcgagccatgacaccgacttctctgctgaccaggagccggaaggatgggttgctcgacccatcactcgcgacgctgctcgcgggtgtcacttccacgatgcgctcgacaccctgctacgtcgggcacttaaccagcgtacttggtccatcgagtatcgctgtgtggtctactcggaccgctgggaggcgacctgcttggtgcgccgtccggagaacagtctccagggtgcagaggcctgcttagagcactattctatctctgagtgggactcagctgaggcggccatgcaagatgctgcatggcatgcgctttcgcactactgctcggttctcggtggggtagctgacggtctcgacctaaagtattacccccgccgtccatctggcagcacaggaggcgggattgtctcacctgtcggtgaggacaatcctaggttgagcagcacagtcaacctagtcgccgtgctaaacacggagctggaccatgcgctagacgagctgagtagggctcgtgctgagatgtcagagaacaggcgcagaggaggaaggcgtgctcagcaggagcgagccgctcagcaggatgaggtgccccagcaacagcacctgccgcccccgcccccgatgtcgatcgagcagatgtttctgatgcagactcaggcagttcaagccatcgactggctgcgcactgtggagcgggagttgcacactgctcagtgcgatgataaagagaaagtcctgtatggtccccgtctgttgagaggagcagctcaatcatggtgggagtcttacctcgccacccatgcccaccccgacaccatcacctgggaagagttcagaggtagctttcgtcagtaccatgtgcctgcaggtctgatgacagtgaagaaggaggagttcctggccctcaagcaagggtcatcgtctgtcaatgagtaccgggacaggtttctgcagttgtctcgctatgctcctgaagatgtcaacaccgatgccaagcgacagtaccgtttcctgagaggcttggttgaccctctccagtaccaactgatgaatcacaccttcccgacatttcagcacctgattgacagagcaatcatgacggagaggaagcgtaaggagatggaggatcaagtgttatttgatactggagcaacacattctttcattactgcatcatgggtagaagcacataatcttccaattactaccatgtcaacccccattcaaattgactcagccggtggtagaattcgagccgatagcatttgtttgaatataagtgtggaaataagggggatagcgtttcccgccaaccttatagtaatgggtactcagggaatagatgtcatcctgtggatgaattggctagataagtatcaggcagttatcagttgtgataaaaggacaatcaagttggtgtccccactaggagaggaagtggtgaccgagttagtcccgcctgagccaaagaaaggaagttgttatcagatagctgtcgatagcagtgaagcagacccaattgagagtatcaaggttgtgtccgagttcccagatgtgtttccaaaggacttaccgggtatgccaccagagcggaaagttgagtttgccatagagcttcttcctggaaccgcccctatctttaagagagcttacagaatatccagaccagagttggttgaacttaagaagcagattgatgagctgtcagagaaaggttacatccgaccaagcacctcgccttgggccgccgctgtcctatttgtggagaagaaagatgacaccaaaaggatgtgtatcgattatcgagctttgaatgaagtcaccatcaagaacaagtatcccctgcccagaatagaagatctgttcgaccagttgagaggagccagtgtgttctccaagattgatctgaggtcaggtgatcatcagctcagaatccgaccttcggacattccgaagacggcattcattaccaagtatggtttgtatgagttcactatgatgtcttttggtttgaccaatgcgccagccttctttatgaacttgatgaacagtgtattcatggattatctcgacaagtttgtggtggtattcattgatgacattctgatttattctcaaagcgaagaagagcatgcagatcatttgaagatggtattgcagagattgcgagagcaccagttgtatgcaaagttgagcaaatgtgaattctggatcaatgaagtcctgttcttgggtcacataatcaacaaagaaggattggttgtggatccgaagaaagtggcagacattctgaactggaaagcgccaacaaatgcccgaggaatcaagagtttcattggaatggccggatattatcggcgattcattgaagggttttcgaagattgcgaaaccgatgacagcgttgctaggcaacaaactgaaggttcatgagaagagttacccaatccatgacctagagttggcagcagtggttcacgcactgaagacatggaggcattatctgtatggacagaaatgcgatgtttacacagaccacaagagtctgaagtatatattcactcagtcagagttgaatatgaggcagcgaagatggttagagttgatcaaagactatgagttggagattcactaccatccaggcaaagcgaacgtagtggtagatgctttgagcaggaagagtcaagtcaatcttatggtcgctcgtctgatgccttatgagttggccaaggagtttgataggttgagtctcggatttctaaacaattcgcgaggagtcataattgagttggaacctaccctggagcaggaaatcaaagaagcacagaagaatgatgagaagatcagtgagatccggcgactgattctagatggcagaggcaaagattttcgggaagatgcagaaggcgtgatatggttcaaagaccgcttatgtgttcccaatgtccagtctattcgggagttgattctcaaggaagctcatgagacagcctattcgattcaccctggtagtgagaagatgtatcaagatctgaagaagaaattctggtggtacagaatgaagagggaaatcgcagagcatgtggctatgtgcgatagttgtcgaagaattaaggcagagcaccagagaccagctggattgttgcaaccattgcagatccctcagtggaaatgggatgaaatcgtagtggaccgcttgaccaagtcagcccacttcatacctgtcaagaccaactacagcagtgcagtattggcagagttgtatatgtctcggatcatttgtcttcatggtgtgccaaagaagatagtgtcagacagaggaacacagttcacctctcatttctggcagcagttgcatgaagccttgggcacacatctgaattttagttcagcttatcatccgcagacaaatggtcagactgaaaggaccaaccaaatcctcgaagacatgttgagagcctgtgcattgcaagatcagtccggatgggacaagagattgccttatgcagagttttcctataacaacagttaccaggacaatttgaagatgtcaccatttcaggcgctctatggaaggagttgtagaactccgttgcaatgggatcaacctggagaaaagcaggtgtttgggccagacattctacttgaagctgaagagaacatcaagatggtccgagagaatctgaagatagcgcaatcaaggcagcgaagctatgcagacacaagaagaagagagctgagttttgaagtcagagactttgtctatctgaaagtgtcaccgatcagaggagtcagaaggttcggagtcaaaggcaagctagcaccccgctacattggtccataccaaattctctcaaggcgtggagaagtggcctatcagctcagcctaccagagaatctgtccgcagtgcatgatgtttttcatgtgtctcagttgaagaagtgcttgcgtgtgccagaagagcagttgccagtggaaagtctcaaagtccaggaggacttgacctacgttgagaagccagtgcaaatccttgaggttgcagacagagtcacccgaaggaagaccatccgaatgtgcaaagtcagatgtgaaagggaattaggcttacacctggttcctaaataa

SEQ ID NO: 92834 - DNA, 357 bp, Zea mays
  Clone ID: MRT4577_184655C.1
caaacaaaaggaaccaagcttttttttttttatatcagggggtaaaggaggtttttccatgcccgacaggatatctatttatttttttctacagggcaggggacccaaccttattttttttacttactccataggggagagggatttgattggctttctaacacgaacaatttaattaattttaagctccggggggatccgactaactcactaactccttatacacataagggggagccttcctttttttctctcggctctgggggggggataaatatatagaggggggggggggtttttatgctactgctacgggctcgggggtctattaatcaggggccgttgtcgggggatccg

SEQ ID NO: 92835 - DNA, 646 bp, Zea mays
  Clone ID: MRT4577_184656C.1
gggtacctcgaggccggccggggctaccacgtctcccacgaccccgccaaggaccacacgaccgaacccaccactggccgcaagctcaacatcatcgacattcccgctgccaagtcgagctcaaagtcatcctcatccagtgccgaccgcaagtcgcgccgtgtatccaccgcttccatccccaagggccgtggcctcagcccagagcgcatcgtcgcacccaagccccaacgaccacacgagactcgccaagtcatcaacacgcagtacgacaagaccaccttggaggagctcaaccgccgctttgccacccagaagatcgaagagtcatccgacgactccgagtacagctccgacgaagactccgacgttccctcactcaccagccgctccaccaacagctctagcccgtccagtatcagctctggaagctcatgctgcacgtgcgaacgctacggcatcaccccgcgctggtgaccgcgtcaagctcgactgtggtggtgcgcgctgcggatactccgacgactcttccgaatgctcctccgaagacgagtacgtgtacgaggagaagaccaccgccgccagggtgtcgtcatccgcgcctaagcgccttcttctctgcccgcctcccctggacagccatttt

SEQ ID NO: 92836 - DNA, 554 bp, Zea mays
  Clone ID: MRT4577_184657C.1
aaaaaagcttgtacaaaaaaaaaaaaaaaaaaaaaaaaaaaaaaaaaaaaaaaaaaaaaaaaaaaaaaaaaaatgggaaaaaaaaaataaaaaataaaaaaaaaagaaaggtaaaaaaagaaaaaaaaataaaaaaaaaaaatttttttgttggggggggtggggctttgaaaaggggaggatttttattaaattttatataaaattggggtgacatttgagtgtgtttttaagggggcacaatttgggcttttgtaaaaagcttgtattaaaatcaaattggatgggctttttaaaaacatttctcttttggaaaaacttgggttttaacaaaataaaatggctttgaaaaaaattcccttttgttgagttggcttaatggcaaaagggccccccctgttgggctttataaaaattggcgaatttggaatggtaaaaagaacgccccttttaaagttttttaaaccctgggggcggtgggttttactttattcgttccctttaaatttgcaatcgccttattgcccggtctttggtttaattgggggtttttt

SEQ ID NO: 92837 - DNA, 108 bp, Zea mays
  Clone ID: MRT4577_184658C.1
tgtcacgcgttcgtccttgtacatgcctaatctttgggaacatagctacccaagtttatgttcctgattcaaaactgccctaacggaagggatcgaatccacgaagac

SEQ ID NO: 92838 - DNA, 273 bp, Zea mays
  Clone ID: MRT4577_184659C.1
atggacaaaaaaacaataagtgcacttattaaatgtaaacgggttacttaaccatgcatcagaattgtttaggggagtaccaagacacatcccgacccgttcattgttagatcacacctgtgactataaaagccaatacctggaccttcctagcaaatctcacggagcattgctcacctgacaccagacgctcatatggagattcatatacccatgacttagtcaccgacacggagaccggaaacactgcgggggggggtatccgggtagatg

SEQ ID NO: 92839 - DNA, 264 bp, Zea mays
  Clone ID: MRT4577_18465C.1
cgtagcataactggatacggtagcgataccatgacatcaataggaggatagcatgccagcaataggagaacggtcgcaaacgtatatttactcggtttgacttctgtactttaatgttgaataaataagatatataatgtgcaatagccatttctatttttgtttttagcattgagtctgtaaaagttcataaaagataaatctcaaatttattatatatcttctcttcttaaataagattcggatacaaatttagagttttta

SEQ ID NO: 92840 - DNA, 1208 bp, Zea mays
  Clone ID: MRT4577_184660C.1
ggtttgagctgcgtacgtacgtacgttcaggttcttgaacaaggcgtgcttgctccgtgcgaccaaggacgacgcgccctgcaacggctcggacgcggcggcggcggcctccgagcggcacggccacgacgggacgaggctgtgcacggtggaccaggtggagcagctcaagtcggcgatccgcgtcctgccgatctggtcctccaccatcttcctcgcccttgccatgaaccagagcttcgccgttaagcaggccgatgctatggaccggcgcgtcggcgcgggcgggttccgcgttcccagcggctccttggccgtcttcaacatggccaccatgtcgctgtggtcggcctgctacgacaggtgggtcgcgccggcactgcagcggtacacgggcaacccgcacgggctcaccatgaagcagcgcatcggtgggggcctgctcctcgccaccgcgtcgacggctgtctccgcggcggtggagggcgagcggaggcggctggcgcagcccggggtccccatctcggcgttacgcctcgggccgcagttcgcgcttgtggggctcgccgaggcgttcggcgtcatcggggagatcgagttcttgtacaccgagctgcccaagagcatggccagcttcagcatgtcgctgctgtacatggccttcggagtgggcaacctggccggcgccctcatcgtgaaggtggtgcaggtggcgagcgggcaaggggtgggaacgggctggctcgtcgacaacttgaacgtcggccgctacgactattactactggctgctcacgggctacggcgtggcgaacttcgtgtacttcgcttggtgctgctggttgtatggcgaggaggggaagaacgtggagtgggaagaggaggacaacacggagcagccctagtcctgtatggctgggactcctgtgagccctgtagggctgaaacaatgaacttctggaggttgaatgttcaatgcatgtggtagtataaaacatctagttaactttactagcctattagttactgttgtttagacttgtcagggtcaccagcagaggaggtttattagtcttcctacaagtcaatgcataacatcgatactgcgcagtgtgactagaaactcctctgataaatacatgtgtgtgcagtctaaaacaaaacaaacaaaaaaaagggcagccgctcgcgatctataacttgtcggac

SEQ ID NO: 92841 - DNA, 192 bp, Zea mays
  Clone ID: MRT4577_184661C.1
cccgggttcctccattcacgtcgtcttttttttacttttcagaaagcgggcggcggggctcgattatacgtcccataaacaactgggaggtccatcgcaaatccaacctgcaaaggctgaatacaaatattatttcttgcacgacgtcataaggcatgccgaaactaggctacagagagcactttttttttt

SEQ ID NO: 92842 - DNA, 890 bp, Zea mays
  unsure (1)..(890): unsure at all n locations
  Clone ID: MRT4577_184662C.1
cattgggtacctcgaggccggccggggatggctatggtctcgctcgcgtcagagctgggccgcgccgcgccgcgccacggcgtccctgggtttttgtttgccgcggttcggtggtccagcggaatcccgcgcattcaatgcaaggatcggagggcatgtcgacggccgctgattggccgggatcggtcgatccacttcagctcggcgcgatctcatgagtagcgactgtgcgagtgatgcgacgcgcctcgtgtgtgccggggcggggcggggaccggcgcggcggcgctggtggtggcggactggcgggcgccgccgccatcctcttcgaacggctgcggtcgtgcacatgcggtgtcggctcggccccgtcctcggacgccgagatgtggtcacgctttccttgcattgaagctagaggattcatctttgggccagccattgcgctagccataggagcaaagttcataccactacgtaaacctaagaagcttccaggtgaggtattttctgaaagttatgtacttgagtatgggatggattgtttggagatgcatgttggagctattgaacccggggagcgcgtagtggttgtcgatgatttggttgcaactggtggaactctttctgcagcaataagacttctcgagcgcgcaggagctaacgtggttgagtgtgcatgcctcattgggcttcccaagtttaaggatttctataagctcaacgggaaaccggtttacatccctggtggagtcccgcaaataggacgcagtaaatggtcagacnagtaaatgctctcaagctccctttatacttgaagctttctctcacatttcatttcgacatatcatgaaattacaagctatgcatgttcgcagaatcgagctttg

SEQ ID NO: 92843 - DNA, 194 bp, Zea mays
  unsure (1)..(194): unsure at all n locations
  Clone ID: MRT4577_184663C.1
agccttccgggaactcctaaaccttaaatctaaaaatagctggggattgagtttgcattgcatcgggtttttgccggtctaccaggggactataaaaatatgggaataaccaataacccatgggggtaaaaaaaaaaaaactaaaaatgaccgcactcggaatgataacagacaacaccaactaaattnanttt

SEQ ID NO: 92844 - DNA, 351 bp, Zea mays
  Clone ID: MRT4577_184664C.1
aacattaaaatctggaaagggaactttttatttggggggggccacatacataatccaaaaaactttattatggaattacatctaataaccaatctaaaagagggcccccccaatgatgggttgttggaaggaggctgttgggtttgccaaaccaagggggacaaagggcaacaattgttgtatttgaaaaaggggggcggggttacccccaaactgctgggaaaacggcaccaactggtgttgtgtcaaaaaggaaacccggcttgctgaacctagctggctaaaggggactaatattggttgctgaaaaaaaccgcgggggtccacggcggccacttggttaaatggaaa

SEQ ID NO: 92845 - DNA, 864 bp, Zea mays
  Clone ID: MRT4577_184665C.1
cattgggtacctcgaggccggccgggtatagctttcactatgctatgctatcaagtggtatcaaagaagaagagatcgataattgctgtagaatgtttgcgaatggtgatgacctactcctagcagtgcatcctgattttgagtccattttagataaatttcagaatcactttgggaatcttgggctgaacttcgaattcacatcacgaacacgagacaaatccgaactgtggttcatgtccacaagaggcatcaagtatgaaggaatttacataccaaaacttgaaaaagaaagaatagtcgccatacttgaatgggatcgatcaaacttgcctgaacatagattggaagctgtatgtgcagcgatggttgaggcctggggatattccgatcttgttcatgagatacgaaagttttatgcgtggcttctggagatgcaaccttttgcaaatctcgcaaaagaagggttggccccatatattgccgagacagcactccgcaatctttatcttggaacgggcatcaaagaggaagagattgaaaaatattttaaacaatttattaaggatcttcctggatacatagaagattacaatgaagatgtattccatcagtcgggaaccgttgatgcaggtgcacaaggcagcagtggaagccaaggaacagcaccaccagcaacaggtagtggagcaaaaccagccacctcaggggcaggatctggtagtggcacaggagctggaactggtgcaactggaggtcaagcaggggctggcagtggcgctgggacgggatctggagcaaccggaggccagtcagaatctgggagtggcactggacaggttggcacgggttcagcaggaacta

SEQ ID NO: 92846 - DNA, 231 bp, Zea mays
  Clone ID: MRT4577_184666C.1
ccttgttggtttttttttaagaagtccgggaaccaaaacccaaccggaacggggtttaaaattaaagcaaattaactctgggtctggtacattcgacttgaatgggatccaaaaaatctcacggcattttccctggccacccaaagcaaacattttgccttggataaaataggctggggcattgcccaagccccaccattgccaggcccccaggggaaggactgttcggaa

SEQ ID NO: 92847 - DNA, 2570 bp, Zea mays
  Clone ID: MRT4577_184667C.1
cgatttatattggcgaaatcaattacgatatatttgacaaagctgtgcaacgagtcataagtattctcagaagggttggcatgcaacaatgcgtttacgttacggacgaagaagaaatttttaaatcacttaatttaaacgcagcggttggagcattgtacacaggaaagaagaaagattactttgcgagcttcacaaatgaggataaagaagaaattgtaatgaggtcctgtgaacgcatttaccatggacagcttggagtttggaatggatcacttaaagccgaaatcaggccgattgagaaaaccatgttaaacaagacacgaactttcacagcagcaccattggaaactctgctcggaggaaaagtgtgcgttgacgactttaacaatcaattctattcacatcatttggaaggcccatggactgttggaataacaaagttttacgggggctggaatcgtctgcttgagaagttaccagaagggtggatttactgtgatgctgatggatcccaatttgatagctcactaacaccataccttataaatgcagtattgaatattcggctacagtttatggaggattgggatataggagcacaaatgcttaaaaacctctacactgagattgtctacacaccaattgcaacaccagacgggtctattgtgaagaaattcaaaggaaataatagcggacaaccctctacagtagttgacaacacattgatggttataatagctttcaattatgctatgttatcaagtggtatcagagaagaagagattgataactgctgtagaatgttcgcaaatggtgacgacttactcctagcagtgcaccctaattttgagtatatcttggatgaatttcaaaaccactttggaaatctcggattgaatttcgaatttacatcacgaacacgagataaatctgaattgtggtttatgtccacaagaggtatcaagtgtgaaggaatttacatacccaagctcgagaaagaaagaatagtagcaattctggaatgggatcggtcgaatttacctgagcacagattagaagccatttgcgcagctatggttgaggcatggggttatccagacttagttcatgaaattcggaaattttatgcatggctcctggaaatgcaacccttcgcaaaccttgcaagggagggcatggcaccatatatagcagagacagcactccgtaacctttatcttggagtaggcatcaaagaggaagaaattgaaaagtattttaagcaatttattaaggatctacctggatatatagaagattacaatgaggaggtcactcatcaatcaggcactgttgatgcaggagcacaaggtagtagtggagctcaaggaaatacaccaccaactacaggtggggcggcgaaaccagcaacttcaggagcaggatctggtagtggtgcaggaactggatctggagcaactggaggtcagtcaggaactggtagtggctccggaactgggtctggggcaaccggaggtcagtcagggtctggtagcggcactgggcgaacagacacaggctcagcagggactggcgcaacaggaggccaaagagataaagacgtagatgcaggcaccacggggaaaatcactgtgccaaaactgaaagccatgtcaaagaaaatgcgtttaccaagagctagaggaaaggatgtcttgcaccttgacttcctgttaacttacaaaccacaacagcaagacatatcaaacacacgagcaactaaggaagaattcgatagatggtacgacgccataaagaaggagtatgagattgacgatacacaaatgacagtcgtcatgagcggtcttatggtatggtgcatcgaaaacggttgctcaccaaacataaacgggaattggacaatgatggacggggatgaacagagggtcttcccactcaaaccagtaattgaaaatgcatctccaactttccgacaaattatgcatcattttagtgatgcagctgaagcgtacatagagtatagaaactccactgaacggtatatgccaagatacggacttcagcgtaatctcaccgactatagcttagcacggtatgcatttgatttctatgaaatgacttcacgcacacctgctagagctaaagaagcccacatgcagatgaaagccgcagcggttcgtggttcaaacacacggctgttcggtctggacggaaatgtcggtgagacccaggagaatacagagagacacacagctggcgacgttagtcgtaatatgcactctctgttgggagtgcagcaacaccactagtctcctggaaaccctgtttgcagtacctataatatgtactaatatatagtgtctcagtgaggttttacctcgtctttactattttattatgtatgtatttaaagcgtgaaccagtctgcagcacacagggttggacccagtgtgttctggtgtagcgtgtactagcgtcgagccatgagatggactgcactgggtgtggctatgccacttgtgttgcgagtctcctggtaagagacaaaaaaaaaaaacaaccaaccc

SEQ ID NO: 92848 - DNA, 1814 bp, Zea mays
  Clone ID: MRT4577_184668C.1
tttttttttttttttttttttttttttttttttttttttttgtctctcaccaggagactcgcaacacaagtggcaaagccacacccagtgcagtccatctcatggttcgacgctagtacacgctacaccagaacacactgggtccaaccctgtatgctgcagactggttcacgctttaaatacatacgtaataaaatagcaaagacgaggtaaaacctcactaagatactatatattagtacatattataggtactgcaaacagggtttccaggagactagtggtgttgctgcactcccaacagagagtgcatattgcgactaacgtcgccagctgtgtgtctctctgtattctcctgggtctcgccgacatttccgtccaaaccaaacagtcgtgtgtttgaaccacgaaccgctgcggctttcatctgcatgtgggcttctttagctctagcaggtgtgcgtgaagtcatttcgtagaaatcaaatgcatatcgtgctaagctatagtcggtgagattgcgctgaagtccgtatcttggcatgtatcgctcagtagagttcctgtactctatatacgcttcagctgcatcactaaaatgatgcataatttgtcggaaagttggagatgcattttcaatgaccggtttgagtggaaaaaccctttgttcatctccatccatcattgtccaatttccgtttatgtttggtgagcaaccattttcgatgcaccataccataagaccactcatgacaactgtcatttgtgtgtcatcaatttcgtattccttctttatggcatcataccatctatcaaactcttccttcgttgccctagtgtttgatatgtcttgttgttgtggtttgtatgtcaatagaaaatccaaatgtagcacatcttttgccttttgctttaggtaagcgcattttctttgacatggccttgagctttggtacagaaatttttcctgttgaacctgcatccacatctctatctctttggcttcctgttgcactaggttcctgctgaacccgtgccattctgcccagtaccacttccagatcctgattggcctccggttgctccagatcccgtcccagcgccactgctagcccctgcttgacctccagttacaccagttccagttcctgtgccactaccagatcctgcccctgaggtggctggttttgctccactacctgttgctggtggtgtcgttccttggcttccactgccgccttgcgcacctgcatcaacagttcccgactgatggaatacatcttcattgtaatcttctatgtatccaggaagatccttaatgaattgtttaaaatacttctcaatttcttcctctttgatgcccgttccaagataaagattgcggagtgctgtctcagcaatgtatggggctaatccttcttttgcgagatttgcaaaaggttgcatctctagaagccacgcatagaatttccgtatctcatgaacaagatcaggatatccccaggcctcaaccatcgctgcgcatatgggcttctaacctatgttcaggcaagtttgatcgatcccattcaagtatggcgactattctttctttctcaagctttggtatataaatcccttcatacttgatgcctcttgtggacatgaaccacaattcggatttgtctcgtgttcgtgatgtaaattcgaagttcaacccaaggtttccaaagtgattctgaaattcatctaaaatgaactcaaaatcgggatgcactgctagaagtaggtcatcaccattcgcaaacattctacagcaattatcctcgtgcccc

SEQ ID NO: 92849 - DNA, 1584 bp, Zea mays
  Clone ID: MRT4577_184669C.1
caagtacgaaggaatttacataccaaagcttgaaaaagaaagaataggggccatacttgaatgggatcgatcaaatttgcccgaacataggttggaagctatatgtgcagcgatgattgaggcctggggatattctgatcttattcatgagatacgaaagttctatgcgtggcttttggagatgcaaccttttgcaaatctcgcaaaagaagggttagccccatatattgccgagacagcactccgcaatctctatctcggaacgggcatcaaagaggaggaaattgaaaaatattttaaacaattcattaaggatcttcctggatacatagaagattacaatgaagatgtattccatcagtcgggaactgttgatgcaggtgcacaaggcggcagtggaagccaaggaacgacaccaccagcaacaggtagtggagcaaaaccagccacctcaggggcaggatctggtagtggcacaggagctggaactggtgtaactggaggtcaagcaggggctagcagtggcgctgggacgggatctggagcgaccggaggccaatcaggatctggaagtggtactgggcagaatggcacgggttcagcaggaactagtgcaacaggaagccaaagagatagggatgtggatgcaggttcaacaggaaaaatttctgtaccaaagctcaaggccatgtcaaagaaaatgcgcttacctaaagcaaaaggaaaagatgtgctacatttggattttctattgacatacaaaccacaacaacaagacatatcaaacactagagcaaccaaggaagagtttgataggtggtatgatgccataaagaaggaatacgaaattgatgacacacaaatgacagttgtcatgagtggtcttatggtatggtgcatcgaaaatggttgctcaccaaacataaacggaaattggacaatgatggatggagatgaacaaagggtttttccactcaaaccggttattgagaatgcatccccaactttccgacaaattatgcatcattttagtgatgcagctgaagcgtacatagagtacagaaactctactgagcgatatatgccaagatacggacttcagcgtaatctcaccgactacagcttagcacggtatgcatttgatttctatgaaatgacttcacgcacacctgctagagctaaagaagcccacatgcagatgaaagccgcagcagttcgtggttctaacacacgattgttcggtttggacggaaatgtcggcgagacccaggagaatacagagagacacacagctggcgacgttagtcgcaacatgcactctctgttgggagtgcagcagcaccactagtctcctggaaaccctgtttgcagtaccaataatatgtactaatatatagtattttagtgaggttttacctcgtctttactattttattacgtatatatttaaagcgttgaccagtctgcagcatacagggttggacccagtgtgttctggtgtagcgtgtactagcgtccagccatgagatggactgcactgggtgtggctttgccacttgtgtcgcgagtctcctggtaagagac

SEQ ID NO: 92850 - DNA, 692 bp, Zea mays
  unsure (1)..(692): unsure at all n locations
  Clone ID: MRT4577_18466C.1
agtctagcaggagagaagagatcgcccgaaccctaaccctaccagcacctcccgtcgccggctgagatggcgatggacgcggagcggcggcaggcggagctgatcgagcagttttcggcgcaggcggcggcgctctcctcggctcctcagctggcggcgctcgtgctcgaggccacctcccacccggcgctctttgccttctccgagctcctcacccttccagccctctccaagctaacgggcacgcagtacgcctcgtcgctggacctgctccgcctcttcgcctacggcaccctcaaggactacaagagtaattctagcgccctccctgcattgttgcctgatcaagcccggaagctgaagcaactcagtgtgctaactttggctgagtcaaccaaggtacttccatatgatcagctcatgcaagagctagacgtttccaatgtgagagaacttgaagatttcctcatcaatgagtgcatgtactcaggtattgtcagaggcaagttggacanactgcggcgntgctttgaagtacaatttgcagctggaagggacctcacacatgatcagctaaccaacatgattgagaccttgtctggactggttgggaacatcagataatttattacaccaaattcaggagaaaatcaagtgggcggatacaacaagtgaatcgaacaagaagcacc

SEQ ID NO: 92851 - DNA, 1451 bp, Zea mays
  unsure (1)..(1451): unsure at all n locations
  Clone ID: MRT4577_184670C.1
tcgaggccggccgggctccaactcccgccagaaccctcgatttccctttttttccccttgcccaggaccaggagcaagatccatccatccatccccgattccccaaccctaagcagccatggccgcgccgccgcccacgggctgcttcaagtgtggccgccccggccactggtcccgcgactgcccctcctccgcctccaccaaccctcctgccgccgccgacgcgcccaccaaccctagccacctctccggcgccgcctcccgcttcaacgccaagcccaggccccccgcggcggcggtggatggcgaggacggcaaggggaagaagaagaaggagagggccacgcgccccaagctcacgccggacctgctcctctccgacggcggcatcggcttcgtgctccgctacttccccaaggcgttcaagccccgcgcccgcccaggccacgaggtggacgacctcgccaacctcatcaagctctacgcggactggcactcccgcctgatcccctactactccttcgaacagttcgtgcgcaaactcgagaaattgggtgccggcaaccgcgtcaggagatgtgtttccgaactcagggatagggtcgccagaggcggtgatcctacgcttctgcacgaaccgccagtccacgaagacatgccattgccaggcggaggtgaacatggtactgaagacccagttctcggcaccgatgctccgctgtcggacaaccatggcactggccccgtggtgcaggaagacgcagatccaccgatggagagcaacgacgtggtggatcccatggaagaggatctgcttaacgaaatctacgaaaacacagctgatatcccggctggtgagggagccagcaaggagtctccggagcagtcggctccaaaagaagccaactcgctggcgcaggaaccccaggacggcgacgtccccaagccggcgaaggttgagctcactgaggcgcagaaggcacgcatggaggccaacaggctcaaggccttggagagagcggcggcacgggctcgtgcctcgcagcagcccacctagatacgcaagatgctgctgtcttcacttcacttcaatagttggttggttggttgagatgatgcatcattctgtggtgtgtcattgacaaggacacgtagttcgctggtgtctgattgaatctgggtctgctctagtcgatttggtccctagtagtatgtaacaggagaagataagagtttgttggatgtgcttgaaagcttcgtcctgttctcgcttccccaaccattctagagtcagaattccatgtcattcaagctgatcttctcattcatcgttttgctgcatagtgcgtcttggtccaattgtcttcatttaggttctagtttgagaaccctattttttcaatggatttttatttttacaagaaaaaaatagntnnntcattnnttccccc

SEQ ID NO: 92852 - DNA, 137 bp, Zea mays
  Clone ID: MRT4577_184671C.1
acgtccaaactgttttatgacacgactgaaggatacattgcatgatacgacaatcacggattggcatgactaaagaatcttatagtcttgtgaagctgaaacgaataccatttgccggtttgaaaacaatccaagat

SEQ ID NO: 92853 - DNA, 5658 bp, Zea mays
  Clone ID: MRT4577_184672C.1
atgaggctggttatgattatgcttatggtaatgatggctcgacttagacacactgcacgaaagtctgtcatccccttcttaccctcccgccttgctgagcgtccgcttcgccgtcccgtggccggacagtccagccacttggagagactgcaccaccgcctgcatgaggagcaggaacgtcgacgacaggggcagcagggctcttctttctcgctccagcaggagatagagtctgtgaggagctgctctcctgtgcttcccctggaggcgccccctgcaccaccactgggcgccccagcttctggagtagctgctggaggagacctagacgacggagatgacgacgacagcctgagccacgacactgacttccctgctgaccatgagccggaaggatgggttgctcgacccatcactcgcgacgctgctcgcgggtgtcacttccatgatgcgctcgataccctgctacgtcgggcacttgaccgacgtacttggtccatcgagtatcgctgtgtggtctaccagcatagtcgcggggtctacccgtaccgttgggaggcgacctgtttggtgcgccgtccggagaacagtctccagggcgcggaggcttgctcagagcactattctatctctgagcgggactcagctgaggcagccatgcaagatgctgcacgacgtgcgctttcgcactactgcttggttttcggtggggtagctgacggtcttgacctgaagtattacccccgccgtccatctggcagcacaggaggcgtgattgtctcacctgtcggtgagggcaatcctaggttgagcagcacagtcaacctagccgtcgtgctaaacacggagctggaccatgcactagacgagctgagtagggctcgtgctgagatcgccctgctgcgggctgagcgcgcggaacgtcgtcacctggatgatggttcccccgctcccgttgggactcagcacccgtaccgctcacctcggcgtggacgccagtcttatgacaatcccgacttgctgttgaagaattctatactcttttcttatgctgcaagagttgccagatcagttctgatgtgtggttgcgttctgcagatgtcagagaacagacgcagaggaggaaggcgtgctcagcaggagcgagccgctccgcaggatgaggtgccccaacagcagcacctgccgcccccgcccccgatgtccatcgagcaaatgtttctgatgcagactcaggcagttcaagccatcggtcggaccttggccgccattcagcagcagcagcaacagcagcaggcaccacctcagcctcagatgcctcagatgcccagagataagcgtgctgaattcatgagaggtcatccaccaacgttcgctcattcttctgaccccatggatgctgaagactggctgcgcactgtggagcgggagttgcataccgctcagtgcgatgacagggagaaagttctgtatggtccccgtctgttgagaggagcagcccaatcatggtgggagtcttacctcgccacccatgccaatcctgacgccatcacttgggaagagttcaaaggaagcttccgtcagtaccatgttcctgcaggtctgatgacagtgaagaaagaggagttcctggctctcaagcaagggtcatcgtctgtcagtgaataccgggacatatttctgcagctgtctcgttatgctcctgaagatgtcaacaccgacgccaagcgacagtaccgtttcctgagaggcttggttgaccctctgcactatcagctgatgaatcacaccttcccgacattccagcacctgattgacagagcaatcatgacagagaggaagcgtaaggagatggaggatcgtaagcgcaagatcagtggaccccagcctggaagcagcagccgccctcgtttctcaggcaatcaacctcagcagtccaggcagaaccagcgtccacctcagcagcatcagcagtcccaaaggcagtaccctcagcatcagtaccagaaccgtcagaacaatcagtcaggaggtcagtttcagaggcagaatcagcaggcacctcgtcttcctgccccagcaagccagcagaacaatcaggcagcaccagctcaggttggaaacagagcatgttttcactgtggagagcaaggccactgggtgatgcaatgtccgaagaaggcagcccagcagcagtcaggccctaatgccccagcaaagcagaatgtgcctcagcctggagcaggcaatcgctctcagtcgcgttataatcatgggagactgaaccacttggaggctgaagcagttcaggagacccccggcatgatagtaggtatgttcccagtcaactcccgtattgcagaagtgttatttgatactggagcaacgcattctttcattactgcatcatgggtagaagcacataatcttccaattactaccatgtcaacccccattcaaattgactcagccggtggtagaattcgaaccgatagcatttgtttgaatataagcgtggaaataagggggatagcgtttcccgccaaccttatagtaatgggtactcagggaatagatgtcatcctagggatgaattggctagataagtatcaggcagttatcagttgtgataaaaggacaatcaagttggtgtccccactaggagaggaagtggtgaccgagttagtcccgcctgagccaaagaagggaagttgttatcagatggctgtcgatagcagtgaagcagatccaattgagagtatcaaggttgtgtccgagttcccggatgtgtttcaaaaggacttaccgggtatgccaccagagcggaaagttgaatttgccatagagcttcttcctggaaccgcccctatctttaagagagcttacagaatacctggaccagagttggttgaacttaagaagcaaatcgatgagttgtcagagaaaggttacatccggccaagcacctcgccttgggccgcccctgtcttgttcgtggaaaagaaagatggcaccaaaaggatgtgtatcgattatcgagctttgaatgaagtcacgatcaagaacaagtatcccttgcccagaatagaagatctgttcgaccagttgagaggagccagtgtgttctccaagattgacctgaggtcaggttatcatcagctcaggatccgaccttcggacattccgaagacgacattcattaccaagtatggtttgtatgagttcacagtgatgtcttttggtttgaccaatgcaccagcgtttttcatgaacttgatgaatagtgtattcatggattatcttgataagttcgtggtggtattcattgatgacattctggtttattctcaaagcgaagaaaaacatgcagatcatttgaggatggtattgcagagattgcgagagcaccagttgtatgcaaagttgagcaaatgtgagttctggatcagtgaagtcctattcttgggtcacataatcaacaaagaaggattggcggtggatccgaagaaagtggcagacattctgaactggaaagcgccaacggatgctcgaggaatcaagagcttcattggaatggccggatattatcgtcgattcattgaagggttttcgaagattgcgaaacctatgacagcgttgctaggcaacaaagttgagttcaagtggaccaagaaatgccaggaggccttcgaagcgctgaaagagaagttgactacagcgcctgtcctagtcttgcctgatgtgcacaagcccttctcggtgtattgtgatgcttgttacacaggtttgggatgtgtgttgacgcaagagggaagagttgtggcctactcgtcccgacagctgaaggttcatgagcagaattacccaatccatgatctagagttggcagcagtggttcacgcactgaagacatggaggcactatctgtatggacagaaatgcgatgtttacacagaccacaagagtctgaagtacatattcactcagtcagagttgaacatgaggcagcgaagatggttagagttgatcaaagactatgagttggagatccattaccatccaggcaaagcaaacgtagtggcagatgctttgagcaggaagagtcaagtcaatctgatggtcgctcgtctgatgccttatgagttggccaaggagttcgacaggttgagtctcggatttctgaacaattcgcgaggagtcacagttgagttggaacctaccttggagcgagaaatcaaagaagcgcagaagaatgatgagaagatcagtgagatccggcgactgattctagatggcagaggcaaagattttcgagaagatgcagaaggcgtgatatggttcaaagaccgcttttgtgttcccaatgtccagtctattcgggagttgatccttaaggaagctcatgagacagcttattcgattcaccctggtagtgagaagatgtatcaggatctgaagaagaaattctggtggtacggaatgaagagggaaatcgcagagtatgtggctatgtgtgatagttgtcgacggatcaaggcagagcaccaaagatcagctggattgttgcaaccgttgcagatccctcagtggaaatgggatgaaattggtatggatttcatagtcggattgcctcgcactcgagccggctacgattccatttgggtagtagtggaccgtttaaccaagtcagcccacttcatacctgtcaagaccaactacagcagtgtagtattggcagaactgtatatgtctcggatcgtttgtcttcatggtgtgccaaagaaaatagtgtcagacagaggaacgcagttcacctctcatttctggcagcagttgcatgaagctttgggcacacatctgaatttcagttcagcttatcatccgcagacagatggtcagactgaaaggaccaatcaaattcttgaagatatgttgagagcctgtgcgttgcaagatcagtccggatgggataagagattgccttatgcagagttttcctataacaacagttaccaggccagtttgaagatgtcaccatttcaggcgctttatggaaggagttgtaggactccgttgcactgggatcagcctggagaaaagcaagtgtttgggccagacattctacttgaagccgaagagaacatcaagatggttcgagagaatctgaagatagcgcaatcgagacagcgaagctatgcagacacaagaagaagagagctgagttttgaagtcagagactttgtctatctgaaagtgtcaccgatcagaggagtcagaagattcggagtcaaaggcaagttagcaccccgctacattggtccgtatcagattcttgcaagacgtggagaagtggcctatcagctcagtctgccagagaacttgtccgcagtgcatgatttttttcatgtgtctcagttgaagaagtgcttgcgtgtgccagaagagcagttgctagtggaaggtcttgaagtccaggaggacttgacctacgttgagaagccagcgcaaatccttgaggttgcagacagagtcacccaaaggaagaccatcagaatgtgcaaggttaaatggaagcatcactctgaggaagaagcaacctgggagcgtgaagatgatctgatggctaaataccctgagctctttgctagccaaccctga

SEQ ID NO: 92854 - DNA, 4407 bp, Zea mays
  Clone ID: MRT4577_184673C.1
atgtcagagaacaggcgcagaggaggaaggcgtgctcagcaggagcaagccggtcagcaagatgaggcgccccagcagcagcacctgccgcccccgcccccgatgtccattgagcagatgtttctgatgcagactcaggcagttcaagccatcgattggctgcgcactgtggagcgggagttgcataccgctcagtgcgatgacagggagaaagtcttgtatggtccccgtctgttgagaggagcagcccaatcatggtgggagtcttacctcgccacccatgccaaccccgacaccatcacttgggaagagttcagaggtagctttcgtcagtaccatgttcctgcgggtctgatgacagtgaagaaggaggagttcctggcccttaagcaagggccattgtctgtcagtgagtaccgggacaagtttctgcaattgtctcgctatgctcctgaagatgtcaacaccgatgccaagcggcagtaccgtttcctgagaggcttggttgaccctctgcagtatcagctgatgaatcacaccttcccgacattccagcacctgattgatagagcaatcatgacggagagaaagcgcaaggagatggaagatcgtaagcgcaagatcagtggaccccagcctggaagcagcagccgccctcgtttctcaggcaatcaacctcagcagttcaggcagaaccagcgtccacctcagcagcatcagcagtttcaaaggcagtaccctcagaatcagtaccagaaccgtcagagcaatcagtcaggaggtcagtttcagaagcagaatcagcaagcacctcgtcttcctgccccagcaaatcagcagaacagtcaggcagcaccagctcaggttggaaacatggcatgtttccactgtggagagcaaggccattgggtgatgcaatgtccgaagaaggcagcccagcagcagtcaggccccaatgccccaacaaagcagaatgtgcctcagcctggagcaggcaatcgctctcagccgcgctataatcatggaagactgaaccacttggaagctgaagcagttcaggagacccccgacatgatagtaggtatgttcccagtcgactcccatattgcagaagtgttatttgatactggagcaacgcattctttcattactgcatcatgggtagaagcacataatcttccaattactaccatgtcgacccctattcaaattgactcagccggtggtagaattcgagctgatagcatttgtttaaatgtaagtgtggaaataagggggatagcatttcccgccaaccttatagtaatgggtactcagggaatagatgtcatcctagggatgaattggttagataagtatcaggcagttatcagttgtgataaaaggacaatcaagttggtgtccccactaggagaggaagtggtgaccgagttagtcccgcctgagccaaagaaaggaagttgttatcagatggctgtcgatagcagtgaagcagacccaattgagagtatcaaggttgtgtctgaattcccagatgtgtttccaaaggatttaccgggtatgccaccagagcggaaagtcgaatttgctatagagcttcttcctggaaccgcccccatctctaagagagcttacagaatatctggaccagagttggttgagcttaagaagcagattgatgagctgtcagagaaaggttacatccggccaagcacctcgccttgggccgcccctgtcttgtttgtggaaaagaaagatggcaccaagaggatgtgcatcgattatcgagctttgaatgaggtcacgatcaagaacaagtatcccttgcccaggattgaagatctgttcgaccagttgagaggagccagtgtgttctccaagattgatctgaggtcaggttatcatcagctcaggatccgaccttcggacattccgaagacggcattcattaccaagtatggtttatacgagttcacagtgatgtcttttggtttgaccaatgcaccagcatttttcatgaacttgatgaacagtgtattcatggattaccttgataagtttgtggtggtattcattgatgacattctgatttattctcaaagcgaagaagagcatgcagatcatttgaagatggtgttgcagagattgcgagagcaccagttgtatgcaaagttgagcaagtgtgagttctggatcagtgaagtcctgttcttgggtcacataatcaacaaagaaggattggctgtggatccgaagaaagtggcagacattctaaactggaaagcgccaacggatgctcgaggaatcaagagcttcattggaatggccggatattatcggcgattcattgaagggttttcgaagattgcgaaaccaatgacagcgttgctaggcaacaaggttgagttcaagtggacccagaaatgccaagaggcctttgaagcgctgaaagagaagttgacaacagcgcctgtcctagtcttgcctgatgtgcacaagcccttctcggtgtattgcgatgcttgttacacaggtttgggatgtgtgttgatgcaagagggaagagttgtggcttactcgtcccgacagttgaaggttcatgagaagaattacccaatccatgatctagagttggcagcagtggttcacgcactgaagacatggaggcactatctgtatgggcagaaatgcgatgtttacacagaccacaagagtctgaagtacatattcactcagtcagaattgaacatgaggcaacgaagatggttagaattgatcaaagactatgagttggagattcattaccatccaggaaaagcgaacgtagtggcagatgctttgagcagaaagagtcaagtcaatctgatggtcgctcgtccgatgccttatgagttggccaaagagtttgacaggttgagcctcgggtttctgaacaattcgcgaggagtcacagttgaattggaacctaccttggagcgcgaaatcaaagaagcgcagaaaaatgatgagaagatcagtgagattcggcgattgattctagatggcagaggcaaagactttcgagaagatgcagaaggcgtgatatggttcaaagaccgcttgtgtgttcccaatgtccagtctattcgggagttgattcttaaggaagctcatgagacagcttattcgattcaccctggcagtgagaaaatgtatcaggatctgaagaagaaattctggtggtacggaatgaaaagagaaatcgcagagcatgtggctatgtgcgatagttgtcgaagaattaaggcagaacaccagagaccagctggattgttgcaaccgttgcagatccctcagtggaaatgggatgaaattggtatggatttcatagtcggattgcctcgcacccgagccggctacgattccatttgggtagtagtggaccgtttgaccaagtcagcccacttcatacctgtcaagaccaactacaacagtgcagtattggcagaattgtatatgtctcggatcgttagtcttcatggtgtgccaaagaagatagtgtcagacagaggaacgcagttcacctctcatttctggcagcagttgcatgaagccttgggcacgcatctgaatttcagttcagcttatcacccgcagacagatggtcagactgaaagaaccaatcaaattcttgaagatatgttgagagcctgtgcgttgcaagatcagtccggatgggacaagcgattgccttatgcagaattttcctataacaacagttaccaggccagtttgaagatgtcaccgtttcaagcgctgtatggaaggagttgcagaactccgttgcaatgggatcagcctggagagaagcaggtgtttgggccagatattttgctcgaagccgaagagaacatcaagatggttcgagagaatctgaagatagcgcaatcgaggcagcgaagctatgcagacacaagaagaagagagctgagtttcgaagtcggagactttgtctatctgaaagtgtcaccgatcagaggagtcagaagattcggagtgaaaggcaagctagcaccccgctacattggtccgtatcaaattctctcaaagcgtggagaagtggcttatcagctcagcctgccagagaatttgtctgctgtgcatgatgtctttcatgtgtctcaattgaagaagtgtttgcgtgtgccagaagagcagttgccagtggaaggtcttgaagtccaggaggacttgacctatattgagaagccagctcagatccttgaggttgcagatagagtcacccgaaggaagaccgtcagaatgtgcaaagtcagatggagtcaccactctgaggaagaagcaacctgggagcgtgaagatgatctgatggccaagtacccggagctctttgctagccagccctga

SEQ ID NO: 92855 - DNA, 4200 bp, Zea mays
  Clone ID: MRT4577_184674C.1
atgtcgatcgagcagatgtttctgatgcagactcaggcagttcaagccatcggtcagactctggcaggcattcagcagcagcagcaacagcagcaggccccacctcagcctcagatgcctcagatgctcagagacaagcgtggtctgatgacagtgaagaaggaggagttcttggcccttaagcaagggtcatcatctgtcaacgagtaccgagacaggtttctgcagttgtctcgctatgctcctgaagatgtcaacaccgacgccaagcggcagtaccgtttcctgagaggcttggttgaccctctgcagtaccaactgatgaatcacaccttcccgacatttcagcacctgattgacagagtaatcatgacggagaggaagcgtaaggagatggaggatcgtaagcgcaagatcagtggaccccagcctagaagcaacagccgccctcgcttctcaggcaatcaacctcagcagttcaggcagaaccagcgtccacctcagcagcatcagcagtttcaaaggcagtatcctcagcatcagtaccagaaccgtcagagcaatcagtcaggaggtcagtttcagaggcagaatcagcaagcacctcatcttcctgccccagcaaaccagcaaaacaatcaggcagcaccagctcaggttggaaacagagcatgtttccactgtggagagcaaggccactgggtgatgcaatgtccgaagaaggcagcccagcagcagtcaggccccaatgccccagcaaagcagaatgtgcctcagcctggagcaggcaaccgctctcagccgcgttacaatcatggaagactgaaccacttggaggctgaagcagctcaggagacccccggcatgatagtaggtatgttcccagtcgactcccatattgcagaagtgttatttgatactggagcaatgcattctttcattactgcattatgggtagaagcacataatcttccaattactaccatgtcaacccccattcaaattgactcggccggtggtagaattcgagctgatagcatctgtttgaatgtaagtgtggaaataagggggatagcgtttcccgctaaccttataataatgggtactcagggaatagatgtcatcctagggatgaattggctagataagtaccaggcggttatcagttgtgataaaaggaccatcaagttggtgtccccactaggagaggaagtggtgaccgagttagtcccgcctgagccaaagaaaggaagttgttatcagatggctgtcgatagcagtgaagcagacccaattgagaggatcaaggttgtgtctgagttcccagatgtgtttccaaaggacttaccgggtatgccaccagagcggaaagttgagtttgccatagagcttcttcctggaaccgcccccatctttaagagagcctacagaatatctggaccagagttggttgaacttaagaagcaaattgatgagctgtcagagaaaggttacatccggccaagcacctcgccttgggccgcccctgtcctatttgtggagaagaaagatggcaccaaaaggatgtgtatagattatcgagctttgaatgaagtcacgatcaagaacaagtatcccttgcccagaatagaagatctgttcgaccagttgagaggagccagtgtgttctccaagattgatctgaggtcaggttatcatcagctcaggatccgaccgtcggacattccgaaaacggcattcattaccaagtatggtttgtatgagttcacagtgatgtcttttggtttgaccaatgcgccagcattcttcatgaacttgatgaatagtgtattcatggattaccttgataagtttgtggtggtattcattgacgacattctgatttattctcaaagcgaagaagagcatgcagatcatttgaggatggtattgcagagattgcgagagcaccagttgtatgcaaagttgagcaaatgtgaattttggatcaatgaagtcctgttcttgggtcacataatcaacaaagaaggattggctgtggatccgaagaaagtggcagacattctgaactggaaagcgccaacagatgctcgaggaatcaagagcttcattggaatggccggatactatcggcgattcattgaagggttttcgaagattgcgaaaccaatgacagcgttgctaggcaacaaggttgagttcaagtggacccagaaatgtcaacaggccttcgaagcgctgaaagagaagttgacaacagcgcctgtcctagtcttgcctgatgtgcacaagcccttctctgtgtactgtgatgcttgttacacaggtttgggatgcgtattgatgcaagagggaagagttgtggcttactcgtcccgacagttaaaggttcatgagaagaattacccaatccatgacctagagttgacagcagtggttcacgcactgaagacatggaggcactatctgtatggacagaaatgcgatgtttacacagatcacaagagtctgaagtatatattcactcagtcagagttgaacatgaggcaacgaagatggttagagctgatcaaagattatgagttggagattcattaccatccaggcaaagcaaacatagtggcagatgctttaagcagagatagtcaagtcaatctgatggtcgctcgtccgatgccttatgagttggccaaggagttcgacaggttgagtctcgaatttctgaacaattcgcgaggagtcacagttgagttggaacccaccttagagcaggaaatcaaagaagcacagaagaatgatgagaagatcagtgagatccgacgactgattctagatggcagaggcaaagattttcgagaagatgcagaaggtgtgatatggttcaaagaccgcttatgtgttcctaatgtccagtccattcgggagttgatcctcaaggaagctcatgagacagcttattcgattcaccctggtagtgagaagatgtatcaggatctgaagaataaaatctggtggtacggaatgaagagggaaattgcagagcatgtggctatgtgcgatagttgtcgaagaattaaggcagagcaccagagaccagctggattgttgcaaccgttgcaaattcctcaatggaaatgggatgaaatcggtatggatttcatagtcggattgcctcgcactcgagccggctacgattccatttgggtagtagtggaccgcttgaccaagtcagcccacttcatacctgtcaagaccaactacagcagtgcagtattggcagagttgtatatgtctcggatcgtttgtcttcatggcgtgccaaagaagatagtgtcagacagaggaacgcagttcacctctcatttctggcagcagttgcatgaagccttgggcacacatctgaatttcagttcagcttatcatccgcagacagatggccagactgaaaggaccaatcaaattcttgaatacatgttgagagcctgtgcgttgcaagatcagtccggatgggacaagcgattgccttatgcagagttctcctataacaacagttaccaggccagtttgaagatgtcaccatttcaagcactctatgggaggagttgtagaactctattgcaatgggatcagcctggggaaaagcaagtgttcgggccagacattttgcttgaagccgaagagaacatcaagatggtccgagagaatatgaagatagcgcagtcgaggcagcgaagctacgcagacacaagaagaagagagctgagtttcgaagtcggagactttgtctatctgaaagtgtcaccgatcagaggagtcagaaggttcggagtcaaaggcaagttagcaccccgctacattggtccgtaccaaattatctcaaggcgtggagaagtggcctatcagctcagtatgccagagaatttgtctgctgtgcatgatgtctttcatgtgtctcagttgaagaagtgcttgcgtgtgccagaagagcagttgccagtggaaggtcttgaagtccaggaggacttaacctacgttgagaagccagtgcaaatccttgaggttgcagacagagtcactcgaaggaagaccatcagaatgtgcaaagtcaaatggaatcaccactccgaggaagaagcaacctgggagcgtgaagatgatctgatggctaaataccctgagctctttgctagccaaccctga

SEQ ID NO: 92856 - DNA, 4566 bp, Zea mays
  Clone ID: MRT4577_184675C.1
atgctcatctgttcagtgctgttgaagaattctattctctttccttatgctgcaagatttgccagatcagttctgatgtgtggttgcattctgcagatgtcagagaacaggcgcagaggaggaaggcgtgctcagcaggagcgagccgctcaacaggatgaggtgcctcagcagcagcacctgccgcccccgcccccgatatcgatcgagcagatgtttctgatgcagactcaggcagttcaggccatcggtcagaccttggccgccattcagcagcagcagcagcagcagcaggccccacctcagcctcagatgcctcagatgcccagagacaagcgtgctgaattcatgagaggtcatcccccaacgtttgctcactcttctgaccccatggatgctgaagattggctgcgcactgtggagcgggagttgcataccgctcagtgtgatgacagggagaaagtcttgtatggtccccgtctgttgagaggagcagcccaatcatggtgggagtcttacctcgccacccatgccaaccccgacaccatcacctgggaagaattcagaggtagctttcgtcagtaccacgtgcctgcaggtctgatgacagtgaagaaggaggagttcctggctctcaagcaagggccattgtctgtcagtgagtatcgggacaagtttctgcaattgtctcgctatgctcctgaagatgtcaacactgacgccaagcgacagtatcgttttctgagaggcttggtcgaccctctgcagtatcagctgatgaatcacaccttcccgacattccagcacctgattgacagggcaatcatgacagagagaaagcgtaaggagatggaagatcgtaagcgcaagatcagtggaccccagcctggaagcagcaatcgtcctcgtttctcaggcaatcaacctcagcagttcaggcagaaccagcgtccacctcagcagcatcagcagtttcaaaggcagtatcctcagcatcagtaccagaaccgtcagagcaatcagtcaggaggtcagtttcaaaggcagaatcagcaggcacctcgccttcctgccccagcaaatcagcagaacagtcaggcagcaccagctcaggttggaaacagggcgtgtttccactgtggagagcaaggccactgggtgatgcaatgtccgaagaaggcagcccagcagcagtcaggccccaatgccccagcaaagcagaatgtgcctcagcctggagcaggcaaccgccctcaacagcgctataatcatggaagattgaatcacttggaggctgaagcagttcaggagacccccggcatgatagtaggtatgttcccagtcgactcccgtattgcagaagtgttatttgatactggagcaacacattctttcattactgcatcatgggtagaagcacataatcttccaattactaccatgtcaacccccattcaaattgactcagccggtggtagaattcgagccgatagcatttgtttgaatataagtgtggaaataagggggatagcgtttcctgccaaccttatagtaatgggtactcagggaatagatgtcatcctagggatgaattggttagataagtatcaggcagttatcagttgtgataaaaggacaatcaagttggtatccccactaggaaaggaagtggtgaccgagttagtcccgcctgagccaaagaaaggaagttgttatcagatggctgtcgatagcagtgaagcagatccaattgagagtatcaaggttgtgtctgaattcccagatgtgtttccaaaggatttaccgggtatgccaccagagcggaaagttgagtttgccatagagcttcttcctggaaccgcccccatctttaagagagcttacagaatatccggaccagagttggttgaacttaagaagcagattgatgagctgtcagagaaaggttacatccggccaagcacctcgccttgggccgcccctgtcctgtttgtggagaagaaagatggcaccaagaggatgtgtatcgattatcgagctttgaatgaggtcacgatcaagaataagtatcatttgcccagaattgaagatctgttcgaccagttgagaggagcgattgatctgaggtcaggttatcatcagctcaggatccgaccttcggacattccgaagacggcattcattaccaagtatgggttgtatgagttcacagtgatgtcttttggtttgaccaatgcgccagcattcttcatgaacttgatgaatagtgtattcatggattaccttgataagtttgtggtggtattcattgatgatattctggtttattctcaaagcgaagaggagcatgcagatcatttgaggatggtattgcagagattgcgagagcaccagttgtatgcaaagttgagtaagtgtgagttctggatcagtgaagtcctgtttttgggtcacataatcaacaaggaaggattggctgtggatccgaagaaagtggcagacattctgaactggaaagcgccaacagatgctaggggaatcaagagtttcattggaatggccggatactatcggcgattcattgaagggttttcgaagattgcgaaaccaatgacagcgttgctaggcaacaaagttgagttcaagtggacccagaaatgccaagaggcctttgaagcgctgaaagagaagttgactacaacgcctgtcctagtcttgcctgatgtgcacaagcccttctcggtgtattgcgatgcttgttacacaggtttgggatgtgtgttgatgcaagagggaagagttgtggcttactcgtcccgacagttgaaggttcatgagaagaattacccaatccatgatctagagttggcagcagtggttcacgcactgaagacatggaggcactatctgtatggacagaaatgcgatgtttacacagatcacaagagtctgaagtacatattcactcagtcagagttgaacatgaggcaacgaagatggttagagttgatcaaagactatgagttggaaattcattaccatccaggcaaagcaaacgtagtggcagatgctttgagcagaaagagccaagtcaatttgatggtcgctcgtccgatgccttatgagttggccaaagagtttgacaggttgagtctcggatttttgaacaattcgcgaggagtcacagttgaattggaacctaccttggagcgcgaaatcaaagaagcgcagaagaatgatgagaaaatcagtgagatccggcgactgattctagaaggcaaaggcaaagattttcgagaagatgcagaaggcgtgatatggttcaaagaccgcttatgtgttcccaatgtccagtctattcgagagttgatcctcaaggaagctcatgagacagcctattcgattcaccctggtagtgagaagatgtatcaggatctgaagaagaaattctggtggtacggaatgaagagggaaatcgcagagcatatccctcagtggaaatgggatgaaattggtatggatttcatagtcggattgcctcgcactcgagccggctacgattctatttgggtagtggtggaccgtttgaccaagtcagcccacttcatacctgtcaagaccagctacaacagtgcagtattggcagagttgtatatgtctcagatcgtttgtcttcatggtgtgccaaagaagatagtgtcagacagaggaacgcagttcacctctcatttctggcagcagttgcatgaagccttgggcacgcatctgaatttcagttcagcttatcacccgcagacagatggccagactgaaaggaccaatcaaattctcgaagatatgttgagagcctgtgtgttgcaagatcagtccggatgggacaagcgattgccttatgcagagttttcctataacaacagttaccaggccagtttgaagatgtcaccatttcaggcgctttatggaagaagttgcagaactccgttgcaatgggatcagcctggagaaaagcaagtgtttgggccagacattttgcttgaagccgaagagaacatcaagatggtccgagagaatctaaagatagcgcaatcgaggcagcgaagctatgcagacacaagaagaagagagctgagttttgaagtcggagattttgtctatctgaaagtgtcaccgatcagaggagtcagaagattcggagtgaaaggcaagctagcaccccgctacattggtccgtatcagattcttgcaagacgtggagaagtggcctatcagctcagtttgccagagaaattgtctgctgtgcatgatgtctttcatgtgtctcagttgaagaagtgcttgcgtgtgccagaagagcagttgccagtggaaggtcttgaagtccaggaggacttgacctatgttgagaagccagctcagatccttgagattgcagacagagtcacccgaaggaagaccatcagaatgtgcaaagtcagatggaatcaccattcagaggaagaagcaacctgggagcgtgaagatgatctgatggctaagtacccagagctctttgctagccagccctga

SEQ ID NO: 92857 - DNA, 455 bp, Zea mays
  Clone ID: MRT4577_184676C.1
ccgcaccggtcccgaaccgcagggccggcccacgcgtacaataaggtttctagggtggaaggtacagcctgctggaacatcaatttttgatgatgtccattaacctgaaaaaaaggcgcacgcaccccccccccacaagagaggaaattcaaaggcaacatatgctgctatctttattcgacacatgaaacttatggaaattcctggagtgtaaacatccccagttgctgtttgctccagactttagaggaaggcagatgtaaatatccccacaatcgatataaagtcaagatggttctatgaactagttcaaggcactgactctccttcaagggaaaaaatggacgcttttgaactgattatatcttttatgtagtgcttacgcctaaacacggacgtgcaggtaaattctattctcttgcagattttaacacccgatcttttctggcacatgt

SEQ ID NO: 92858 - DNA, 4305 bp, Zea mays
  Clone ID: MRT4577_184677C.1
atgtccatcgagcagatgtttctgatgcagactcaggcagttcaagccatcggtcagactttggccgccattcagcagcagcagcagcaacagcagcaggccccacctcagcctcagatgcctcagatgcccagagacaagcgtgctgaattcatgagaggtcatccaccaacgttcgctcactcttctgaccccatggatgctgaagactggctgcgcactgtggagcgggagttgcataccgctcagtgcgatgatagggagaaggttctgtatggtccccgtctgttgagaggagcagcccaatcatggtgggagtcttacctcgccacccatgcccaccctgacgccatcacctgggaagagttcagaggtagctttcgtcagtaccatgttcccgcaggtctgatgactgtgaagaaggaggagttcctggccctcaagcaagggtcattgtctgtcagtgagtaccgggacaggtttctgcagttgtctcgctatgctcctgaagatgtcaacaccgacgccaagcggcagtaccgttttctgagaggcttggttgaccctctgcagtaccaactgatgaatcacaccttccctacattccagcacctgattgacagagcaatcatgacagagaggaagcgtaaggagatggaggatcgtaaacgcaagatcagtggaccccagcctggaagcagcaatcgtcctcgtttctcaggcaatcaacctcagcagttcaggcagaaccagcgtccacctcagcagcatcagcagttccaaaggcagtatcctcagcaccagtaccagaaccgtcagagcaatcagtcaggaggtcagtttcagaggcagaatcagcaggcacctcgtcttcctgccccagcaagccagcagaacagtcaggcagcaccagctcaggttggaaacagagcatgtttccactgtggagagcaaggccactgggtgatgcaatgtccgaagaaggcagcccagcagcagtcaggccccaatgcccccgcaaagcagaatgtgcctcagcctggagcaggcaatcgctctcagtcgcgctataatcatggaagactgaaccacttggaggctgaaggagtgcaggagacccccggcatgatagtaggtatgttcccagtcgactcccatattgcagaagtgttatttgatactagagcaacacattctttcattactgcatcatgggtagaagcacataatcttccaattactaccatgtcaacccccattcaaattgactcagccggtggtagaattcgagccgatagcatttgtttgaatataagtgtggaaataagggggatagcgttttccgccaaccttatagtaatgggtactcagggaatagatgtcatcctagggatgaattggctagataagtatcaggcagttatcagttgtgataaaaggaccatcaagttggtgtccccactaggagaggaagtggtgaccgagttagtcccgcctgagccaaagaaaggaagttgttatcagatagctgttgatagcagtgaagcagacccaattgagaggatcaaggttgtgtccgagttcccagatgtgtttccaaaggacttaccgggtatgccaccagagcggaaagttgagtttgctatagagcttcttcccggaaccgcccctatctttaagagagcttacagaatatccggaccagagttggttgagcttaagaagcaaattgatgagctatcagagaaaggttacattcggccaagcacctcgccttgggccgcccctgtcttgttcgtggaaaagaaagatggcaccaagaggatgtgtatcgattaccgagctttgaatgaggtcacgatcaagaacaagtatcctttgcccagaatagaagatctgttcgaccagttgagaggagccagtgtgttctccaagattgatctgaggtcaggttatcatcagctcaggatccgaccttcggacattccgaagacggcattcatttccaagtatggtttgtatgagttcactgtgatgtcttttggtttgaccaatgtgccagcgttcttcatgaacttgatgaacagtgtattcatggattaccttgataagtttgtggtggtattcattgatgatattctggtttattatcaaagcgaagaagagcacgcagatcatttgaggatggtattgcagagattgcgagagcaccagttgtatgcaaagttgagcaagtgtgagttctggatcagtgaagtcctgttcttgggtcacataatcaacaaagaaggattggctgtggatccgaagaaagtggcagacattttgaactggaaagcgccaacagatgcccgaggaatcaagagcttcattggaatggccggatactatcggcgattcattgaagggttttcgaggattgcgaaaccaatgacagcgttgctaggcaaccaagttgagttcaagtggacccagaaatgtcaagaggcctttgaagcgctgaaagagaagttgactacaacgcctgtcctagtcttgcctgatgtgcacaagcccttctcggtgtattatgatgcttgttacacagagttggcagcagtggttcacgcacttaagacatggaggcactacctgtatggacagaaatgcgatgtttacacagaccacaagagtctgaagtacatattcactcagtcagagttgaacatgaggcaacgaagatggttagagttgatcaaagattatgagttggagattcattaccatccaggcaaagcaaacgtagtggcagatgctttgagcagaaagagtcaagtcaatctgatggtcactcgtccgatgccttatgagttggccaaagagtttgacaggttgagtctcggatttctaaataattcgcgaggagtcacagtcgagttggaacctaccttggagcgcgaaatcaaagaagcgcagaagaatgatgagaaaatcagtgagatccggcgactgattctagatggcagaggcaaagattttcgagaagatgcagaaggtgtgatatggttcaaagaccgcttgtgtgttcccaatgtccagtccattcgggagttgattctcaaggaagctcatgagacagcctattcgattcaccctggcagtgagaagatgtatcaggatctgaagaagaaattctggtggtacggaatgaagagggaaatcgcagagcatgtggctatgtgcgatagttgccgaagaattaaggcagagcaccagagaccggccggattgttgcaaccgttgcagatccctcagtggaaatgggatgaaattgtagtggaccgcttgaccaagtcagcccacttcatacctgtcaagaccaactacagcagtgcagtattggcaaaattgtatatgtctcggatcgtctgtcttcatggtgtgccaaagaagatagtgtcagacagaggaacgcagttcacctctcatttctggcagcagttgcatgaagctttgggcacgcatctgaatttcagttcagcttatcatccgcagacagatggccagaccgaaaggaccaatcaaattcttgaagatatgttgagagcctgtgcgttgcaagatcagtccggatgggataagagattgccttatgtggagttttcctataacaacagttaccaggccagtttgaagatgtcaccatttcaggcgctttatggaaggagttgtagaactccgttgcaatgggatcagcctaaagaaaagcaagtgtttgggccagaaattttgcttgaagccgaagagaacatcaagatggtccgagagaatctgaagatagcgcaatcgaggcagcgaagctatgcagacacaagaagaagagagctgagttttgaagtcggagactttgtctatctgaaagtgtcaccgatcagaggagtcagaagattcggagtgaaaggcaagctagcaccccgctacattggtccgtatcagattcttgcaagacgtggagaagtggcctatcagctcagtttgcccgagaatttgtctgttgtgcatgatgtctttcatgtgtctcagttgaagaagtgcttgcgtgtgccagaagagcagttgctagtggaaggtcttgaagtccaggaggacttgacctacgttgagaaaccagtgcaaatccttgaggttgcagacagagtcacccgaaggaagaccatcagaatgtgcaaagtcagatggaatcatcactctgaggaagaagcaacctgggagcgtgaagatgatctgatggctaaataccctgagctctttgctagccaaccctga

SEQ ID NO: 92859 - DNA, 1812 bp, Zea mays
  Clone ID: MRT4577_184678C.1
atgtgcgtcgattaccgagctttgaatgaagtcacgatcaagaacaagtaccctttgcccagaatagaagatctgttcgaccagttgagaggagccagtgtgttctccaagttagatctgaggtcaggtttgggatgcgtgttgatgcaagagggaagagttgtggcttactcgtcccgacagctgaaggttcatgagaagaattacccaatccatgatctagagttggcagcagtggttcacgcactgaagacatggaggcactatctgtatgggcagaaatgtgatgttttcacagaccacaagagtctgaagtacatattcactcagtcagagttgaatatgaggcaacgaagatggttagagttgatcaaagactatgagttggagattcactaccatccaggcaaagcgaacgtagtggcagatgctttgagcaggaagagtcaagtcaacctgatgtttgacaggttgagtctcggatttctgaacaattcgcgaggagtcacagttgagttggaacctaccctggagcgggaaatcaaagaagcacagaagaatgatgagaagatcagtgagatccggcgactaattctagatggcagaggcaaagatttttgggaagatgcagaaggtgtgatatggttcaaagaccgcttgtgtgttcccaatgtccaatccattcgggagttgatcctcaaggaagctcatgagacagcctattcgattcaccctggtagtgagaagatgtatcaggatctgaagaagaaattctggtggtacggaatgaagagggaaatcgcagagcatgtggcaatgtgcgatagttgtcgaagaatcaacgcagagcaccagagaccagctggattgttgcaaccgttgcaaattcctcagtggaaatgggatgaaatcggtatggacttcatagtcggactgcctcgcactcgagctggctacgattccatttgggtagtagtggaccgcttgaccaagtcagcccacttcatacctgtcaagaccaactacagcagtgcagtattggcagagttgtatatgtctcggatcgtttgtcttcatggtgtgccaaagaaaatagtgtcagacagaggaacgcagttcacctctcatttctggcagcagttgcatgaagccttgggcacgcatctgaatttcagttcagcctatcatccgcagacagatgagttttcctataacaacagctaccagaccagtttgaagatgtcaccatttcaggcgctttatggaaggagttgtagaactccgttgcaatgggatcagcttggagaaaagcaagtgttcgggccagacattctgcttgaagccgaagagaacatcaagatggttcgagagaatctgaagatagcgcagtcaagacagcgaagttatgtagacacaagaagaagagagctgagtttcaaagtcggagactttgtctatctgaaagtgtcaccgatcagaggagtcagaaggttcggagtcaaaggcaagctagcaccccgctacattggcccgtaccaaattctctcaaggcgtggagaagtggcctatcagctcagtctgccagagaatttgtctgttgtgcatgatgtctttcatgtgtctcaattgaagaagtgcttgcgtgtgccagaagagcaattgccagttgaaggtcttgaagtccaagaggacttgacctacgttgagaagccaacgcaaatccttgagaccacagacagagtcactcgaaggaagaccatcagaatgtgcaaagtcaggtggaatcatcactctgaggaagaagcaacctga

SEQ ID NO: 92860 - DNA, 2192 bp, Zea mays
  Clone ID: MRT4577_184679C.1
agagcttcaatttcccttttgccggggctctgcattaaagggctgaaagcctctgttatcccgcttttttcctctgtaagggcaaatgatgatgcaaagtcatgcaccactctgaatgaggggattatcctctctttgggctgacaaacggacttctacccatttttcgtctgagccttgtgatgacatccgatttctttattggctccctggcttttcttttttcttgctgcttactgtgacactgattttgttgcgttagattaatagatctcgcctgtgagctggccgggctagatgatgtgggtctgccgacccaccatgatgcggactgaattttatttgaggtcaaatctaatggattctgatggttgaaaaaaaaaaaaaaaaaaacccctgcgccactgccttgttctttcttgctccgctccccacgcgtacgcgctctcgtggcgacgactgggtgatcgccgccgccgccgccgccaccacgcaccaccaggccttcaccggcgacaaacaccaccaacagacacaagtgcttcagtcattatagtgccagtaccattctgccagcgagttcctttgccacaaaaagataacactcggatatctcatggcaaaacctgggattttaggccgcagcagtgcacagagatcaaatgagggcatgcgaatcatattctcagcagttattggtgttatgctagggtacttgtttggcatttccttccctaccgttaatataacaaagcttcacttcccttccagcattatctcctatatcgaggacagaaactctggcatcacaacccaaacattattgaatcatgcatggacgtctgcagctactcataagaagaacaattcagcttctaactctgatgaaattcctaagatttatgttccaacaaaccctaaaggtgctgaaaggcttccaccgggcattgtagtgtctgaaacagacctttatctccggagattgtggggtgaacctagtgaggatcttactaccaaaccaagataccttgttacatttacagtgggatactctcaaaaggcaaacattgatggcagcggtgaaaaagttttcagataacttcacaattatgttgttccattatgatggtcggacaactgagtgggatgaatttgagtggtcaaaaagggccgtccatgtgagtgtcacaaagcaaaccaaatggtggtatgccaaacgatttctacatcctgacattgttgcccgctacgactacatatttatctgggatgaagatcttggtgtcgaacattttaatgcagaggcgtacattaagcttgttaggaagcatgggcttgagatctctcagcctggtttggagcccgataaaggtttgacatggcaaatgactaaacgaagaggtgatcaggaagtccacaaagtaactgaggagagacctggctggtgtagcgaccctcacctgccaccatgtgcagcgtttgttgaaattatggcaactgtattctcaagggatgcatggcgctgtgtatggcatatgattcagaacgacttggtccatggatggggccttgattttgctcttaggaaatgtgtggagccagcccatgagaaaattggagtggttgactcccagtggattgttcatcaagtcatcccttcgcttggtaaccagggcaaggcagagaatggaaaagcaccatgggaaggggttagagcacgctgtcgtaaagaatgggggatgttccaaacaaggttgactgatgctgagaaagcatattacttggagcacgggatcacaccaccaaaatcgacggtagcttagctgcacgcaccgacagtagcttagctgcactgcatgcctgcatacaggcacctcgcgagtcacgccaaggtttctgttttgtgaacctagcgccttcctgtccgataagcaactgactctgtagagatgcagcaccacagccagatttgtacagaatcgatgtacgtttttactcttcttaatcttctttacttgttttcaaccgtagcgacgagagtagctcttgtgtaagtaaccgatttagcatgaatccggtggctcttttttttttgatatattgcccaaatgcaatatcgatatggtcatttcgtttcattgttttaataacaagcaaaaggttgctttgggacaaaaaaaaaaaaaaaaaaa

SEQ ID NO: 92861 - DNA, 442 bp, Zea mays
  Clone ID: MRT4577_18467C.1
cttcttgagggtaactgtgggcaaaggccaggtaacagcaatgcacgagcaaaacaaccttgggtagtgcattgggttcttgagcattggaataagggatcactgggtgaggcagtatttattatgttacagaatgactatgagggggggggggcatgcttttttttatagctaggactactatgtgcgcacccattgagcaaggcggggcccaacaccgccccctatgatgcgaggccttggtggcgatttgcaggtggcctggctgaacgggaacaaacatgatgttggaggagctgtggtgggatgagtaggggggggttggcacagataaggtgggggtgagaggggtgaggggcggagaggggggcgaggtgggggggggtgggggtgggggggggggggggggggggggggtggggtaggtggtggaggggtgggg

SEQ ID NO: 92862 - DNA, 456 bp, Zea mays
  Clone ID: MRT4577_184680C.1
atgtcgatcgagcagatgtttctgatgcagactcaggcagttcaagccatcagtcagactctggccgccattcagcagcagcagcaacagcagcaggacctacctcagcctcagatgcctcagatgcccaaggacaaacgtgctgaattcatgagaggtcatccaccaacgttcgctcactcttctgaccccatggatgctgaagactggctgcgcactatggagcgggagttgcataccgctcagtgtgatgacagggagaaagtcatgtatggtccgcgtctgttgagaggagcagctcagtcatggtgggagtcttatctcgccacccatgccaaccccgacaccatcacctgggaagagttcagaggtctgatgacagtgaagaaggaggagttccttgccctcaagcaagggtcatcgtctgttagcgagtaccaggacagtaccaactga

SEQ ID NO: 92863 - DNA, 4077 bp, Zea mays
  Clone ID: MRT4577_184681C.1
atgtccatcgagcagatgtttctgatgcagactcaggcagttcaagccatcggtcagactttggccgccattcagcagcagcagcagcaacagcagcaggcaccacctcagcctcagatgcctcagatgcccagagacaagcgtgctgaattcatgagaggtcatccaccaacgtttgctcactcttctgaccccatggatgctgaagattggctgcgcactgtggagcgggagttgcataccgctcagtgcgatgacagggagaaagttctgtatggtccccggctgttgagaggagcagcccaatcatggtgggagtcttacctcgccacccatgcccatcctgacgccatcacttgggaaaagttcagaggtagctttcgtcagtaccatgtacctgcaggtctgatgacagtgaagaaggaggagttcctggccctcaagcaagggccattgtctgtcagtgagtaccgagacaagtttctgcaattgtctcgctatgctcctgaagatgtcaacaccgacgccaagcgacagtaccgtttcctgagaggcttggttgaccctcttcagtatcagctgatgaatcacaccttcccgacattccagcacctgattgacagagcaatcatgacagagaggaagcgcaaggagatggaagatccaaaccagcagagcagtcaggcagcaccagctcaggttggaaacagggcatgtttccactgtggagagcaaggacactgggtgatgcaatgtccgaagaaggcagcccagcagcagtcaggccccaatgccccagcaaagcagaatgtgcctcagcctggagcaggcaatcgctctcagccgcgctataatcatggaagactgaaccacttggaggctgaagcagttcaggagacccccggcatgatagtaggtatgttcccagtcgactcccatattgcagaagtgttatttgatactggagcaacgcattctttcattactgcatcatgggtagaagcacataatcttctaattactaccatgtcaacccccattcaaatcgactcagccggtggtagaattcgagccgatagcatttgtttgaatataagtgtggaaataagggggatagcgtttcccgccaaccttatagtaatgggtactcagggaatagatgtcatcctagggatgaattggctagataagtatcaggcagttatcagttgtgataaaaggacaatcaagttggtgtccccactaggaggagaagtggtgaccgagttagtcccgcctgagccaaagaaaggaagttgttatcagatagctgttgatagcagtgaagcagacccgatcgagagtatcaaggttgtgtccgagttcccagatgtgtttccaaaggacttaccgggtatgccaccagagcggaaagttgagtttgctatagagcttcttcctggaaccgcccctatcttcaagagagcttacagaatatctggaccagagttggatgaacttaagaagcaaattgatgagctgtcagagaaaggttacattcggccaagcacctcgccttgggccgcccctgtcctgtttgtggagaagaaagatggcacgaagaggatgtgtatcgattatcgagctttgaatgaagtcacgatcaagaacaagtatcccttgcccagaatcgaagatctgttcgaccagttgagaggagccagtgtgttctccaagattgatctgaggtcaggttatcatcagctcaggatccgaccttcggacattccgaaaacggcattcatttccaagtatggtttgtatgagttcacagtgatgtctttcggtttgaccaatgcgccagcattcttcatgaacttgatgaacagtgtattcatggattaccttgataagtttgtggtggtattcattgatgacattctggtttattctcaaagcgaagaagagcatgcaaatcatttgaggatggtattgcagagattgcgagagcaccagttgtatgcaaagttgagtaagtgtgagttctggatcagtgaagtcctgttcttgggtcacataatcaacaaggaaggattggctgtggatccgaagaaagtggcagacgttttgaactggaaagcgccaacagatgccagaggaatcaagagtttcattagaatggccggatattatcggcgattcattgaagggttttcgaagatcgcgaaaccaatgacagcgttgctaggcaacaaagttgagttcaagtggacccagaaatgccaagaggcctttgaagcgctgaaagagaagttgactacagcacctgtcctagtcttgcctgatgtgcacaagcccttctcggtgtattgtgatgcttgctacacaggtttgggatgtgtgttgatgcaagagggaagagttgtggcttactcgtcccgacagttgaaggttcatgagaaaaattacccaatccatgacctagagttgtcagcagtggttcatgcgctgaagtcatggaggcactatctgtatggacagaaatgcgatgtttacacagatcataagagtctgaagtacatattcactcagtcagagttgaacatgaggcaacgaagatggttagagttgatcaaagattacgagttggagattcattaccatccaggcaaagcaaacgtagtggcagatgctttgagcagaaagagtcaagtcaatctgatggtcgctcgtccgatgccttatgagttggccaaggagtttgacaggttgagtctcggatttctgaacaattcgcgaggagtcacagttgagttggaacctactttggagcgcgaaatcaaagaagcgcagaagaatgatgagaaaatcagtgagatccggcgactgattctagaagacaaaggcaaagattttcgaaaagacgcagaaggcgtgatatggttcagagaccgcttgtgtgttcccaatgtccagtccattcgggagttgattctcaaggaagctcatgagaccgcttattcgattcaccctagcagtgagaagatgtatcaggatctgaagaagaaattctggtggtacggaatgaagagggaaatcgcagagcatgtggctatgtgcgatagttgccgaagaattaaggcagagcaccagagacctgctggattgttgcaaccgttgcagatccctcagtggaaatgggatgaaattggtatggatttcatagtcggattgcctcgcactcgagccggctacgattccatttgggtagtagtggaccgtttgaccaagtcagcccacttcatacctgtcaagaccaactatagcagtgccgtattggcagagttgtatatgtctcggatcgtttgtcttcatggtgtgccaaagaagatagtgtcagatagaggaacgcagttcacctctcatttctggcagcagttgcatgaagctttgggcacgcatctgaatttcagttcagcttatcacccgcagacagatggccagaccgaaagaaccaaccaaattcttgaagacatgttgagagcctgtgcattgcaagatcagtccggatgggataagagattgccttatgcagagttttcctataacaacagttaccaggccagtttgaagatgtcaccatttcaggcgctttatggaaggagttgtagaactccgttgcaatgggatcagcctggagaaagcaaaggagtcagaagattcggagtgaaaggcaagctagcaccccgctacattggtccgtatcaggttcttgcaagacgtggagaagtggcctatcagctcagtttgcccgagaatttgtcagttgtgcatgatgtctttcatgtgtctcagttgaagaagtgcttgcgtgtgccagaagagcagttgccagtggaaggtcttgaagtccaggaggacttgacctacgttgagaagccagtgcaaatccttgagattgcagacagagtcacccgaaggaagaccatcagaatgtgcaaagtcagatggaatcaccactctgaggaagaagcaacctgggagcgtgaagatgatctgatggctaaataccctgagctctttgctagccaaccctga

SEQ ID NO: 92864 - DNA, 1722 bp, Zea mays
  Clone ID: MRT4577_184682C.1
ttagacaagtatattagtacacaaaaccaatgtactaagacttagaaacatacctttgatcttgatttgcactttgttcatccattgcataaattcacattttaagcacttgagttggcactcaatcaccaaaatacttagaaatggcccaagggcacatttccctttcaataggacaggggcggcccaaggcgaggtgcttggctggatgtaacctttctctgacagctcatcaatctgcttcttaagttcaaccaactctggcccagatattctgtaagctctcttaaagatgggggcggttccagaaagaagctctatggcaaattcaactttccgctctgggggcatacccggtaagtccttgggaaacacatctggaaactcagacacaatcttgatcctctcaattgggtctgcttcacggctatcgacaaccatctgataacaacttgctttctttggctcaggcgggactaattcggtcaccacttcctctcctagtggggacaccaacttgattgtccttgtatcacaactgatgactgcctggtacttatctagccaattcatccctaggatgacatctattccctgagtacccattactatgaggttggcgggaaacgctactatcatgtcgggggtctcctgaactgcttcagcctccaagtggttcagtcttccatgattataacgcggctgagagcggttgcctgctccaggctgagacacgttctgcttcgctggggcattggggcctaactgctgctgggttgccttcttcggacattgcatcacccaatggccttgctctccacagtggaaacatgctctgtttccaacttgagctggtgctgcctgattgttctgctggtttgctcctcctgactgattgttctggcgattctgatactggtgatgaggatactgcctttggaactgctgatgttgctgaggtggacgttggttctgcctgaactgctgaggttgattgcctgagaaacgaggacggttgctgcttccaggctggggtccactgatcttgcgcttacgatcctccatctccttacgcttcctctttgtcatgattgctctgtcaatcaagtgctggaacgtcggaaaggtatgattcatcatctgatagtgcagagggtcaaccaagcctttcaggaaacggtattgtctcttggcgtcgatgttgacatcttcaggagcatagcgagacaattgcagaaacctgtctcgatactcactgactgacatcgacccttgcttaagggccaggaactcctccttcttcactgtcatcagacctgcaggaacatggtactgacgaaagctacctctgaactcttcccaggtgatggcgtcggggttggcatgggtggcgagataagactcccaccatgactgagctgctcctctcaacagacggggaccatacaagactttctccctgtcgtcacacggagcggtatgcaactcccgctccacagtgtgcagccagtcttcagcatccatggggtcagaagaatgagcgaacgttgggggatgacctctcatgaattcagcacacttgtctctgggcatctgaggcatctgaggctgaggtggtgcctgctgctgttgttgttgttgctgctgctgaatggcggctagagtctgaccgatggcttgaactgcctgagtctgcatcagaaacatctgctcgatggacat

SEQ ID NO: 92865 - DNA, 364 bp, Zea mays
  unsure (1)..(364): unsure at all n locations
  Clone ID: MRT4577_184683C.1
ccccnnnnaataattcncacnaacncaaaaaaactatggttatttttgacaacaatagggggccattcattcattcattcatggagtcatggtggtgcttatactgccgagaacattcatcaacgcaagttagaaaaacaagaggggtaaatttaccggccttgtatgcgtttaggaaccacaacttttgtggggactgatcgacttgaagccaaaacaaaagcttgattaccggtcgagggggagggcctccgtgatgagcgaagcccccatgacctggttggccccctccgacgggtggacggccccccaaaagacttaggacgtggtgtttgggcacgtcccgaccgacttggggttgcaa

SEQ ID NO: 92866 - DNA, 2022 bp, Zea mays
  Clone ID: MRT4577_184684C.1
atggccgtggatagtcccccgccggcgtcaccgcagcgacggcagtccgaggccggcgcgggcgggcggcggacggacaggcacggccgacgcctcgaggtgtacaacgaggtgctcgtccgcctgcgctcctccgccgcggtctctccggccttcgaggacgcgctctgggcccacttccaccgcctccccgcccggtacgcgctggatgtgaacgcggagagggcggacgatgtggtcacccaccagcggctgctccaggaggcgcgcgatccggaacgccggcccgccttgtccgtgcgcgtcgtgcaggtttctaggattatcgatactgatgtgggcgatccatatgatcctgacatggaggcagttgcttcgaatcgtcctgaggctaatgaaacggttcacccacctccagcatttggttcttcctccaatctagaggcgcttgcgcttgaaacaagtgagagtgatgtaaggagcactggtgatactgatcacagtgtacatctaatttccaggccgatgcacgagataacttttgcaacgattgataagccaaagctccttagtcagctgacttgtttgcttgctgagctcggtcttgacatccaagaagcacatgcattttcaacaattgatggctactcattggatgtatttgttgtcactggatggcatcttgggagtactgagcagctacaaggagatttgcttcagaaatttcacaaaatcgagacacaagcttggcctttatccagctcattatcaccgtcatcagaaggtcagcaaggtggagaaagtatgtcatctgcaagtgttgaaattccaacagatggtgtagatgtttgggaacttgaccttaagctgctcaagtttggaagcaaagttgcttccggatcaaatggtgacctgtaccgtggaacatactgcaatcaggatgtggccatcaaagtagtgaggcctgagcgcatcagtgcagatatgtaccgagattttgcacaagaagtgtacatcatgagaaaggtccgtcacaagaatgtagtgcagtttatcggtgcatgcacaagacaaccaacactgtatattgtaacagatttcatgccaggagggagtgtctatgattacctccataaaaataataatgctttcaagcttcctgaaatactgaaagtggcgaccgacatcactaaaggaatgaactacctgcaccagaacaacataattcaccgcgatctcaagactgcaaatcttctcatggatgaaaacaaggttgtaaaggttgcagactttggtgttgcacgagtgaaagaccaatctggagtgatgactgcagaaactggaacttaccgttggatggcacctgaggtcatagaacataagccctacgatcacaaagcggatgtttttagctttgctattgttctttgggaactgctaaccggcaagatcccttacgagtaccttacaccactgcaagcagcaataggtgttgttcagaagggtattaggccaacaattccaaaagacacacatcccaagctcatcgagcttcttcagaaatgttggcatcgagatccagctgagaggcccgacttctccgagatactggagatccttcagaaactctccaaagaggccagtcctgcatttccagttctcgctgctagtttaccacatgtctaatcagcgctgaagagaagccactgaagggcactgggcacccagccacctatgatagtttactccaatgtaatgttggtgattgatgcacgctgtaatcacaatcacagcatgattctgaagttctgatgcaagttgaatagtgcgctgtagttgtacagtcacgattttctcgtgtaattgcagttgtctctctctttttggctcaatttgcccttttgttttgttgctttgccctcatgtaatcgtagatgatatttgttggatgttctaacgactggcatagattgaagtgtgctgaaataaattcctgctggtgagaaacagccctcttcgtgt

SEQ ID NO: 92867 - DNA, 4329 bp, Zea mays
  Clone ID: MRT4577_184685C.1
atgtcgatcgagcagatgtttctgatgcaaactcaggcagttcaagccatcggtcagactttggccgccattcagcagcagcagcagcaacaacagcaggccccacctcaacctcagatgcctcagatgcctagagacaagcgtgctgaattcatgagaggtcatccaccaacgttcgctcattcttctgaccccatggatgctgaagattggctgcgcactgtggagtgggagttgcataccgctcagtgcgatgacagggagaaaattctgtatggtccccgtctgttgagaggggcagcccaatcatggtgggagtcttacctcgccacccatgcccaccctgacgccatcacctgggaagagttcagaggtagctttcgtcagtaccatgtacctgtaggtctgatgacagtgaagaaggaggagttcctggccctcaagcaagggtcattgtctgtcagcgagtaccgggacaagtttctgcaattgtctcgctatgctcctgaagatgtcaacaccgacgccaagcggcagtaccgtttcctgagaggcttggttgaccctctgcagtaccaactgatgaatcacaccttcccgacattccagcacctgattgacagagcaatcatgacagagaggaagcgtaaggagatggaggatcgtaagcgcaagatcagtggaccccagcctggaagcagcaatcgtcctcgtttctcaggcaatcaacctcagcagttcaggcagaaccagcgtccacctcagcagcatcagcagttccaaaggcagtatcctcagcaccagtaccagaaccgtcagagcaatcagtcaggaggtcagtttcaaaggcagaatcagcaggcacctcgccttcctgccccagcaaaccagcagaacagtcaggcagcgccagctcaggttggaaacagggcatgtttccactgtggagagcaaggccactgggtgatgcaatgtccgaagaaggcagcccagcagcagtcaggccccaatgccccagcaaagcagaatgtgtctcagcctggatcaggcaaccgctctcagccgcgctataatcatggaagactgaaccacttggaagctgaagcagttcaggagacccccagcatgatagtaggtatgttcccagtcgactcccatattgcagaagtgttatttgatactggagcaacacattctttcattactgcatcatgggtagaagcacataatcttccaattactaccatgtcaacccccattcaaattgactcagccggtggtagaattcgagccgatagcatttgtttgaatataagtgtgaaaataagggggatagcatttcccgccaaccttatagtaatgggtactcagggaatagatgtcatcctagggatgaattggctagataagtaccaggcaattatcagttgtgataaaaggacaatcaagttggtgtccccactaggagaggaagtggtaaccgagttagtcccgcctgagccaaagaaaggaagttgttatcagctagctgttgatagcagtgaagcagacccgattgagagtatcaaggttgtgtccgagttcccagatgtgtttccaaaggacttaccgggtatgccaccagagcggaaagttgagtttgccatagagcttcttcccggaaccgcccctatcttcaagagagcttacagaatatctggaccagagttggttgagcttaaggagcagattgatgagttgttagagaaaggttacatccggccaagcacctcgccttgggccgcccctgtcctatttgtggagaagaaagatggcaccaagaggatgtgcatcgattatcgagctttgaatgaggccacgatcaagaacaagtatcccttgcccagaatagaagatctgttcgaccagttgagaggagccagtgtgttctccaagattgatctgaggtcaggttatcatcagctcaggatccgaccttcggacattccgaagacggcattcatttccaagtatgggttgtatgagttcacagtgatgtcttttggtttgaccaatgcaccagcgttcttcatgaacttgatgaacagtgtattcatggattaccttgataagtttgtggtggtattcattgatgacattctgatttattctcaaagcgaagaagagcacgcagatcatttgaggatggtattgcagagattgcgagagcaccagttgtatgcaaagttgagcaagtgtgagttttggatcaatgaagtcctgttcttgggtcacataatcaataaagaaggattggctgtggatccgaagaaagtggcagacattttgaactggaaagcgccaacagatgctagaggaatcaagagtttcattgggatggccggatattatcggcgattcattgaagggttttcgaagattgcgaaaccaatgacagcgttgctaggcaacaaagttgagttcaagtggacccagaaatgccaagaggcctttgaagcgctgaaagagaagttgactacagcgcctgtcctagtcttgcctgatgtgcacaagcccttctcggtgtattgtgatgcttgttacacaggtttgggatgcgtattgatgcaagagggaagagttgtggcttactcgtcccgacagttgaaggttcatgagaggaattacccaatccatgatctagagttggcagcagtggttcacgcgctgaagtcatggaggcattatctgtatggacagaaatgtgatgtttacacagatcacaagagtctgaagtacatattcactcagtcagagttgaacatgaggcaacgaagatggttagagttgatcaaagattatgagttggagatccattaccatccaggcaaagcaaacgtagtggcagatgctttgagcagaaagagtcaagtcaatctgatggttgctcgtccgatgccttatgagttggccaaggagttcgacaggttgagtctcgaatttttgaacaattcgcgaggagtcacagttgagttggaacctaccttggagcgcgaaatcaaagaagcgcagaagaatgatgagaaaatcagtgagatccggcgactgattctagaaggcaaaggcaaagattttcgaaaagacgcagaaggcgtgatatggttcagagaccgcttgtgtgttcccaatgtccagtccattcgggagttgattctcaaggaagctcatgagacagcttattcgattcaccctggcagtgagaagatgtatcaggatctgaagaagaaattctggtggtacggaatgaagagggaaatcgcagagcatgtggctatgtgcgatagttgccgaagaattaaggcagagcaccagagacctgtcggattgttgcaaccgttgcagatccctcagtggaaatgggatgaaattgagttgtatatgtctcggatcgtttgtcttcatggtgtgccaaagaagatagtgtcagacagaggaacgcagttcacctctcatttctggcagcagttgcatgaagccttgggcacgcatctgaatttcagttcagcttatcatccgcagacagatggccagaccgaaagaaccaatcaaattcttgaagacatgttgagagcctgtgcattgcaagatcagtccggatgggacaagcgattgccctatgcagagttttcctataacaacagttaccaggccagtttgaagatgtcaccatttcaggcgctttatggaaggagttgtagaactccgttgcaatgggatcagcctggagagaagcaagtgtttgggccagacattttgcttgaagccgaagagaacatcaagatgatccgagagaatctgaagatagcgcaatcgaggcagcgaagctatgcagacacaagaagaagagagctgagtttcgaagtcggagactttgtctatctgaaagtgtcaccaatcagaggagtcagaaggttcggagtgaaaggcaagctagcaccccgctacattggtccgtatcaggttcttgcaagacgtggagaagtggcttatcagctcagtttgcccgagaatttgtcagctgtgcatgatgtctttcatgtgtctcagttgaagaagtgcttgcgtgtgccagaagagcagttgccagtggaaggtcttgaagtccaggaggacttgacctacgttgagaagccagtgcagatccttgaggttgcagacagagtcacccgaaggaagaccatcagaatgtgcaaagtcagatgggaccatcactcagaggaagaagcaacctgggagcgtgaagatgatctgatggccaaataccctgagctctttgctagccaaccctga

SEQ ID NO: 92868 - DNA, 794 bp, Zea mays
  Clone ID: MRT4577_184686C.1
ccggccgggatctcctccctgcggccacacacataggctcacatgcgcactcttccagccaagccgctcgctgtgccctgcttccctatttctgctttgcctcgtcatggtaaaatcgtcggtctccagctcctttcccatgcactcggcctttggtcttcctgttccctctggtcgagcgctccctgaagcatgctgtggaaccaggtcgcgcagtcgggcgccagccacagtcccttgccccttggctccctctcgaggcatgtacgcacctccggctgttggtctgttcatggtgcctcctccctagtcgcgcgtcgtgctccgttcttcggtgctaggcgagtgggcgtgctcgccagtacctgcttccacacgcggctcctcgccatggctatttgccaccgccccgcagttccgtgcgccctagtcccaacccgtcgtcgtggaccttgcctgatcttggctatcgtcgaccccgcccggacctgcagccccaacacactattgtctctgctcagagccaagtattctactacgtcacgttgtgtcaacagtaagccgtgaagacgctactatgctcgtcgctcgccacctgctcgacataatgtaagaatcggtcgtcgatcttgtatctgccatcgacttcgttttacatcttcgctcctgttgtcgcggagaccctgccagccctgcatgtcgtccacgctttgtgttcgcgtcggagagaatcccatgagtgtgaggtgaagatagctgtagcgcggcgcttctccggtggtcgatgaaatgct

SEQ ID NO: 92869 - DNA, 737 bp, Zea mays
  Clone ID: MRT4577_184687C.1
cccacgcgtccgcccacgcgtccgcccacgcgtccgccgcaactgcctctttgcggcggcgggaaacactgacacgtcttctctccggttgcgacttgcgagcacggtcggaggagctagggtttcgccgcagcgagatgtcggcgtacgacgaggtggagatcgaggacatggagtggaacgcggagctgaaggcgtacacgtacccgtgcccctgcggcgacctcttccagatcacgctcgacgacctccgcctcggggaggagattgcgcgctgcccctcgtgctccctcttccttaccgtcgtctacaacgccgaggatttcgccgactccaaggagccgacccacaagccgtccccgaccccagtcgccgtcgcctgatgtggcccgttcgaggctagatggacgaatggaatggatctcggagcaggaaaaaaggaacgagttcatgtttgacacacaccactacgggagtatttgtttgtactactaaggggctgtttggttcgtggctaaatgtgtcacactttgcctaaggttaggcgttcgaattgaagaactaaccttaggcagaaaagttagacaaaatatggtaagttatgcatcaaaccaaataggctgttaaaactattttttttcatgtgggtgacatagttgtaaggtgacatggacaactcatgctatgaaaatttttgttcgtccccactatatatcaaagactgtggccttaacgcc

SEQ ID NO: 92870 - DNA, 534 bp, Zea mays
  Clone ID: MRT4577_184688C.1
gactaggtgtctaccgaagcgggtcacgacatgcatgatcgacatccctactgaaagcaacatcgctaccctccaaattccattccgaaccgacaccggaaaaccccaggagacaacgttgagcactagtacgccaggactagtggagggaacgcccagacccgatctcacgacccacaatccgggggatgcaccccactcgacacctgctgagcactgaacgtccacgactgctaccacccaatggactggtagccgaccatatggacggacactctctggaattgctgctagggagacaattatcagggctctcttggctgacgcagcactgtactgcctgaacgagcgtgacaataccgagaacctaggactaccacgaatagcttacgagacatgcagaaatgcaactctcagacttctgacgagaagtacttctggcgacatcggaaaatatgattgcctcgtgttcatcatttactctcgtcagacatgccgtgtctgacagccgtgttgtacaaggacatacccgaa

SEQ ID NO: 92871 - DNA, 709 bp, Zea mays
  Clone ID: MRT4577_184689C.1
actttagaacaagaggtattcagaacattagcaaccgcccaccaccgccctaagcccctaaccctcacgcaactgcctctttgcggcggcgggaaacactgacacgtcttccgagcacggtcggaggagctagggtttcgtcgcggcgagatgtcggcgtacgacgaggtggagatcgaggacatggagtggaacgcggagctgaaggcgtacacgtacccgtgcccctgcggcgacctcttccagatcacgctcgacgacctccgcctcggggaggagattgcgcgctgcccctcgtgctccctcttcctcaccgtcgtctacaacgccgaggatttcgccgactccaaggagccgacccacaagccgtccccgagcccagtagccgtcgcctgatgtggcccgttcgaggctagatggacgaatggaatggatctcggagcaggaaaaaaggaacgagttcatgtttgacacacacaccactacgggagtatttgtttgtactactaaagatgagtggacccgctgcatattttcaaagctcaggctgttaaacctatttttttttatgtgggtgacatagttgtaaggtgacatggacaactcatgctatgaaaaattttgttcgtccccaaaaaaaaaaaaaaaaaatgggccggccaaatttgaaacccgatcgattcttcggtgataaattcatttatgttcc

SEQ ID NO: 92872 - DNA, 453 bp, Zea mays
  Clone ID: MRT4577_18468C.1
gttttcccaaacatgaaggcaataactttactcttcttggtgggatttataggagagtttcaggttttttcaagtgcctgctcgccaatcaactgccaatggggttcttatgctccttggtcagaatgcaatggttgtaccaagactcagactcgcaggcggtcaattgctgtttatggacaatacggcggccattcctgtgtgggaagtgcttttgaaacacaaccatgtcaacctactcgaggatgtccaacagaagacggatgtggagaacgtttcaggtgtttctcaagtcagtgcatcagcaaatctttagtttgcaatggggattctgactgtgaagaggacggtgctgatgaagacagatgcgaggatgcaaaaagcagacctgcctgtgacaaggataaacctcctccaaacatagagcttaccggacgtggttacaatgcacta

SEQ ID NO: 92873 - DNA, 166 bp, Zea mays
  Clone ID: MRT4577_184690C.1
gctgtatcaatatgtgtctctagcctttttggctaacgtcttagagctgctcttacattgggtgtctacaggtgcatctggtggggtttccacgatcgatctgtctacctggactacttgagtgtccactctgctgtctgcgtctgtaggctccacctccaacttc

SEQ ID NO: 92874 - DNA, 462 bp, Zea mays
  Clone ID: MRT4577_184691C.1
aacaatcccatggtgttgggttatgtgcggcaattcgtgcagctaaagaagattcaagcacgacaacctcctgtagccaaacaagggtggttggaaggattcctctatttttggtgtgagatcaatggtagctcggacatcataggacatgatttgcgacgttcacaacttccttggcttgtgacggtggtgtagtgtgatattcgatatagttgatgggataatgtaaaaagttagttttctatattttgtgtttatgtgcttggatgatatgagcgaaactattgatttctatgtaatctctattgggtttcaatatttggttaactgagtgtctatgcatgttatgagttgggaatatcacactagtatgtagtgttttgtatgtttcatttcgttaaaaggaagtatgtgtaaagtttttatacattgttgctctattaaataaacatatccttgtgc

SEQ ID NO: 92875 - DNA, 3802 bp, Zea mays
  Clone ID: MRT4577_184692C.1
tttcacgcgtccgctgttgcaataattttgtaggcgagaattgggagagtctggaggctgccagccggtctagtggctcggccaaggcgagcggtggtcccagcgccgttctttccgcctggtgccggagtttcagtcttcaaggctgtgctcggagtttctgtgttctaggggccgggaggtgtgtgctggtgtgaatttggctttcttttgatccaattggtgcttaatttcagcctgtcgaaagaggcttctagcttgcaggttcatcgccgttggcgccgaacttgcctgccgtacagtctttctagtgccaaagttgaattttgaggaactgtgaagccgctttaagcaattacctttgccgaactttcctctaaaggcttgaccttttgggttccggagttcattgctgatcgacgggtcttggagtttttgtctactacctgcgttatgaacaggacatttctgcataagaaaagttgtctcctgtgcagatagccagatactcctgctttgctagtatatcaaattgcttcttgtgtttgaacaaagattctgttcagctagaagacagtgctctcctttatatcctgtctgtagctcaatacagtgctccaaatccatttcggcgtactaggtgtggataaggatccttgcctcgacgagtggagcaaagccatggatgtgcctacgcctcccaaccgtgccggctgcaacagtaacatcggcagccccatgcaatcttttgatgatccctttggtgttgctgccatgacgagctttgatggatactcggagctctgcagcccatcagttgctgatcacatattctccctgctgaatgatccctccgctgcgcaacagatggttgccatgtggtcatccttgggctcatctccgcgtgcttcagctgtgagagaagacatgtcgtttgacacctttcctgggcctgtggacgggacatcgtcacttgctcaaaggttcaactcagcagcagcatcgagtccaactggagtcgacagagggctaaaagagtcagatgggcttgttcttccaagtaatggctcacagcaagggagtagcatcattccgaggtctgttggcaacgctcttgcagacaggatgctcatggcgctatctttgttcaggaagtcattgagtgatggtgttcttgcccaagtctggatgcctgttgagcacaatggtcgtgtcgtgttgagtacatctgagcagccctatttacttgaccaggatcttgcaggttacagagaagtttctagaaatttcctgttttcagttaaggaggagcctggtctgcacctagggcttccagggagggtcttcatattcggctcgagggacctcaagtgttacgtattacagtaagccagagtatttgagaatggagcatgctcttcttcatgaaatacgagggtcacttgctatgccagtttatgatcccagcaagggttcttgttgtgcagttcttgaacttgtcacaaacaaggagaaacctgattttgatgcagagatggacattgtttgtgatgccttgcagggtgtgaacttgcagacaacaacagatcgcagcaatcagaaggtttactctgaaaatcagaaatatgcttctacagagattttggatgttctaagagctatttgccatgcacatatgcttcctttggcccttacatggatccctacatcaaacggcaccgctaatggtttttgtgtcgcaaagaatatcaggcttgattcgcaaccaggaaaatcagtacttcgtatccatgaatcagcttgttatgttaacgatgcaaagatgcagggatttcttcatgcatgtgctgaacgtcatcttgagaaagggcagggtattgcaggccgagcccttaaatctaatctgccattcttctcgcctgatataagagagtacagtatcgaagactacccgcttgcacaccatgctcgtaagtttggtctgcacgctgctgtagccatccggctgaggagtacgtacaccagttacgatgactacatactagaattctttctcccagtcaactgcaagggctgtggagagcagcagatgttattaaacaacctttccagcacaatgcaaagaatatgcaaaagcttgcgaacagtctctgaggcagagattgaaaatgttagtgctactgcagcaatgtatgagaagactagtggaacttgtttaccaactggtaactctgaaagttcctcacatgatgaccagccaatcacagaatctgcactccaggatctatctttgggtgacaaacaaggagacagagaacctgacaagccacagagaagctcaatgcgagttgcagataaaaagcgcagtgcatctgaaaagaactttagtctggatgttcttcgcaaatacttctctgggagcctgagggatgctgcaatgagccttggtgtttgtccaacgacattgaaacgaatatgcagacaacatggaatttcccgatggccatctcgaaagataaacaaggtcaatcgttcattgaagaagatagagaaggtcattaaatcagttcacggtgtggatagatccttgcagtacgatcctgctactgggtctcttgttcctgcaacctctcttccggaaaagatgccattctctgcttgcgatacattgcctacttcatctcttgggagagcagtggaggaaacatgtagcccaaaatcagaacaagatttctcttcgcctgatgggtggcaaagagaaactagccaatttcatgtttctggtatacctaaaaggggaggcgatgaagttcggacgttggcaaacaacaacaaaggcagaagaaactatgtttctggtattgcaaatatcacacagcattcaaactctgaaggcacacatggtccttcatatcccaatcccattggtgctgttaattctctgcatactggagaaacaggcaacatcgattctctgacctccctccacccaagcatggatggcattgaaggccaaacaacagtaaggaactcaccatttgtgcaacaagcagatgtcactatggtcgatggtcatgacaccaaggagcagacactcccttccacctctggcatgaccgattcttcgagcggcagcgcctcaagcgagcctactttcaaggggaacccaggacgtgccctcaaagaccgaagcagccctgcactgaccgtgaaagctacctacaatggcgacaccgtccggttcaagtttgtgccagcaaggggctggtaccacttgctggaagagatagcaaagaggttcaagctgacggctggagcattccagctcaaatacaaggacgatgaggacgagtgggtgatcctggcgaacgatgccgacctccaggagtgcatggacgtcctggactcgatcagctcacgcaacatgaagctgcaggtgcgcgacctctcctgccacgtgggcagctcgggcagcagcagcagctgcttgcaggtggaagcgcatagctcgtgacagaacagaagcctaggttaccgcccttagcctgttgtagtaggcccagtatcctgttgtcgccatagaggttccttgtccatgttcacgccatgtcgtcgtatggaatgtacaaatggcgagtgtagaaaaggaataaagtgtcatactcttcgcacggttgaaacgaaacgatgccgtgaaggtttttgtcataatctgttgttggtttcaaaagtcctggcaataatctgttgtcatgaagatgagttcatggcttaagctgcgatacgaaaaaaaaaaaaaaaa

SEQ ID NO: 92876 - DNA, 302 bp, Zea mays
  Clone ID: MRT4577_184693C.1
cggaagacatcaatggtgatggcgtcttctagcgggctgaggagctgcagcgccgtgggcgagtccagcctgctggcgccgtcataccggttcggccgcctggtgccgatttgagccaacgccaccacctttgggccgctgtaccaagttccgcggtgtggattgtccggtcaaggcatctcatgtccaactacactagttactatttcggggtctttggctttctatccgctgggcctcgtgatcgtgctggagaacttcgagcggttcaaggagtttcaggtgtatccattgccgttggg

SEQ ID NO: 92877 - DNA, 325 bp, Zea mays
  Clone ID: MRT4577_184694C.1
ggccaaagaaataccctttcctttggttaaattcacaaggggggagaatcctggcttaaagaatttttgttggggggtagattttacaacaaatcgggcaatgctttttggaccttatatgggtatttttttctaatatattttccttaaacctcctttgaagggactgactgacttactggctttatacaagggctgcaacggccttggggggggccctcagccaggatcatcgaatttttttggggggcaagcgagccttaaccagcagggggggcgttttaagcaggagctttgtttttttgttggaccaataggccttggc

SEQ ID NO: 92878 - DNA, 514 bp, Zea mays
  Clone ID: MRT4577_184695C.1
acatacaactgagaaagaaacattaaggcacttattacagaccatagctgtaaacgagggctgggtaggattattacacatatgaagggggagttgaaacccctaccaatagctcttaaacaaaaagatcctgtatggaggaccacggactacgggctcttaagtataggatttcttcattagataccaccttggagcaaaagcagcaaaaattcgctgaatttcttaggctgataacaagaaacgcgaaaaccctgaatatggaattactcagcaatggttaaccgactaatgaaaggactctgaagggtatgcaggataaataagactaaaagcacaggcttctgaaaaaattaagttatacttttgcataagtggcttagtaatagagagtccttactatcaatcttagaatggcatattaagtattaatagagtatatgagggtatatcctaatttcaacttataatcaggacaacaaaataaatatgcatagggttcacatgctgactt

SEQ ID NO: 92879 - DNA, 1932 bp, Zea mays
  Clone ID: MRT4577_184696C.1
atggctccaggcattaggttcagcaagagagtgagggcaggtgcacaaccagaggagcaatcttcaaaaaggcttcactctacagagacagatggccacaatgtacaggaaccaacagatggaaatgatcacataccaaacagccctactacacctggacttgctgatcatttcagcagagctgcagaggaagccatggcatctgctgctcatgacagtacaggtgatgctgaaggcaacagccgtactacacctggacttgctgatcatttcagcagagctgaagaggaagacatggcatctgctgctcatgacagtacagctcctacacagcgagcaccaaggagacccagggcagcaaccaagggaaaacaactggacaggatgactaaagttatgcaaaggagactgcccatagctgttgaggaaggcaaaaaaaggccacatgaacctgttcaagctgccaagtttgcatcagaggctggcatcattattcgggaaaccatgcctatcctaactcgttggaaagattacaaggacgaccagaaatactacaacagctttgtgtcacagctaaatgggcgcttgtccgttaacactgaggacaaggcaacaaaggaagcttgcaccgatatgctacgctctgcggtaaaaaaccagcgttatcggctcaagcagaaatacttcaatggtgtacctgcaaatgagattagcacaacttctcctgtatcttacatgactgatgaacagtggagggcattagttgcaaagtggtctgatccaaagaacatggaaataagtgaaaagaacaagcagaaccgcagtcaagtcaagtttcatcaggctacgggttctcactgctatgtggcacacttacatgcatataagcagaagagaaaccgagaagaacccagcttagatcagactgaagaactagatgcggtggacgccttcaagacctgtcataccagctccaaacgtggcctgagtgaaccggcaagagaagcactttctcatatggaggctttgagggctgaacctgttgctgaaggtgagatgccagcatccagtgtgcaccttgtgtccaaggtgctgtcccagagcagctcacaccaattcatgaaaagcgtcggcatcaaaacatcggcaacctccaaggcatcatcatcaagtcatagtgagcttcgggaacaacttgcagctgaagcgacggctgctgttcaaggtgaactcgaccagctcaggaagaaatgtgaagaagctgaggaacagcaggcgaggacacaaagggagttggaggagtacaagaagataacagagaagaacagcaaggagatggaggagaccaatgtgctcatcaagaagctcttgtccttgcatggcaaagtagttgccaaatatgttggggacaaacacaagggctccaagacttgtgtttgggtacctaaggtttatgcatccgggggctcaagttggataatcgatagcggatgcacaaaccacatgataggggagaaaagaatgttctcctcctacgagaaaaacgaatatccccaacgagctatcacattcggggatggaaatcaaggtgttactgtctttagaaggagtgatgattcagtagcatttaagggagtgttagagggtcagctatacttagttgattttaacaaagctgaacttgacacttgcttaattgctaagactaatatgggttggctctggcatcgccgactagcccatgttggaataaagaatctccacaaacttctaaagggagagcacattttgggactaacaaatgttcattttgagaaagacacggtttgtagcgcatgtcaagtaggaaagcaagttggcacccaccatccacacaagaacataatgacaacggacaggccactggagctactccacatggatctattgtag

SEQ ID NO: 92880 - DNA, 285 bp, Zea mays
  Clone ID: MRT4577_184697C.1
ccccgtccatgagctgggagcgcccttttagcgggccccgctccggccagagggagcgagctagcgtctgcctgaagcgccggccgagctggaatgggatggtatcagaggcgcgactacctgttcactgaacacgttcttatgatgggcactacgcctccccgcttccttgcacccggacaccactgcgagcacggcttcctctccccatgatttcaatatgaacacccactagaacctcacaaacgaagagatggagcagatgttagggcttttgaccatggg

SEQ ID NO: 92881 - DNA, 1503 bp, Zea mays
  Clone ID: MRT4577_184698C.1
atggctccaggcattaggttcagcaagagagtgagggcaggtgcacaaccagaggagcaatcttcaaaaaggcttcactctacagagacagatggccacaatgtacaggaaccaacagatggaaatgatcgcataccaaacaaccctactgcacctggacttgctgatcatttcagcagagctgcagaggaagccatggcatctgctgctcatgacagtacaggtgatgctgaaggcaacagccgtactacacctggacttgctgatcatttcagcagagctgaagaggaagacatggcatctgctgctcatgacagtacagctgccaagtttgcatcagaggttggcatcattattcgggaaaccatgcctatcctaactcgttggaaagattacaaggatgaccagaaatactacaacagctttgtgtcacagctaaatgggcgcttgtccgttaacactgaggacaaggcaacaaaggaagcttgcaccgatatgctacgctctgcggtaaaaaaccagcgttatcggctcaagcagaaatacttcaatggtgtacctgcaaatgagattagcacaacttctcctgtatcttacatgactgataaacagtggagggcattagttgcaaagtggtctgatccaaagaacatggaaataagtgaaaagaacaagcagaaccgcagtcaagtcaagtttcatcaggctacgggttctcgctgctatgtggcacacttacatgcatataagcagaagagaaaccgagaagaacccagcttagatcagactgaagaactagatgcggtggacgccttcaagacctgtcataccagctccaaacgtggcctgagtgaaccggcaagagaagcactttctcatatggaggctttgagggctgaacctgttgctgaaggtgagatgccagcatccagtgtgcaccttgtgtcgaaggtgctgtcccagagcagctcacaccaattcctgaaaagcgtcggcatcaaaacatcggcaacctccaaggcatcatcatcaaatcatagtgagcttcgggaacaacttgcagctgaagcgacggctgctgttcaaggtgaactcgaccagctcaggaagaaatgtgaagaagctgaggaacagcaggcgaggacacaaagggagttggaggagtacaagaagataacagagaagaacagcaaggagatggaggagaccaatgtgctcatcaagaagctcttgtccttgcatggtaactcttcttcgacatgagggctgctagtcagagctgctgtttttggcctgttctttgacatgagggtacccaaaaactctagttgctcgtgggtgtcaacttttgattatatgctgttatgtttgtgcaaactcaactgaaatgtgaactcaagtggtgatgctatgaactgagtttagtgttgtccacttagtttgtatgcgcactggaatactagttgtattcatctatagaaaaaaaaaaaaaaaaaagcggcc

SEQ ID NO: 92882 - DNA, 875 bp, Zea mays
  unsure (1)..(875): unsure at all n locations
  Clone ID: MRT4577_184699C.1
cattgggtacctcgaggccggccgggactggtacatcacctccggatcggatcctggctgtagggcacgacgcagcactggcgccgcaggaggtgaagagacggcggcgccgcacaactccgacggcaagtctccccaccaccttctcaccaatccctacaacaccaattatagttggggaaggtgaacctcctccctcttgggatccggtaccaactccaaaagacgaccttgatggtgaacaaaaggaggcacagaagtcagaaagtatcctagaagaggtagaaacacaacccttgcttcaaagaagaagatagaccccaacatggctccaggcattaggttcagcaagagagtgagggcaggtgcacaaccagaggagcaatcttcaaaaaggtttcactctacagagacagatggccacaatgtacaggaaccaacagatggaaatgatcacataccaaacagccctactacacctggacttgctgatcatttcagcagagctgcagaggaagccatggcatctgctgctcatgacagtacaggtgatgctgaaggcaacagccgtactacacctggacttgctgatcatttcagcagagctgaagaggaagccatggcatccgctgctcatgacagtacaggtgatgctcaagccaatgtagctagagatgaagaaactgaagctcctacacagcgagcaccaaggagacccagggcagcaaccaagggaaaacaactggacaggatgactaaagttatgcaaaggagactgcccatagctgntgaggaaggcaaaaaaggccacatgaacccctgtcagctgccaagtttgcatcagaggctggcatcattattcgngaaaacatgcc

SEQ ID NO: 92883 - DNA, 184 bp, Zea mays
  Clone ID: MRT4577_18469C.1
agaaaaactggtactgggccgtgcaactatatatgggcagcgcaataaacataaattatactacataacccataaaaccacaacactacttatctcttcacaacattggaaccaatcaccacataccttccaactaaaaaatccagcccatacacattttttacaccaacatatacatatcaca

SEQ ID NO: 92884 - DNA, 1281 bp, Zea mays
  Clone ID: MRT4577_1846C.1
atggtccacatcgtcgagcaccaagatttagtgcccgaggacttcatgctggaggaggaggctgcctcttccacaccacggtccaccaacttccctacacctggggcagccgctgttgtgcactctgcgcggcagcacactcccgcacagacatccagggcgtccagggctgcgcctgggcgctgtctgcgaccagagaactactgcgccacccctagctctactgcctcgccgggggccatgaagctgtggcgggacgatgtcgatcgtctgctcggcatggcgcactctggctcaaccaagcccaggcctcggtcatcccggcgtcaacatgaggcgtcgacatctgtgcgttcgccctcggtgagggccgcaccgactgaggacctgcgggcggagctcaaccgtcgatgcgcgggagaggatgctccagtctctctggagaggtctaatgacctgcgggcagaactcaaccgcaggcgtgcgggcgaggatgcccgcgtctctctagagagggcgcactccaacaggcgcccggatccaagcgggtgtcccttggccggcgtaggctgcgccgcgctggcggatcatctccgcgcggcaaattggccatccaagttctggccgcacctgccggaaaagtatgacgcccggacttggctcatgaaccttaccccggggtcgatctactcctgggaagagctctgcgcgaggtttatagcgaacttcgctagcgcttatcagcagcatggcatggaggcccacctccacgcagtgaggcaggagcccgaggaaactctccgaacattcatctcccgcttcaccaaggtacggggcaccgtaccttgtatttccgatgcttccatcatcactactttcctccagggggtacatgatgaaaagatgctggagaagttggccatgcatgacgtggaaactgtcaccacgctctttgctctggctgacaagtgcgccagagccgccgagggttgtgcatggcactcagcgccacagaccggggctgcccatacgggtggctcgggtgccgtcgctcaggacggcaaaaagaagaagaaaaagaaccgcggccatgagaagctgtcgtctacagctctagtcgtcgcagccgcgactaggggccggaacaagcgcaacaagcgcccacgacggcagaggggtaacagcggctcatgccctatacaccccaacagtcgccatagcgctgcggagtgtcgcaagatcatcgaactcgcgaagcgcgtcagcgagcagcgcgagtag

SEQ ID NO: 92885 - DNA, 604 bp, Zea mays
  Clone ID: MRT4577_184700C.1
atctggtataacttatttattttcttggttccatgaccttactgactgaaggttagatagggtccctgtaaggcggtagcggtaggctctaggattggcagatgcatgtaatcttttgcaaggatgctttgttgttttgttgaagtatgtgattttgcaaaagaaaatgtttcatggtttgtgtgtggaatcacatgatgttgttggacatataccactactatctattacaacacatgctcttgatcgtaaaaattaaaaattcatttccatgccctagaatcataacactcctgtgtaccttaatgttgtgcgtaggctcttgacatttatgagttatgaatgctgtgccctagaagcagatatttgttcatgtagatttccagcaagtgtgatctggacaacatggattaccccaaggacaggatcaaacagacagcacgttcttagtccacatgagtttgttaactactagcttaatttgttgtgcacagcactaaaaatatgtagttacttgtctttgttttggagttggcaatttgtctgtttatccattgtgaagcagcctggggaatctcttaagaaaggggtacccaagttttac

SEQ ID NO: 92886 - DNA, 218 bp, Zea mays
  Clone ID: MRT4577_184701C.1
gagaggtgagcgcgctctttggaggtataagactttcaattaatttccatgccaggatcggtggactacagggacagctagagagccccagagcaggggggctgccgggataggcgggcatagctacacgagatgccagaaggttctgggcatttagactgggcgggggttactgtgcttaagctggggaggagtaggcttggcggagggtgctgagc

SEQ ID NO: 92887 - DNA, 145 bp, Zea mays
  Clone ID: MRT4577_184702C.1
tttcgcgtttcacggcggcgcggatatagagccatcggcggcacactgaccgctggctaacggtacagagatgaccacggttatcctcagcgcctctcggccttccattgtcagcttcctcatgccgatgggggataacctcgtg

SEQ ID NO: 92888 - DNA, 553 bp, Zea mays
  unsure (1)..(553): unsure at all n locations
  Clone ID: MRT4577_184703C.1
gcaaggaggctcttggagatgaagacagagaatgctgggcactatgttctgattgctaacatgtatgcagctgcaggatgctggaatgagctagcaacagtcagaaaactgatgagggatatgggtgtcatgaaagcacctgggttagcatgggctgatcttggtaacgggttcaccccttttttggttggggatagatccaaccctctagcaccagaaatctatgaggttttggatgaactaactgaacaaatgaggaatatgagtaattgtagtgatctggacatactatccatgtaggaactcatggggtaaagtggcaatggtaggataagaatgataaattactgctgtggtgtaaaatggagttctttaatacactgtacatgggatttcaccatgaaccatagtgattaaagaaaaaaggtgatgtccttcaagaagcagctcatgcaagggctactgtgaagatgggcttgtcaccatacaccgaataacacagaattntaactgccacatctattgccattattggcctntgcaaatcaaaggc

SEQ ID NO: 92889 - DNA, 1103 bp, Zea mays
  Clone ID: MRT4577_184704C.1
gggtacctcgaggccggccgggccgggaagtcctcatcggacctcgtcgacgtccaccacctcgattgccaagtgtcaaatcagcaggcgtgggcgtacgatctcgacacggcagcaggagcctttgggccgtcgttacacgcacctatccatctcctctccgcggcacacgacacggcacgacacgatcgtggttggtgttagttacacgcgcctatatcggcggttcggccgcacgtccggcccgggctctcctcccctcttctcactcagctcaccagtgctcgctcacctttcccctccctttcctttcctttgctttcctatccttgtgccctcgaatcggaaacccagccagccatgtcgtactacggcgaccggcgcgcggagtcgtcgatcgtggaggcgttcacgctgtcgccgctgccgtacccggtgatcctggtgctgctgatggtgacgctgctgctgggcgcctcgtggttcttcacgtacgacgacttcatcgaggaggcgtcgcagcagctgagctgggcgctgctgggcgtgcccatcgcgctcgtcctcctcatccgctggatctcctccgtcgactccttcgagggctacctgggcttctacccgagggagagccgctggaagggccgctacgagcggggccccgccgagggcagctcgccctggggcgtcgccttgctcgtcctcctcctcctcgtgctcgccagcttccactccaccatccacgacatgtgggggccgtgaacggatgtgctcctgctcctggctcctgccttagcgcgcgcttggtgtgcttgtgctcggtcgatcgatcgatcgatgaagtcctcatgtctttttttttttcttctttttgtcctctgcgcgcggcgcttgcttggtatgttgtactccacgcgcgcacgtatggatcgatgattccatgtacatatttgttagggggatgctgcggtgcaggctatagagtttgagggtgatatacttactgatcagatcagtttgctgcctgtaagactggttttggttttgctataatcgtgatatattccgatgtacagcaaaaaaaaaaaaaaaaaaggccccta

SEQ ID NO: 92890 - DNA, 323 bp, Zea mays
  unsure (1)..(323): unsure at all n locations
  Clone ID: MRT4577_184705C.1
aaaanattattacaaaaaaaacgcgggcaaaaaaacaaccaacccaacaaaacaggggtccagggctacaaaaaaccaagcgggcaacacgtaaaaaggctacaaacaaggcaggcggaaacgaatcgaaggaaaggaacgcaaacggaacactaaaaaaacaaaaccaggaccgagggaggacaaaaggagcaaactcgaccttaagccaaaaggggacggcacgggcccaggcccaccagcgagggcgggggatctttggaggctccccaggccaaaaaggacccaaccgggggcggagagggccgagcccacccgtccgg

SEQ ID NO: 92891 - DNA, 1283 bp, Zea mays
  Clone ID: MRT4577_184706C.1
ttatgagaggatgcctgaaaaggcaaccagcgccgagtccactccttcagaacagcccatcgtcgtgcgcatgccgggtgacggttggtccgcctttcggatgagcaaagtagctgggagcagcatgttacaggctgcacctgctgtcaaagctaatagtgcagtgtctcagacaaaaccacgaagggctaagtacaggcaagtaaatgctgcagacaaatctccatgtcctgtgaaggtgaatcaggggaacagcgaagccgttagtaaggagtctctatcttgtgcagaaatgctatggcagctctgtttacaagcgaatggtcttcagcagagtgaggaaatcgttcctacaagtgtgaatttccttaccgttcacagaaacagcaaattttctggttcagatgtcaatgaggggatcactgagaaggcagccaacagtgagttcactgttgcagaacaggccattgctgatagtatgcaggatgaccagtgggctgacattctcagcattgatgctgagccggcgtttgcagttaataggaagatcaatgacattgggccagccgtaaacaagaaggcacctcaggttaagaaacctcctgttaattcattgtcgactgcagaaaatgtagacgagccaaggagtgaaggcaaccaagatacaggaaatgaggaacaacttaggaacgaaaccaagttgttttctgcaaatggatctcaactgaacgccggaaccaaatttggtcaagagatggaaaattgctttctgtctggactggtgctgcacttcagcaggccatgcgctgttccatcacagtgtgaccttatcaagatctttagccaatacggtcctgtcaatgaagtgaaggcagatgttgcaaacagtgccagctctgcccaggtgatcttcaagaggcgcatggatgctgaggcagcgtttgcaggtgctgggaagatcagtgcccttggacctgcccttgtgagctttcgtctcactgacttcccagctagtgcttcaggaaataaagcttcccatgttgcatcaaagagcgaatagtgttgcttgaccagtgaggtaaaaacggctttcgtatctcttccctagttgggtctgggtttgagtttgacagctgctgtatattatcttatgcacattatggtgtcctcttgtttttttagggaaactggatgggggagttagagaaaaaggtatactctactgtatgtggtagttaggttgttgcaggattaagaggaacagcaatgtcatctgggtcttc

SEQ ID NO: 92892 - DNA, 1030 bp, Zea mays
  Clone ID: MRT4577_184707C.1
cattgggtacctcgaggccggccggggtgcaagtcctcctcgatcacactccaccacgattgccaagtgtgaaatcagcaggcgtgggcgtacgatctcgacacggcagcaggagcgtttgggccgtcgttacacgcacctatccatctcatctccgcggcacacgacacggcacgacacgatcctggttggtgttagttacacgcgcctatatcggcggttcggccgcacgtccgcctcctcctctcctcccctcttctcactcagctcaccagtgctcgctcacctttcccctccctttcctttcctttgctttcctatccttgtgccctcgaactcgaatcggaaacccagccagccatgtcgtactacggcgaccggcgcgcggagtcgtcgatcgtggaggcgttcacgctgtcgccgctgccgtacccggtgatcctggtgctgctggtggtgacgctgctgctgggcgcctcgtggttcttcacgtacgacgacttcatcgaggaggcgtcgcagcagctgagctgggcgctgctgggcgtgcccatcgcgctcgtcctcctcatccgctggatctcctccgtcgactccttcgagggctacctgggcttctacccgacggagagccgctggaagggccgctacgagcggggccccgccgagggcagctcgccctggggcgtcgccttgctcgtcctcctcctcctcgtgctcgccagcttccactccaccatccacgacatgtgggggccgtgaacggccggatgtgggtcctgctcctgttcgattccacgcgcgcacgtatgcgattgtactgctggttgctgcttgatcgatcgatggatcgatgattccatgtacatatttgttaggggggatgctgcggctaggctattagctgcaggctatagagtttgagggtgatatacttactgatcagatcagtttgctgcctgtaagactggttttggttttgctataatcgtgatatattcagatgaaaaaaaaaaaaaaaaaagcggcc

SEQ ID NO: 92893 - DNA, 174 bp, Zea mays
  Clone ID: MRT4577_184708C.1
ccacaactttgattggctattccatgcaagggctctgcaaatacggcttttatgacgtcttcaaagccttatatagcaacatacttggtgaggagaacacctatctgtggcgtacatcactgtatctagctgcttctgccagtgctgagttctttgctgacattgccctggctc

SEQ ID NO: 92894 - DNA, 992 bp, Zea mays
  Clone ID: MRT4577_184709C.1
ggtgcaagtcctcctcgatccacaccaccacgattgccaagtgtcaaatcagcaggcgtgggcgtacgatctcgacacggcagcaggagcctttgggccgtcgttacacgcacctatccatctcatctccgcggcacacgacacgatcgtggttggtgttggttacacgcgcctatatcggcggttcgcccgcacgtccgcctcctcctctcctcccctcttctcactcagctcaccagtgctcgctcacctttcccctccctttcctttcctttgctttcctatccttgtgccctcgaactcgaatcggaaacccagccagccatgtcgtactacggcgaccggcgcgcggagtcgtcgatcgtggaggcgttgacgctgtcgccgctgccgtacccggtgatcctggtgctgctgatggtgacgctgctgctgggcgcctcgtggttcttcacgtacgacgacttcatcgaggaggcgtcgcagcagctgagctgggcgctgctgggcgtgcccatcgcgctcgtcctcctcatccgctggatctcctccgtcgactccttcgagagctacctgggcttctacccgagggagagccgctggaagggccgctacgagcggggccccgccgagggcagctcgccctggggcgtcgccttgctcgtcctcctcctcctcgtgctcgccagcttccactccaccatccacgacatgtgggggccgtgaacggatgtgctcctgctcctggctcctgccttagcgcgcgcttggtgtgcttgtgctcggtcgatcgatcgatcgatgaagtcctcatgtctttttttttttcttctttttgtcctctgcgcgcggcgcttgcttggtatgttgtactccacgcgcgcacgtatggatcgatgattccatgtacatatttgttagggggatgctgcggtgcaggctatagagtttgagggtgatatacttactgatcagatcagtttgctgcctgt

SEQ ID NO: 92895 - DNA, 366 bp, Zea mays
  Clone ID: MRT4577_18470C.1
gggggccctttgaaccctttgattggtgaaccaggcattcaaagggtgcccctttttttgcaacaaatacagaacttaatcctttgcaagcccaaaaataacttattttagcagggttacaggaacccacattcccaactacaacgaaaacctaacgtgctacacaaacacatgttgatacgggagcatcctggaagtgccaccaaaggcggagtcaagggcttagtcctcgtaaccagccgaaaccttggggcttcccccgccggccttttttgggagcaaaaggttttggattttgggcattacacccccctttgcgatggtcaccgggcccaacaagggggagagctcttcttcctttcggac

SEQ ID NO: 92896 - DNA, 857 bp, Zea mays
  unsure (1)..(857): unsure at all n locations
  Clone ID: MRT4577_184710C.1
gccggccgggtctgctcctctcctcccctcttctcatcaggcaggcactcagctcaccagtgctcgctcacctttccccttcctttcctatcctatccttgtgcagttgtgccctcgaactcgaatcggaaacccagccagccatgtcgtactacggcgaccggcgcgcggagtcgtcgatcgtggaggcgttcacgctgtcgccgctgccgtacccggtgatcctggtgctgctgatggtgacgctgctgctgggcgcctcgtggttcttcacgtacgacgacttcatcgaggaggcgtcgcagcagctgagctgggcgctgctgggcgtgcccatcgcgctcgtcctcctcatccgctggatctcctccgtcgactccttcgagggctacctgggcttctacccgagggagagccgctggaagggccgctacgagcggggccccgccgagggcagctcgccctggggcgtcgccttgctcgtcctcctcctcctcgtgctcgccagcttccactccaccatccacgacatgtgggggccgtgaacggatgtgctcctgctcctggctcctgccttagcgcgcgcttggtgtgcttgtgctcggtcgatcgatcgatcgatgaagtcctcatgtctttttttttttctttctttttgtcctctgcgcgcggcgcttgcttggtatgttgtactccacgcgcgcacgtatggatcgatgattccatgtacatatttgttagggggatgctgcggtgcaggctatagagtttgagggtgatatacttactgatcagatcagtttgctgcctgtaagactggttttggntttgctataatcgtgatatattccgatgtg

SEQ ID NO: 92897 - DNA, 1044 bp, Zea mays
  Clone ID: MRT4577_184711C.1
ccacgcgaccgctcaatcaggcaggttgtgagcttaccagagctcgctcacctttccccttccttgccttacctatccttgtgcagatgtgccctcgaatcgggaacccagccatgtcgtactacggcgaccggcgcgcggagtcgtcgatcgcagaggcgttcacgttggtgcctcgaggccggccggtgattggcgtcgagacgtgtaagcacacgtccccgtcctcctctcctcccctcttctcactcagctcaccagtgctcgctcacctttcccctccctttcctttcctttcctttcctatcctcgtgccctcgaatcggaaacccagccagccatgtcgtactacggcgaccggcgcgcggagtcgtcgatcgtggaggcgttcacgctgtcgccgctgccgtacccggtgatcctggtgctgctgatggtgacgctgctgctgggcgcctcgtggttcttcacgtacgacgacttcatcgaggaggcgtcgcagcagctgagctgggcgctgctgggcgtgcccatcgcgctcgtcctcctcatccgctggatctcctccgtcgactccttcgagggctacctgggcttctacccgacggagagccgctggaagggccgctacgagcggggccccgccgagggcagctcgccctggggcgtcgccttgctcgtcctcctcctcctcgtgctcgccagcttccactccaccatccacgacatgtgggggccgtgaccggatgtagtgattgtagtcctgctcctgttcggttccacgcgcgcacgtatgcgcttgtactactggttgctgctcgatcgatcgatgattccatgtacatatttgttagggggatgctgcggtccaggctatagagtttgagggtgatatacttgctcatcagatcagtttgctgcctgtaagactggttttggttttggttttgctataatcgtgatatatatattccgatgtacagtaaaaaaaaaaaaaaagcttcctttccctgtcttggaattgactggtggagtggaaccgtc

SEQ ID NO: 92898 - DNA, 654 bp, Zea mays
  unsure (1)..(654): unsure at all n locations
  Clone ID: MRT4577_184712C.1
aattcggcacgagggtttgttagagttgcttagctattaagttagtgttacccctctatataaggagggcaaggtgttattagaagataagcaagaataatatatctgggtttactcatggcctcctatgggaggacgagtaccagttctatcttgccaaatatacgtgttcgtaacacttccccttttcttcatccctctctagctccatcctcgagctggacttccttcttgagactgaccccgtggctcctcctgtcaactacctcttctttttcccatgcaggttcgcctccgccgctcccacatgtagccccggtgccctccacgccacacgcgactcccccatcttggtctgtgccatctcccctctacgagccatgtgaggcccgacgtccccactacgccacatgttccttgacgccctctctactccacgcgcggnctcgacccctcctcaccccttacggttgagccaccagtgacctcatctgcttcgccgatcttgtgcatgtttattagcgctgtgcacggacgggtggaccttctcgctcttgggctgagcaggtggngtatcattcttctcttcttcaccgagacctgccacatncacccgatggtgacatgtcaagggcgtcgagttcgtcctatgga

SEQ ID NO: 92899 - DNA, 5541 bp, Zea mays
  Clone ID: MRT4577_184713C.1
atgatggctcgtcttagacacactgcacgaaagtctgtcatccccttcttaccctctcgtctcgcggagcgtccgcttcgccgtcccgtggccggtcagtccagtcacttggagcggctgcaccatcacctgcatgaggagcaggagcatcgacgacaggagcagcagggctcttctttctcgctccagcaggagatagagtctgtgaggagctgctcccccgtgcttcctctggaggcgccccctgcaccacctctgggcgccccagcccctggagtagctgctggaggagacccagatgacggaggtggtgacgacagctcgagccacgacactgacttttctgctgaccaggagccggaaggatgggttgctcgacccatcactcgcgacgctgctcgcgggtgtcacttccacgatgcgctcgacaccctgctacgtcgggcacttgaccggcgtacttggtctatcgagtatcgctgtgtggtctaccagcatagtcgcggggtctacccggaccactgggaggcgacctgcttggtgcgtcgtccggataacattctccagggtgctaaggtctgctcggagcactattccatctctgagcgggactcagctgaggcagccatgcaagatgctgcacggcgtgcgctttcgcactactgctcagtgctcggtgggatgtcagaaaacaggcgcagaggaggaaggcgtgctcagcaggagcaagccgctcagcaggaagaggtaccccagcaacagcaactgccgcccccgcccccgatgtccatcgagcagatgttcttgatgcagactcaggcagtccaagccatcggtcagactctggccgccattcagcagcagcagcaacagccaccacctcaacctcagatgcctcagatgcccagagacaagtgtgctgaattcatgagaggtcatcccccaacgtttgctcattcttctgaccccatggatgctgaagactggctgcgcatgtggaacgggaattgcataccgctcagtgcgatgacagggagaaagttctgtctgatgacagtgaagaaggaggagttcctggccctcaaacaagggtcatcgtctctcagtgagtaccgggacaggtttctgcagttgccttgctatgctcctgaagatgtcaacaccgatgccaagcgacagtaccgtttcctgagaggcttggtcgaccctctacagcagaaccagcgtccacctcagcatcagcagttccaaaggcagtatcctcagcaccagtatcagaatcgtcagaacaatcagtcaggaggaggtcagtttcagaggcaaaatcagcaggcacctcgtcttcctgcccccgcaactcagcagaacagtcaagtagccccagctcaggttggaaacagagcatgtttccactgtggagagcaaggccattgggtgatgcaatgtccgaagaaggcagcccaacagcagtcaggccccaatgccccagcaaagcagaatgtgtctcagcctggagcaggcaaccgttctcaaccgcgctataaccatgggagattgaaccacttggaggctgaagcagttcaggagacccccgacatgataatatgtatgttcccagtcgactcccatattgcagaagtgttatttgatactggagcaacacattctttcattactgcatcatgggtagaagcacatagtcttccgataactaccatgtcaacccccattcaaattgactcagccggtggtagaattcgagccgacagcatttgtttgaatgtaagtgtggaaataagggggatagcgtttcccgctaacctcatagtaatgggtactcagggaatagacgtcatcctagggatgaattggctagataagtatcaggcatttatcagttgtgacaagaggacaatcaagttggtgtccccactaggagaggaagtggtgaccgaattagttccgcctaagccgaagaaaggaagttgttatcagatggctgttgatagcagtgaagcagacccaattgagagtatcaaggttgtgtccgagttcccagacgtgtttccaaaggacttaccgggtatgccaccagagcggaaagttgagtttgctatagagcttcttcctggcaccgcccccatcttgaagagagcttacagagtatcaggaccagagttggttgaacttaagaagcagatttatgagctgtcagagaaaggttacatccgaccaagcacctcgccttgggccgcccctgtcctatttgtggagaagaaagatggcaccagaaggatgtgtatcgattatcgagctctgaatgaggtcaccatcaagaacaggtaccccttgcccagaatagaagacttgttcgaccagttgagaggagccagtgtgttctccaagatagatctgaggtcaggttatcatcagctcatgattcgaccttcagacattccgaagatggcattcattaccaagtatgggttgtatgagttcactgtgatgtctttcggtctaacaaatgcaccagccttctttatgaacttgatgaacagtgtattcatggattatcttgataagtttgtggtggtattttatgatgacattctgatatactctcaaggcgaagaagaacatgctgatcatttgaggatggtattacagatattgcgagagcaccagttgtatgcaaatttgagcaagtgcgagttctggatcagtgaagtcatgttcttgggtcacataatcaacaaagaaggattggccgtggattcgaagaaagtggcagacattctgaactggaaagcgccaacggatgctcgaggaatcaagagtttcgttggaatggccggatattatcggcgattcattgaagggttttcgaaggttgcaaaaccaatgacagctttgctaggcaacaagctgaaagttcatgagaagaattacccaatccatgacctagagttggcagcagtggttcacgcattgaagacatggaggcactatctgtatggacagaaatgtgatgtttacacagaccacaagagtctgaagtacatattcactcagtcagagctgaatatgaggcaacgaagatggttagagctgatcaaagactacgagttggagattcattaccatccaggcaaagcgaacgtggtggcagatgctttgagcaggaagagtcaggtcaatctgatggtcgcttgtccaatgccttatgagttggccaaagagtttcacaggttgagtctcggatttctgaacaacacgcgaggagtcacaattgagttggaacctaccctagagcgggaaatcaaagaagcgcagaagaatgatgagaagatcagtgagatccggcgactgattctagacggcaagggcaaagattttcgggaagacgcagaaggtgtgatatggttcaaagaccgcttgtgtgttcccaatgtccaatccattcgagagttgatcctcaaggaagctcatgagacagcctattcgattcaccatggtagtgagaagatgtatcaggatctgaagaagaaattctggtggattctgccagggcctctgctgtgtgcacattttatatgcttaagggccaacataagaaggtaccctggtgactggtgcaggactggaggtggttctcaaatctcaagcccatccatggcgcctacaagtggatccggctccgggacgcaagctaatcgtccaccattgtcttcacgtggtgctgcaacgaggagggggagggtgacctcaaaccggtcaactatcaatcgtgctgatgctgctggtacacctacatcgacgccgacaccgagtgcagacccatcaagtgccggcgatgctactgctagtggcacaccaacaccatcatcaagtactaatgctccacctgcagcagcacaaccacaatcaggtatagacaatgtcattgtggaagatgatgatactgttattgttgggacgaagaggaagctgaaatctgatgtttggctagagtttgaacaagtaactgttggtggtaaattaaaagctcaatgtaattggtgtaaaaagcaattagttggagatagtaaagccggtacaactcatttgcatagtcatcttggaagttgtcaatcacggcaagttagaaaaggattaaagcaagcaaccttgaagttgagtaaggatgagcatggagcaataatagttgataagtatgtttttgatcaacaagttgctaggaaagaactcgcaataatgatatgtgtccacgagtatccactttcaatggttgatcatgttggttttaggagattttgtgcagctctacaaccacttttcaaaacaatgtctaggaacactattaaaaaggacattttagatatgttcatatatgtgcccgctccacatacaggagaaattataagtgatgttctttacgaagtcttacaagattggcaaattgagaagaaagtctcgacagtgactcttgacaactgcaccactaatgataatttgatgtgctgcatgcaagataagttgcctctttcctctctcatgctagatggaaaattgtatttggaagagccaacacttccaagaactcaagagcttgacattatttcttggtggcaacatgcgggaattaaatacccaactcttagaaaaattgctcgggatatcatggcaattccggttacaacagtggcatcagaatctgtttttagtactggagggaggtgcactgctctatgtgttgctgtccaacagtccaagaccaagacatgtgttgctgacttgctgttgctgtccaaagaaaaacatgtgttgctgtccaagttgctgtccaaactccaaagaaaatccttgctgtccaaagagatgaagcctaaaatatcattgttttcagcttatcatccacagacagatggtcagaccaaaaggaccaatcaaatcctcgaagacatgttgagagcctgtgcgttgcaagatcagtccggatgggacaagcgattgccttatgcagagttctcctataacaacatttaccaggctagcttgaagatgtcaccatttcaggcgctttatggaaggagttgtagaactccgttgcaatgggatcagcctggagaaaagcaagtgtttgggccagacattttgcttgaagctgaagagaacatcaagatggtccgagagaatctgaagatagcgcaatcaaggcagcgaagctatgcagacacaagaagaagagagctaagttttgaggttggagactttgtctatctgaaagtgtcaccgatcagaggagtcagaagatttggagtcaaaggcaagctagcaccccgctacatcggtctgtatcagattctcgcaaggcgtggagaagtggcctatcagctcagcctgccagaaaatttgtctgctgtgcatgatgtttttcatgtgtctcagttgaagaagtgtctgcgtgtgccagaagagcagttgccagttgaaggtctggaggtccaggaggacttgacctacatagagaaaccagcgtaa

SEQ ID NO: 92900 - DNA, 285 bp, Zea mays
  Clone ID: MRT4577_184714C.1
ctgatgtcgtcgtcgttgctgtctccgacggcggggaggacgtccgggtcggacggcgactcggcggcggacacgcacaggggcgagaaaagccgactgacgaaaggcagacggagagggggagccagctcctcaactacaaagaacagaagaggagcgagaatgccaagtcctcccgcgggacgacggcggaaccgtcgacgaccagcgccgcgcaggccaacttccagacgctcctggacgccgagatcgacaagcccaacgccttcttcctgaagcgagagg

SEQ ID NO: 92901 - DNA, 857 bp, Zea mays
  unsure (1)..(857): unsure at all n locations
  Clone ID: MRT4577_184715C.1
ccggccgatcacccagtgaccctgctctccacagtggaaacatgccctgtttccaacctgagctggtgctgcctgactgttctgctggtttgctggggcaggaagacgagatgcttgctgattctgcctttgaaactgacctcctgactgatggttctgacggttctggtactgatgctgaggatactgcctttgaaactgctgatgctgctgaggtggacgctggttctgcctgaactgctgaggttgattgcctgaaaaacgagggcggctgctgcttccaggctggggtccactgatcttgcgcttacgatcttccatctccttacgcttcccttctgtcatgatcgctctatcaatcaggtgctggaatgtcgggaaggtgtggttcatcagctgatactgcagagggtcaaccaagcctctcagaaaacggtactgccgcttagcatcggtgttgacatcctcaggagcatagcgagacaattgcaggaacctgtccncggtgatggtggtcggggttgggcatggggtggncgaaggtaagactcccaccatngattggngctgctcctctcaacagacggggaccatacaagactttctccctgtcatcacactgagcggtatgcaactcccgctccacagtgcgcagccaatcttcagcatccatgggggtcagaagagtgagcgaacggtntgntggatgacctctcatgaattcagcacgcttgtctctgggcatctngagctcggaaagctggggtggcgccttgctgctgntgctgctgctgctgctgaatggcgccaaagtctgaccgatggcttgaactgcctgagtctgcatcaaaacatct

SEQ ID NO: 92902 - DNA, 4269 bp, Zea mays
  Clone ID: MRT4577_184716C.1
atgtcgatcgagcaaatgtttctgatgcagactcagacagttcaagccatcggtcagactttggccgccattcagcagcagcagcagcaacagcagcaggcaccacctcagcctcagcctcagatgcctagagacaagcgtgctgaattcatgagaggtcatccaccaacgttcgctcattcttctgaccccatggatgctgaagactggctgcgcactgtggagcgggagttgcataccgctcagtgcgatgacagggagaaagtcctgtatggtccccgtctgttgagaggagcagcccagtcatggtgggagtcttacctcgccacccatgcccaccctgacgccatcacctgggaagagttcagaggaagctttcgtcagtaccatgtccttgcaggtctgatgactgtgaagaaggaggagttcctggctctcaagcaagggccatcgtctgtcagtgagtaccgagacagatttctgcagttgtctcgctatgctcctgaagatgtcaacaccgacgccaagcgacagtaccgtttcttgagaggcttggttgaccctcttcagtatcagctgatgaatcacaccttcccgacatttcagcacctgattgatagagcaatcatgacagagaggaagcgtaaggagatggaggatcgtaagcgcaagatcagtggaccccagcctggaagcagcaatcgtcctcgtttctcaggcagtcaacctcagcagttcaggcagaaccagcgtccacctcagcagcatcagcagttccaatggcagtatcctcagcaccagtaccagaaccgtcagagcaatcagtcaggaggtcagtttcagaggcagaatcagcaggcacctcgtcttcctgccccagcagcccagcagaacagtcaggcagcaccagctcaggttggaaatagagcatgtttccactgtggagagcaaggccactgggtgatgcaatgtccgaagaaggcaacccagcagcagtcaggccccaatgccccagcaaagcagaatgtgcctcagcctggagcaggcaatcgctctcatacgcgctataatcatggaaggctgaaccacttggaggctgaagcagttcaggagacccccggcatgatagtaggtatgttcccagtcgactcccatattgcagaagtgttatttgatactggagcaacgcattctttcattactgcatcatgggtagaagcacataatcttccaattactaccatgtcaacccccattcaaattgactcagccggtggtagaattcgagccgatagcatttgtttgaatataagtgtggaaataagggggatagcgtttcccgctaaccttatagtaatgggtactcagggaatagatgtcatcctagggatgaattggctagataagtatcaggcagttatcagttgtgatgaaaggacaatcaagttggtgtctccactaggagaggaagtggtgaccaagttagtcccgcctgggccaaagaaaggaagttgttatcagatggccgttgatagcagtgaagcagacccaattgagagtatcaaggttgtgtctgagttcccaaatgtgtttccaaaggacttaccgggtatgccaccagagcggaaagttgagtttgccatagagcttcttcctggaaccgcccctatctttaagagagcttacagaatatctggaccagagttggttgagcttaaggagcagattgatgagctgtcggagaaaggttacatccggccaagcacctcgccttgggccgcccctgtcttgtttgtggagaagaaagatggcaccaagaggatgtgtatcgattatcgagctttgaatgaggtcacgatcaagaacaagtatcccttgcccagaatagaagatctgttcgaccagttgagaggagccagtgtgttctccaagattgatctgaggtcaggttatcatcagctcaggatccgaccttcggacattccgaagacggcattcatttccaagtatggtttgtatgagttcactatgatgtcttttggtttgaccaatgcgccagcgttcttcatgaacttgatgaacagtgtattcatggattatctcgataagtttgtgggggtattcattgatgacattctgatttattcccaaagcgaagaagagcacgcagatcatttgaggatggtattgcagagattgcgagagcaccagttgtacacaaagttgagcaagtgtgagttctggatcagtgaagtcctgttcttgggtcatataatcaacaaagaaggattggctgtggatccgaagaaagtggcagacattttgaactggaaagcgccaacagatgctagaggaatcaagagtttcattggaatggccggatattatcggcgattcattgaagggttttcgaagattgcgaaaccgatgacagcgttgctaggcaacaaagttgagttcaagtggacccagaaatgccaagaggcctttgaagcgctgaaagagaagttgacaacagtgcctgtcctagtcttgcctgatgtgcacaagcccttctcggtgtattgtgatgcttgttacacaggtttgggatgtgtgttgatgcaagagggaagagttgtggcttactcgtcccgacagctgaaggttcatgagaagaactacccaatccatgatctagagttggcagcagtggttcacgcactgaagacatggaggcactatctgtatggacagaaatgcgatgtttacacagatcacaagagtctgaagtacatatttactcagtcagagttgaacatgaggcaacgaagatggttagagttgatcaaagactatgagttggagattcattaccatccaggcaaagcaaacgtagtggcagatgctttgagcagaaagagtcaagtcaatctgatggttgctcgtccgatgccttatgagttggccaaggagtttgacaggttgagtctcggatttctgaataattcacgaggagtcacagttgagttggagcctaccctggagcgcgaaattaaagaagcgcagaagaatgatgagaagatcagtgagatccggcgactgattctagatggcagaggcaaagattttcgagaagatgcagaaggcgtgatatggttcaaggtccgcttgtgtgttcccaatgtccagtccattcgggagttgattctcaaggaagctcatgagacagcttattcgattcaccctggcagtgagaagatgtatcaggatctgaagaagaaattctggtggtacggaatgaaaagggaaatcgcagagcatgtggctatgtgcggtagttgtcgaagaattaaggcagagcaccagagacctgctggattgttgcaaccgttgcagatccctcagtggaaatgggatgaaattggtatggatttcatagtcggattgcctcgcactcgagccggctacgattccatttgggtagtagtggaccgcttgaccaagtcagcccacttcataccagtcaagaccaactatagcagtgccgtattggcagaattgtatatgtctcggatcgtttgtcttcatggtgtgccaaagacgatagtgtcagacagaggaacgcagttcacctctcatttctggcagcagttgcatgaagccttgggcacgcatctgaatttcagttcagcttatcatccgcagacagatggtcagaccgaaaggaccaaccaaattcttgaagacatgttgagagcctccgaagagaacatcaagatggtccgagagaatctgaagatagcgcaatcgaggcagcgaagctatgcagacacaagaagaagagagctgagtttcgaagtcggagactttgtctatctgaaagtgtcaccgatcagaggagtcagaagattcggagtgaaaggcaagctagcaccccgctacattggtccgtatcagattcttgcaagacgtggagaagtggcctatcagctcagtttgccagagaatttgtctgctgtgcatgatgtctttcatatgtctcagttgaagaagtgcttgcgtgtgccagaagagcagttgccagtggaaggtcttgaagtccaggaggacttgacctacgttgagaagccagtgcagatccttgaggttgcagaccgagtcacccgaaggaagaccatcagaatgtgcaaagtcagatggaatcaccactctgaggaagaagcaacctgggagcgtgaagatgatctgatggctaagtaccctgagctctttgctagcccaccctaa

SEQ ID NO: 92903 - DNA, 5604 bp, Zea mays
  Clone ID: MRT4577_184717C.1
atggagagtcatgatctctgggcaaaaagggaatcacgacttgtgggtggctatgagatcgatggtttcggttatgactatggtgctggtaagtggtattctttccgtttggaaaggatggctcgacttagacacactgcacgaaagtccgtcatccccttcttaccctcccgccttgctgagcgtccgcttcgccgtcccgtggccggacagtccagccacttggagagactgcaccaccgcctgcatgaggagcaggaacgtcgacgacaggagcagcagggctcttctttctcgctccaacaggagatagagtctgtgaggagctgttcccctgtgcttcctctggaggcgccccctgcaccatcactgggcgccccaacttctggagtagctgctggaggggacccagacgacggaggtggcgacgacagctcgagccacgacaccgacttctctgctaaccctgagccggaaggatgggttgctcgacccatcactcgcgacgctgctcgcgggtgtcacttccacgatgcgctcgacaccctgctacatcgggcacttaaccgacatacttggtccatcgagtatcgctgtgtggtctaccagcacagtcgcggggtctacccggaccgctgggaggcgacctgcttggtgcgccgttcggagaacagtctccagggtgcggaggcctgctcagagcactattctatctctgagcgggactcggctgaggcagccatgcaagatgccgcacggcgtgcgctttcgcactactgctcggttctcgatggggtagctgacggtctcgacctgaagtattacccccgccgtccatctggcagcacaggaggcgtgattgtctcacctgttggtgacgacaatcctaggttgagcagcacagtcaacctagccgccgtgctaaacacggagctggaccatgcgctagacgagctgagtagggctcgtgctgagatctccctgctgcgggctgagcgcgcggagcgtcgtcacctggacgatggttcccccactcccgtcgggactcagcacccgtaccgctcacctcggcgtggacaccgcgttgtggagaactctatactctcttcttatgctgcaagatttgcaagatcagttctgatgtgtgattgcattctgcagatatcagaaaacaggcgcagaggaggaaggcgtgctcagcaggagcaggcagctccgcaagatgaggtgccccagcaacagcacctgccgcccccgcccccgatgtccatcgagcagatgtttctgatgcagactcaggcagttcaagccattggtcagactctggccgccattcagcagcagcagcagcaggccccacctcagcctcagatgcctagagacaagcgtgctgaattcatgagaggtcatcccacaacattcgctcactcttctgaccccatggacgctgaagactggctgcgcactgtggagtgggagttgcataccgctcattgtgatgacagggagaaagtcctgtatggtccccgtctgttgagaggagcagctcagtcatggtgggagtcttatctcgccacccatgcccaccccgacactatcacctgggaagagttcagaggaagctttcgtcagtatcatgttcctgcaggtctgatgacagtgaagaaggaggaattcctggctcttaagcaagggtcgtcgtcggtcagtgaataccgggacaggtttctgcagttgtcccgctatgcacctgaagatgtcaacaccgacgccaagagacaatatcgtttcctgagaggcttgattgaccctctgcagtaccaattgatgaatcatactttcccgacattccagcacctgattgacagagcaatcatgacagagaggaagcgtaaggagatggaggatcacaagcacaagatcagtggaccccagcctggaagcagcaatcgccctcgtttctcaagcaatcaacctcagcagttcaggcagaaccagcgtccacctcagcagcatcagcagtttcaaagacattatcctcagcaccagtatcagaatcgtcagaacaatcagtcaggaggaggtcagtttcagaggcagaatcagcaggcacctcgttttcctgccccagcaaaccagcagaacagtcaggaagcaccagctcaggttggaaacagagcatgtttccactgtggagagcaaggccattgggtgatgcaatgttcgaagaaggcagcccagcagcaatcaggccccaatgccccaacaaagcagaatgtgcctcagccaggagcaggcaaccgctctcagccgcgttataatcatgggagactgaaccacttggaggctaaagcagttcaggagacccccggcatgatagtaggtatgttcccagtcgactcccatattgcagaagtgttatttgatactggagcaacacattctttcattactgcatcatgggtagaagcacataaccttccaattactaccatgtcaacccccattcaaattgactcagccggtggtagaattcgagccgatagcatttgtttgaatgtaagtgtggaaataagggggatagcgtttcccgctaatctcatagtaatgggtactcagggaatagatgtcatcctagggatgaattggctagataagtatcaggcagttatcagttgtgataagaggacaatcaagttgatgtccccattaggagaggaagtggtgacggagttagtcccgcctgagccgaagaaaggaagttgttatcagatggctgtcgatagcagtgaaacagacccaactgagagtatcagggttgtgtccgagttcccagatgtgtttccaaaggacttaccaggtatgccaccagagcggaaagttgaatttgccatagaacttcttcctggaatcgcccccatcttcaagagagcttacagaatatctgggccagagttggttgagcttaagaagcagattgatgagctgtcagagaaaggttacattcggccaagcacctcgccttgggccgcccctgtcctatttgtggagaagaaagatggcaccaaaaggatgtgtatcgattatcgagctttgaatgaggtcacgatcaagaacaagtaccctttgcctagaatagaagatctgttcgaccagttgagaggagccagtgtgttctccaagatagatctgaggtcgggttatcatcagctcaggattcgaccttcagacattcctaagacgacattcattaccaagtatgggttgtatgagttcactgtgatgtctttcggtctaaccaatgcaccggccttctttatgaacttgatgaacagtgtattcatggattaccttgacaagtttgtggtggtattcattgatgacattctgatttattctcaaagcgaagaagagcatgcaggtcatttgaggatggtattgcagagattgcgagagcaccagttgtatgcaaagttgagcaagtgtgagttctggatcagtgaagttctgttcttgggtcacataatcaacaaagaaggattggctgtggatccgaagaaagtggcagacattctgaactggaaagcgccaacagatgctcgaggaatcaagagcttcattggaatggtcggatattatcggcgattcattgaagggttctcgaaggttgcgaaaccaatgacagcgttgataggcaacaaggttgagttcaagtggacccagaaatgtcaagaggcctttgaagcgctgaaagagaagttgactaccgcgcctgtcttagtcttgcctgatgtgcacaagcccttctcggtgtatttcgatgcttgttacacaggtttgggatgtgtgttgatgcaagagggaagagttgtggcttactcgtcccgacagctgaaggttcatgagaagaattacccaatccatgatctagagttggcagcagtggttcacgcactgaagacatggaggcattatctgtatggacagaaatgtgatgtttacacagaccacaagagtctgaagtacatattcactcagtcagagctgaatatgaggcaaagaagatggttagagctgatcaaagactatgagttggagatccattaccatccaggcaaagcgaacgtagtggcagatgctttgagcaggaagagtcaagtcaatctgatggtcgctcatccgatgccctatgagttggccaaagagtttgacagtgagatccggcgactgattctagatggcaaaggcaaagattttcgggaggatgcagaaggtgtgatatggttcaaagaccgcttgtgtgttcccaatgtccaatctattcgagagttgattctcaaggaagctcatgagacagcttattcgattcaccctggcagtgagaagatgtatcaggatctgaagaagaaattctggtggtgcggaatgaagagggaaatcgcagagcatgtggctatgtgcgatagttgtcgaagaatcaaggcagagcaccagagaccagctggattgttgcaaccgttgcaaatccctcagtggaaatgggatgagatcggcatggatttcatagtcggattgcctcgtactcgagccggctacgattctatctgggttgtagtggaccgtttgaccaagtcagcccacttcatacctgtcaagaccaactacaacagtgcagtattggcggaattgtacatgtctcggatcgtttgtcttcatggtgtgctaaagaagatagtgtcagacaggggaacgcagttcacctctcatttctggcagcagttgcatgaagccttgggcacacatctgaatttcagttcaacttatcatccgcagatagatggtcagactgaaagaaccaatcaaatcctcgaagacatgttgagagcctatgcgttgcaagatcagtccggatgggacaagaaattgccttatgcagagttctcctataacaacagttaccaggccagcttgaagatgtcaccatttcaagcgctctatggaaggagttgtagaactccgttgcaatgggatcagcctggagaaaagcaagtgttcgggccagacgttttgcttgaagctgaagagaacatcaagatgattcgagagaacctgaagatagcgcaatcaaggcagcgaagctatgcagacacaagaagaagagagctgagtttcgaagtcggagacttcgtctatctgaaagtgtcaccgatcagaggagtcagaaggttcggagtgaaaggcaagctagcaccccgctacatcggttcgtaccaaattctcgcaaagcgtggagaagtggcctatcagctcggtttgccagaaggattgtccgcagtgcatgatgtctttcatgtgtctcaattgaagaagtgcttgcgtgtgccagaggagcagttgctagtggaaggtctggaggtccaagaggacttgacctacgttgagaagccatcgcaaatcctagagacggcagacagagtcacccgaaggaagaccatcagaatgtgcaaagtcagatggagtcatcactctgaggaagaagcaacctgggagcgtgaagatgatctgatggccaaataccctgagctctttgctagccaaccctga

SEQ ID NO: 92904 - DNA, 333 bp, Zea mays
  Clone ID: MRT4577_184718C.1
ggtaccctacgggtctcggccgggaacaaaccatacaggttttcgcccccgcccccacatccgtcgccgatgccagatgcgcggcggccgcgaggccaaaactcagcacctatccctggaggccggggctctccagcgcacatcactggggccaggaaggccgattggatggaagtccatgcgaaaagatacctcagactggcaaagaagcatcaagagcatcccagggttacctgcaagatccactgggacaatggcacgcttgcaagtgctcatagcagcttgccctggtaagctcgttgtagtggaaccatcggctcgtttgctgcgtag

SEQ ID NO: 92905 - DNA, 4041 bp, Zea mays
  Clone ID: MRT4577_184719C.1
atggatgctgaagactggctgcgcactgtggagcgggagttgcataccgctcagtgcgatgacagggagaaagttttgtatggtccccgtctgttgagaggagcagcccagtcatggtgggagtcttacctcgccactcatgcccaccctaacgccatcacctgggaagagttcagaggtagctttcgtcagtaccatgtacctgcaggtctgatgacagtgaagaaggaggagttcctggccctcaagcaagggtcatcgtctgtcagtgagtatcgggacaggttcctgcaattgtctcgctatgctcctgaagatgtcaacaccgacgccaagcgacagtaccgtttcctgagaggcttggttgaccctctacattatcaactgatgaaccataccttcccgacgttccagcacctgattgacagagcgatcatgacagaaaggaagcgcaaggagatggaagatccaaaccagcagaacagtcaggcagcgccagctcaggttggaaacagggcatgtttccactgtggagagcaaggccactgggtgatgcaatgtccgaagaaggcagcccagcagcagtcaggccccaatgccccagcgaagcagaatgtgcctcagcctggagcaggcaatcgccctcagccgcgctataatcatggaagactgaatcacttagaggcggaagcagttcaggagacccccggcatgatagtaggtatgttcccagtcgactcccatatcgcagaagtgttatttgatactggagcaacgcattctttcattactgcatcatgggtagaagcacataatcttccaattactaccatgtcaacccccattcaaattgactcagccggtggtaggattcgagccgatagcatttgtttgaatataagtgtggaaataagggggatagcgtttcccgccaaccttatagtaatgggtactcagggaatagatgtcatcctagggatgaattggctagataagtaccaggcagttatcagttgtgataaaaggacaatcaagttggtgtccccactaggagaggaagtggtgaccgagttagtcccgcctgagccaaagaaaggaagttgttatcagatagctgttgatagcaatgaagcagacccgatcgagagtatcaaggttgtgtccgaattcccggatgtgtttccaaaggacttaccgggtatgccaccagagcggaaagttgagttcgctatagagcttcttcctggaaccgcccctatctttaagagagcttacagaatatctggaccagagttggttgaacttaaggagcagattgatgagctgtcagagaaaggttacattcgaccaagcacctcgccttgggccgcccctgtcttgttcgtggaaaagaaggatggcaccaagaggatgtgtatcgattaccgagctctgaatgaagtcacgatcaagaacaagtatcccttacccagaatagaagatctgttcgaccagttgagaggagccagtgtgttttccaagattgatctgaggtcaggttatcaccagctcaggatccgaccttcagacattccgaagacggctttcattaccaagtatgggttgtatgagttcacagtgatgtcttttggtttgaccaatgcgccagcgttcttcatgaacttgatgaatagtgtattcatggattatctcgacaagtttgtggtggtattcattgatgatattctgatttattctcaaagcgaagaagagcacgcagatcatttgaggatggtattgcaaagattgcgagagcaccagttgtatgcaaagttgagcaagtgtgagttctggatcagtgaagtcctgttcttgggtcacataatcaacaaagaaggattggttgtggatccgaagaaagtggcaaccattttgaactgggaagcgccaacagatgctagaggaatcaagagcttcattggaatggccggatactatcggcgattcattgaagggttttcgaagattgcgaaaccaatgacagcgttgctaggcaacaaagttgagtttaagtggacccagaaatgccaagaggcctttgaagcgctgaaagagaagttgactacagcgcctgtcctagtcttgcctgatgtgcacaagcccttctcggtgtattgtgatgcttgttacacaggtttgggatgtgtgttgatgcaagagggaagagttgtggcttactcgtcccgacagttgaaggttcatgagaagaattacccaatccatgacctagagttggcggcggtggttcatgcactgaagtcatggaggcactacctgtatggacagaaatgcgatgtttacacagatcacaagagtctgaagtacatattcacccagtcagagttgaacatgaggcagcgaagatggttagagttgatcaaagattatgagttggaaattcattaccatccaggcaaagcaaacgtagtggcagatgctttgagcagaaagagtcaagtcaatctgatggtcgctcgtccgatgccttatgagttggccaaggagtttgacaggttgagtctcggatttctgaacaattcacgaggggtcacagttgagttggaacctaccttggagcgcgaaatcaaagaagcgcaaaagaatgatgagaaaatcagtgagattcggcgactgattctagatggcagagacaaagactttcgagtggatgcagaaagcgtgatatggttcaaagaccgcttgtgtgttcccaatgtccagtctattcgggagttgattctcaaggaagctcatgagacgacctattcgattcaccctggcagtgagaagatgtatcaggatctgaaaaagaaattctggtggtacggaatgaagagggagatcgcagagcatgtggctaggtgcgatagttgccgaagaattaaggcagagcaccagagacccgctggattgttgcaaccgttgcagatccctcagtggaaatgggacgaaatcggtatggatttcatagtcggattgcctcgcactcgagccggctacgattccatctgggtagtagtggaccgtttgaccaagtcagcccacttcatacctgtcaagaccaactacaacagtgcagtattggcagaattgtatatgtctcagatcgtttgtcttcatggtgtgccaaagaagatagtgtcagacagaggaacgcagttcacctctcatttctggtggcagttgcatgaagctttgggcacgcatctgaatttcagttcagcttatcatccgcagacagatggccagaccgaaaggaccaaccaaattcttgaagacatgttgagagcctgtgcgttgcaagatcagtccggatgggataagagattgccttatgcagaattttcctataacaacagttaccaggccagcttgaagatgtcaccatttcaggcgctctatggaaggagttgcagaactccgttgcaatgggatcagcctggagagaagcaagtgtttgggccagacattctacttgaagctgaagagaacatcaagatggtccgagagaatctgaagatagcgcaatcgaggcagcaaagctatgcagacacaagaagaagagagctgagtttcgaggtcggagactttgtctatctgaaagtgtcaccgatcagaggagtcagaagatttggagtgaaaggcaagctagcaccccgctacattggtccgtatcagattcttgcaagacgtggagaagtggcctatcagctcagtctgccagagaatttgtccgctgtgcataatgtctttcatgtgtctcagttgaagaagtgcttgcgtgtgccagaagagcagttgccggtggaaggtcttgaagtccaagaggacttgacctatgttgagaagccagtgcaaatccttgagattgcagaccgagtcacccggagaaagaccatcagaatgtgcaaagtcagatggaatcatcactctgaggaagaagcaacctgggagcgtgaagatgatctgatggctaaataccctgagctctttgctagctaa

SEQ ID NO: 92906 - DNA, 316 bp, Zea mays
  Clone ID: MRT4577_18471C.1
tgtaatcaaagtttctattgtaccatgttgggcggcgaaacagatgtttcttcgactacgacgccgcagcctaagctggaataggattcgaacgactgcgttgacgtggccagtttcaattttttctgggtggtctacgagacgtaaaccctaaccgagggcctgttacaaccccaaccaaaccacctgtcgtcttctccttatggtgaaggggacgacgggatcactgccttcggtgcttctgatggtggggacgccgcggtatctgcttatgatgcggctgtggttaacgcgacgatagaagagcgggtgaggg

SEQ ID NO: 92907 - DNA, 335 bp, Zea mays
  Clone ID: MRT4577_184720C.1
tcatcctataccccctatcatccctaacaaacaccttcatatccctacataccatctcctgcgaggcacaacatcttacgggggaaaccacttccccaactccattaaaactcaataccctgtaaaactgagaatacaacttaatctgcacgatcctgacaaaccctactatcactacaattctaacatctgaagtacctacatcatcaacccatgcacaacccttacaaccacatcaacctacactaatgcctattatattccgactacgacaactaccacaatatactccgatacttctttcctagtaacctgcaaattataactaacccacc

SEQ ID NO: 92908 - DNA, 1230 bp, Zea mays
  Clone ID: MRT4577_184721C.1
atgtcagagaataggcgcagaggaggaaggcgtgctcagcaggagcgagccgctcaacaggaggaggcgccccagcagcagcagctgccgcccccgcccccgatgtccatcgagcagatgtttctgatgcagactcaggcagttcaagccatcggtcagaccttggccgccattcagcagcagcagcagcaacagcagcaagcaccacctcagcctcagatgcctcagatgcccagagacaagcgtgctgaattcatgagaggtcatccaccaacgttcgctcattcttctgaccccatggatgctgaagattggctacgcactgtggagcgggagttgcataccgctcagtgcgatgacagggagaaagttctgtatggtccccgtctgttgagaggagcagcccagtcatggtgggagtcttacctcgccacccatgccaaccccgacaccatcacttgggaagaattcaggggtagctttcgtcagtaccatgttcctgcaggtctgatgacagtgaagaatgaggagttcctggccctcaagcaagggccattgtctgtcagtgagtaccgggacaagtttctgcaattgtctcgctatgctcctgaagatgtcaacactgacgccaagcgacaataccgttttctgagaggcttggtcgaccctctgcagtatcagctgatgaaccacaccttcccgacattccagcacctgattgatagagcgatcatgacggagagaaagcgcaaggagatggaagatcgtaagcgcaagatcagtggaccgcagcctggaagcagtagtcgtcctcgtttctcaggcaatcaacctcatcagttcaggcagaaccagcgtccacctcagcagcatcagcagtttcaaaggcagtaccctcagaatcagtaccagaaccgtcagagcaatcagtcaggaggtcagtttcagaagcagaatcagcaagcacctcgtcttcctgccccagcaaatcagcagaacagtcaggcagcaccagctcaggttggaaacaaggcatgtttccactgtggagagcaaggccactgggtgatgcaatgtccaaagaaggcagcccagcagcagtcaggccccaatgccccagcaaagcagaatgtgcctcagcctggagcaggcaatcgccctcaacagcgctataatcatggaagattgaatcacttggaggctgaagcagttcaggagaccccggcatga

SEQ ID NO: 92909 - DNA, 4350 bp, Zea mays
  Clone ID: MRT4577_184722C.1
atgcctcagatgcccagggacaagcgtgctgaattcatgagaggtcatcccccagcgttcgctcactcttctgaccccatggatgctgaagattggctgcgcactgtggagcgggagttgcacaccgctcagtgcgacgacagggagaaggtcttgtatggtccccgtctgttgagaggagcagcccagtcttggtgggagtcttacctcgccacccatgccaaccccgacgccatcacctgggaagaattcagaggtagcttccgtcagtaccacgtgcctgcaggtctgatgacagtgaaggaggagttcctggccctcaagcaagggccttcgtccgtcagtgagtaccgagacaggtttctgcagctgtcccgctatgctcctgaggatgtcaacactgacgccaagcggcagtaccgtttcctgagaggcttggtcgaccccctgcagtatcaactgatgaatcacaccttccccacattccagcacctgattgacagagcgatcatgacagagaggaagcgcaaggagatggaggatcgcaagcgcaagatcagtggaccccagcctggaagcagcagccgccctcgtttctcaggcaacccacctcagcagttcaggcagaaccagcgcccacctcagcagcggcagctccatcggcagttccctcggcaccagccgcagcatcgctaccagaaccgtcagagcaatcagtcaggaggtcagtttcaaaggcagaatcagcaagcaccccgtcttcctaccccagcaaaccagcagaacagtcaggcagcaccagctcaggttggaaacagggcatgtttccactgtggagagcagggccattgggtgatgcaatgtccgaagaaggcagcccagcagcagtcaggccccaatgccccagcaaagcagaatgtgtctcagcctggagcaggcaaccgccctcaacagcgctataatcatggaagattgaatcacttggaggctgaagcagttcaggagacccccggcatgatagtaggtatgttcccagtcgactcccatattgcagaagtgttatttgatactggagcaacgcattctttcattactgcatcatgggtaaaagcacataatcttccaactactaccatgtcaacccccattcaaattgactcagctggtggtagaattcgagctgatagcatttgtttaaatataactgtggaaataagggggatagcgtttcccgccaaccttatagtaatgggtactcagggaatagatgtcatcctaggggtgaattggttagataagtatcaggcagttatcagttgtgataaaaggacaatcaagttggtgtccccactaggaaaggaagtggtgaccgagttagtcccacctgagccgaagaaaggaagttgttatcagatggctgtcgatagcagtgaagcagatccagttgagagtatcaaggttgtgtctgaattcccagatgtgtttccaaaggatttaccgggtatgccaccagagcggaaagttgagtttgccatagagcttcttcctggaaccgcccccatctttaagagagcttacagaatatccggaccagagttggttgagcttaagaagcagattgatgagctgtcagagaaaggttacacccggccaagcacctcgccttgggccgcccctgtcttatttgtggaaaagaaagatggcaccaagaggatgtgcatcgattatcgagctttgaatgaggtcacgatcaagaacaagtatcccttgcccagaatagaagatctgttcgaccagttgagaggagccagtgtgttctccaagattgatctgaggtcaggttatcatcagctcaggatccgaccttcggacattccgaagacggcattcattaccaagtatggtttgtatgagttcacagtgatgtcttttggtttgaccaatgcaccagcgttctttatgaatctgatgaacagtgtattcatggattaccttgataagtttgtggtggtattcattgatgacattctgatttattcccaaagcgaagaagagcacgcagatcatttgaggatggtattgcagagattgcgagagcaccagttgtacgcaaagttgagcaagtgtgagttctggatcagcgaagtcctgttcttgggtcacataatcaacaaggaaggattggctgtggatccgaagaaagtggcagacattctgaactggaaagcgccaacggatgctcgaggaatcaagagcttcattggaatggccggatactatcggcgattcattgaagggttttcgaagattgcgaagccaatgacagcgttgctaggcaacaaggttgagttcaaatggacccagaaatgtcaagaggcctttgaagcgctgaaagagaagttgactacctcgcctgtcctaatcttgcctgatgtgcacaagcccttctcggtgtattgcgatgcttgttacacaggtttgggatgcgtattgatgcaagagggaagagttgtggcttactcgtcccgacagttgaaggttcatgagaagaactacccaatccatgatctagagttggcagcagtggttcacgcactgaagacatggaggcactatctgtatggacagaaatgcgatgtttacacagatcacaagagtctgaagtacatattcactcagacagagctgaacatgaggcaacgaagatggttagagctgatcaaagactatgagttggagattcattaccatccaggcaaagcaaacgtagtggcagatgctttgagcagaaagagtcaagtcaatctgatggtcgctcgcccgatgccttatgagttggccaaggagttcgacaggttgagtctcgggtttctgaacaattcgcgaggagtcacagttgaattggaacctaccttggagcgagaaatcaaagaagcgcagaagaatgatgaaaagatcagtgagattcggcgattgattctagatggcagaggcaaagattttcgagaagatgctgaaggcgtgatatggttcaaagaccgcttatgtgttcccaatgtccagtctattcgggagttgattctcaaggaagctcatgagacagcctattcgattcaccctggtagtgagaagatgtatcaggatctgaggaagaaattctggtggtacggaatgaagaggaaaatcgcagagcatgtggctaagtgcgatagttgtcgaagaattaaggcagagcaccagagaccagctggattgttgcaaccgttgcagatccctcagtggaaatgggatgaaattggtatggatttcatagtcggattgcctcgcactcgagccggctacgattctatttgggtagtggtggaccgtttgaccaagtcagcccacttcatacctgtcaagaccagctacaacagtgcagtattggcagagttgtatatgtctcggatcgtttgtcttcatggtgtgccaaagaagatagtgtcagacagaggaacgcagttcacctctcatttctggcagcagttgcatgaagccttgggcacacatctgaatttcagttcagcttatcacccgcagacagatggccagactgaaaggaccaatcaaattctcgaagatatgttgagagcctgtgcgttgcaagatcagtccggatgggacaagcgattgccttatgcagagttttcctataacaacagttaccaggccagtttgaagatgtcaccgtttcaggcgctttatggaaggagttgtagaactccgttgcaatgggatcagcctggagagaagcaagtgtttgggccagacattctgcttgaagccgaagagaacatcaagatggtccgagagaatctgaagatagcgcaatcgaggcagcaaagctatgcagacacaagaagaagagagctgagttttgaagtcggagactttgtctatctgaaagtgtcaccgatcagaggagtcagaagattcggagtgaagggcaagctagcaccccgctacattggtccgtaccagatcctctcaaagcgtggagaagtggcttatcagctcagcctgccagagaatttgtctgttgtgcatgatgtctttcatgtgtctcagttgaagaagtgcttgcgtgtgccagaagagcagttgccagtggaaggtcttgaggtccaggaggacttgacctatgttgagaagccagctcagatccttgagattgcagacagagtcacccgaaggaagaccatcagaatgtgcaaagtcagatggaatcaccactctgaggaagaagcaacctgggagcgtgaagatgatctagtggccaagtacccagagctctttgctagccagccctga

SEQ ID NO: 92910 - DNA, 2835 bp, Zea mays
  Clone ID: MRT4577_184723C.1
atggccgttgatagcagtgaagcagacccaattgagagtatcaaggttgtgtccgagttcccggatgtgtttccaaaggatttaccgggtatgccaccagagcggaaagttgagtttgctatagagcttcttcctggaaccgcccccatctttaagagagcttacagaatatccggaccagagttggttgagcttaagaagcagattgatgagctgtcagagaaaggttatattcggccaagcacctcgccttgggccgcccctgtcttgtttgtggaaaagaaagatggcaccaagaggatgtgcatcgattatcgagctttgaatgaggtcacgatcaagaacaagtatcccttgcccagaatagaagatctgttcgaccagttgagaggagccagtgtgttctctaagattgatctgaggtcaggttatcatcagctcaggatccgaccttcggacattccgaagacggcattcatttctaagtatgggttgtatgagttcacagtgatgtcttttggtttgaccaatgcgccagcgttctttatgaacttgatgaacagtgtattcatggattaccttgataagtttgtggtggtattcattgatgatattctggtttattctcaaagcgaagaagagcatgcagatcatttgaggatggtgttgcagagattgcgagagcaccagttgtatgcaaagttgagcaaatgtgagttctggatcagtgaagtcctgttcttgggtcacataatcaacaaggaaggattggctgtggatccgaagaaagtggcagacattctgaactggaaagcgccaacagatgctagaggaatcaagagtttcattggaatggccggatattatcggcgattcattgaagggtttttgaagattgcgaaaccaatgacagcgttgctaggcaacaaagttgagttcaagtggacccagaaatgccaagaggcctttgaagcgctgaaagagaagttgactacagcgcctgtcctagtcttgcctgatgtgcacaagcccttttcggtgtattgcgatgcttgctacacaggtttgggatgtgtgttgatgcaagagggaagagttgtggcttactcgtcccgacagctgaaggttcatgagaagaattacccaatccatgatctagagttggcagcagtggttcatgcactgaagacatggaggcactatttgtatggacagaagtgcgatgtttacacagaccacaagagtctgaagtacatattcactcagtcagagttgaatatgaggcagcgaagatggttagagttgatcaaagactatgagttggagattcattaccatccaggcaaagcaaacgtagtggcagatgctttgagcagaaagagtcaagtcaatctgatggtcgctcgtccgatgccttatgagttggccaaggagtttgacaggttgagtctcggatttctgaacaattcgcgaggagtcacagttgagttggaacctaccttggagcgcgaaatcaaagaagcgcagaagaatgatgagaaaatcagtgagatccggcgactgattctagaaggcaaaagcaaagattttcgagaggatgcagaaggcgtgatatggttcaaagaccgcttgtgtgttcccaatgtccagtctattcgggagttgattcttaaggaagctcatgagacagcttattcgattcaccctggtagtgagaagatgtatcaggatctgaagaagaaattctggtggtacggaatgaagagggaaatcgcagagcatgtggctaagtgcgatagttgtcaaagaattaaggcagaacaccagagaccagctggattgttgcaaccgttgcagatccctcagtggaaatgggatgaaattggtatggatttcatagtcggattgcctcgcacccgagccggctacgattctatttgggtagtggtggaccgtttgaccaagtcagcccacttcatacctgtcaagaccaactacaacagtgcagtattggcagaattgtatatgtctcggatcgtttgtcttcatgcttatcatccgcagacagatggccagactgaaaggaccaatcaaattctcgaagacatgttgagagcctgtgcgttgcaagatcagtccggatgggataagcgattgccttatgcagagttttcctataacaacagttatcaggccagtttgaagatgtcaccgtttcaagcgctttatggaaggagttgtagaactccgttgcaatgggatcagcctggagaaaagcaagtgtttgggccagacattttgcttgaagccgaagagaacatcaagatggtccgagagaatctgaagatagcgcaatcgaggcagcgaagctatgcagacacaagaagaagagagctgagttttgaagtcggagattttgtctatctgaaagtgtcaccgatcagaggagtcagaagattcggagtgaaaggcaagctagcaccccgctacattggtccgtatcagattcttgcaagacgaggagaagtggcctatcagctcagtttgccagagagtttgtctgctgtgcataatgtctttcatgtgtctcagttgaagaagtgcttgcgtgtgccagaagagcagttgccagtggaaggtctggaagtccaggaggacttgacctacgttgagaagccagtgcaaatccttgaggttgcagaccgagtcacccgaaggaagaccatcagaatgtgcaaagtcagatggaatcaccactctgaggaagaagcaacctgggagcgtgaagatgatctgatggccaagtacccagagctctttgctagccagccctga

SEQ ID NO: 92911 - DNA, 861 bp, Zea mays
  Clone ID: MRT4577_184724C.1
atggaggtggcgacggcagctcgagccatgacaccgacctttccgccgaccaggagttggaaggatgggttgctcgacccatcactcgcgacgctgctcgcgggtgtcacttccacgatgcgctcgacaccctgctacgtcaggcacttgaccggcgtacttggtctatcgagtatcgttgtgtggtcttccagcacagtcgcggggtctacccggaccgatgggaggcgacctgcttggtgcgccgtccggagaacagtctctggggtgctgaggtctgctcagagcactattccatctctgagcgggactcagctgaggcggccatgcaagatgccgcatgacatgtcagaaaacaggcgcattggaggaaggcgtgctcagcaggagcggccagctcagcaggatgaggcaccccagctgcagcagctgccacccctgcccccaatgtcgatcgagcagatgttcatgatgcagactcaggcagttcaagccatcggtctgatgacagtgaagaaggaggagttcctggcactcaagcaagggtcaatgtctgttagtgagtaccgagacaggtttctgcaactgtctcgctatgctcctgaagatgtcaacactgacgccaagagacagtaccgtttcctgagaggcttggttgaccctcttcagtatcagctgatgaatcataccttcccgacatttcagcacctgattgacagaacaatcatgacagagatgaagcgcaaagagatggagggtcgcaagcgcaagatcagtggaccccagcctggaagcagcaatcgccctcgtttctcaggcaatcaacctcagcagttcaggcagaaccagcgtccaccctag

SEQ ID NO: 92912 - DNA, 268 bp, Zea mays
  Clone ID: MRT4577_184725C.1
gagaaaaaaaccctcgatttagatatcaagaaagtgtcggagagccatctcatccatcttgtccagaggccccttttgtgtggcaatacacaaatgcagttggaacagaacttggaactatcagagttcaataaacaagttcttggtgtattgccgaagcttacatgcagcttatactttgatgtgacattttctagctcttgtggcttagagaagacctttgaaactgcactgattggttttcttggtgtcctctacgccatggctg

SEQ ID NO: 92913 - DNA, 3158 bp, Zea mays
  unsure (1)..(3158): unsure at all n locations
  Clone ID: MRT4577_184726C.1
cccatattgtagaagtgttatttgatactagagcaacacattcattcattactgcatcatgggtagaagcacactaatcttctaattactaccatgtcaacccccattcaaattgactcagcaggtggtagaattcgagccgatagcatttgcttgaatgtaagtgtggaaataagggggatagcgtttcccgctaacctcatagtaatgggtactcagggaatagatgtcatcctagggatgaattggctagataagtatcaggcagttatcagttgtgataagaggacaatcaagttggtgtccccactaggagaggaagtggtgaccgagttagtcccgcctgagccaaagaaaggaagttgttatcagatggctgtcgatagcagtgaagcagacccaattgagagntatcaaggttgtgtccaagtttccaagatgtgtttccaaaggacctaccgggtatgccaccagagcagaaagttgaatttgccatagagcttcttcctggaaccgcccccatctttaagagagcttacagagtatccggaccagagttagttgaactcaaaaagcaaattgatgagatgccagagaaaggttacatccggccaagcacctcgccttgggccgcccctgtcttgttcgtggagaagaaagatggcaccagaaggatgtgcatcgattatcgagctctgaatgaggtcaccatcaagaataagtaccccttgcccagaatagaagatctattcaaccaattgagaggagccagtgtgttctccaagattgatctgaggtcaggttatcatcagctcaggatccgaccttcggatattccgaagacgacattcattaccaagtatgggttgtatgagttcactgtgatgtcttttggtttgaccaatgtgccggcctttttcatgaacttgatgaacagtgtattcatggactatcttaacaagtttgtggtggtattcattgatgacattctgatttattctcatagcgaagaagagcatgcaagtcatttgaagatggtattgcagagattgcgagagcaccagttgtatgcaaagttgagcaagtgtgaattctggatcagtgaagtcctgttcttgggtcacataatcaacaaagaaggattggatgtggatccgaagaaagtggcagacattctgaactggaaggcgccaacagatgctcgcggaatcaagagcttcattggaatggctggatattatcggcgattcatcgaagggtttttgaagattgcgaaaccaatgacagctttgctaggcaacaaggttgagttcaagtggacccagaaatgtcaagaggcctttgaagcgctgaaagagaagttgactacagcgcctgtcttagtcttgcctgatgtgcacaagcccttctcggtgtactgtgatgcttgttacacaggtttgggatgcgtgttgatgcaagagggaagacttgtggcttactcgtcccgacagctgaaagttcatgagaagaattacccaatccatgatctagagttggcagcagtggttcacgcactgaagacatggaggcattatctgtatggacagaaatgtgatgtttacacagaccacaagagtctaaagtacatattcactcagtcagagttgaatatgaggcaacgaagatggttagaattgatcaaagactatgagttggagattcactaccatccaggcaaagcgaacatagtggcagatgctttgagcaggaagagccaagtcaatctgatggacgctcgtccgatgccttatgagttggccaaagagtttgataggttaagtctcggatttctgaataattcgcgaggagtcacagttgagttggaacctaccttggagcgagaaatcaaagaagcacagaagaatgatgagaagatcaaggcaaagattttcgagaagatgcagaagtctattcgagagttgattctcaaggaagctcatgagacagcttattcgattcaccctggtagtgagaagatgtatcaggatctgaagaagaaattctggtggtacggaatgaagagagaaatcgcagagcatgtggctatgtgtgatagttgtcgacggatcaaggcagagcaccagagaccagctggattgttgcaaccgttgcaaattcctcagtggaaatgggatgaaatcggtatggatttcatagtcggattgcctcgcactcgagccggctacgattctatttgggtagtagtggaccgcttgaccaagtcagcccacttcatacctgtcaaggccaactacagcagtgcagtattggtagagttgtacatgtctcggatcgtatgtcttcacggtgtgccaaagaagatagtgtcagacagaggaacacagttcacctctcatttctggcagcagttgcatgaagccttgggcacacatctgaatttcagttcagcttatcatccgcagacagatggtcagaccgaaaggaccaatcaaattcttgaagacatgttgagagcctgtgcgttgcaagatcagtccggatgggacaagagattgccttatgcagagttttcctataacaacagttaccaggccagcttgaagatgtcaccatttcaagcgctctatggaaggagttgtaggactccgttgcaatgggatcagcctggagaaaagcaggtgtttgggccagacattttgcttgaagccgaagagaacatcaagatggtccgagagaatctgaagatagcgcagtcaagacaacgaagttatgcagacacaagaagaagagagctgagtttcgaagtcggagacttcgtctatctgaaagtgtcaccgatcagaggagtcagaaggttcggagtcaaaggcaagctagcaccccgctacattggcccataccagattctcgcaaggcgtggagaagtggcctatcagctcagtctgccagagaatttgtctattgtgcatgatgtctttcatgtgtctcagttgaagaagtgcttgcatgtgccagaagagcagttgccagtggaaggtctggaggtccaagaggacttgacctacatagagaaaccagcgcaaatccttgagattgcagacagagtcacccgaaggaagaccatcagaatgtgcaaggtcagatggaaccattga

SEQ ID NO: 92914 - DNA, 664 bp, Zea mays
  unsure (1)..(664): unsure at all n locations
  Clone ID: MRT4577_184727C.1
aattcggcacgagggagatgtgactgaaagagaagggagcgaatgatgttgatggtgcgcaggacacgctcaaccttgccattttgctgcgaggtgtaggggcacgacatgcggagggcaacaccatgcgtgagaaagaaggtgcgagcggtggaattgtcaaactcacgaccgttgtcgcattgtacacttttgatggtggtgccgaattgggtggcaacaaaagcgaaaaattgtgcaatagtggagaatgtatcggatttaagacggagaggaaaagtccacaagaggtgagagcagtcatcaagaatagcaaggtaatatttgaaccttgaaatactggacaccagggaggtccataaatcacagtgaacaaggtcaaatttttttaaagctcgagattgcgaaagggaaaaagggagacggacatggcgaccgagttgacaggcattacagaggtcgacatgtgagtcattattacaggtaatagcagaagagctagcaagccgagagagagcttcatggccgangtgtccaaggcgacggtgccacaactaagatgatgcgctggcgaagaggctaggtggggatgtggagtccggaggaagcagcaggtagaagcggcccgagctattgcacatgctgatcacgtgtcgtgtcctga

SEQ ID NO: 92915 - DNA, 2208 bp, Zea mays
  Clone ID: MRT4577_184728C.1
agcagtggtaacaacgcagagaactttttttttttttttttttttttttttttccttttttttttttttttttttttttttttttttttttttttttttttttaaaccatgcatttttattgtttcatcacaattccatcttctcttattcgttctgacagcagcaggagaccccacgagtggccccccacgtgacagagcacacggcatggtgtagctgtggcatggtgctacacgaacacgacactaacgagacagattaaagctaaccgatcgaaggaagggaattcattcgtccaacaacaacaaagtcccagattaaaagaaaccccgtgatggcgccccggcccagataagacactgcttgcatgctggcacgtggatgctcgctcaggcgtccacgacctcgtcgtccttggacgcaatcacgaactcctcgcgcagcgccggcgacacctctgggatggtcccgtccacggcgttgggcctgcccagtgccttcagcgccaggtgcgccgccttctggccggagatcatcatggcgccgaacgtcgggcccatcctcggggcgccgtcgatctcggcgacctccatcccggtgacgatcatgccgggcacgacctcgcgcgtgaggcgcacgatctcgtcctcggcggcgttcatgtcgagcgccttcatcccgggcacggcgttgatcatgccgatgtcctggagcctcttgacgccggtggcgccgaagggcccgtcgtggccgcaggagctgaccaccaccttggcctccatcacgttggggtccatgcacgactgcgtgtcgtggttcatggacacgagcgcccagttggtgaccacgccgccgacgcgcccccgccgcacgatcaggtcctccaccgccacggcgttgaacagcttcacgttgggccgcgccaggagccggctcatcacggtggacgtgaacagcgccgcgtgcttgaccaccacgtagtcctcggcctcgtcgtagcccacgcccagttttttttttttttttcatcacaattccatcttctcttattcgttctgacagcagcaggagaccccacgagtggcccccacgtgacagagcacacggctggtgtgtggcatggtgctacacgaacacgacacactaacgagacagattaaagctaaccgatcgaagggaattcattcgtccaacagcaacaaagtcccagattaaaagaagaaaccccgtgatggcgccggcccagataagacgctgcttgcatgctggcgcgtggatgctcgctcaggcgtccacgacctcgtcgtccttggacgcaatcacgaactcctcgcgcagcgccggcgacacctctgggatggtcccgtccacggcgttgggcctgcccagtgccttcagcgccaggtgcgccgccttctggccggagatcatcatggcgccgaacgtcgggcccatcctcggggcgccgtcgatctctgcgacctccatcccggtgacgatcatgccgggcacgacctcgcgcgtgaggcgcacgatctcgtcctcggcggcgttcatgtcgagcgccttcatcccgggcacggcgctgatcatgccgcgtgcttgaccaccacgtagtcctcggcctcgtcgtagcccacgcccagctcgtccaggaacaggtgcgccggcctgcgcaccaccatggccgagaacagctgcccgcccagccacgcgccgccgcccggggacacggactgctacacgatggcgacgctcacggtggggtccttggacagctcgtacgcgcaggacaggcccgcggacccggcgcccacgatcaccacggtggtgtcggcgtgggtgatcatgtccgtcatgtagcgccgggtcatcccgcgggacacgatggactccttgatggggctgaaccggaaggacgtcaggtcgtagggcgggttgggggaggagatggacgcgcggatggggccgccgccggcgcgcggggtggccacggccacggacgacggggtggtggtgcgcgtggccgaagggagccgggagcccgcgaaggaggacttgaggaggctggacgcagcggtggtggccattgctgacaacgagagctagggaggcgctagcttcttccttcttgctgcagcagagcagtgtatagtgagtgtgtgagggactgaggactgaggggatgaggccccgacccggccggc

SEQ ID NO: 92916 - DNA, 390 bp, Zea mays
  Clone ID: MRT4577_184729C.1
cagtcactcacacactcactatacactgctctgctgcagcaagaaggaagaagctagcgcctccctagctctcgttgtcagcaatggccaccaccgccgcgtccagcctcctcaagtcgtccttcgcgggctcccggctcccttcggccacgcgcaccaccaccccgtcgtccgtggccgtggccaccccgcgcgccggcggcggccccatccgcgcgtccatctcctcctcccccaccaccggcgtcaagaggctccaggacatcggcatgatcagcgccgtgcccgggatgaaggcgctcgacatgaacgccgccgaggacgagatcgtgcgcctcacgcgcgaggtcgtgcccggcatgatcgtcaccgggatggaggtcgcagaga

SEQ ID NO: 92917 - DNA, 384 bp, Zea mays
  Clone ID: MRT4577_18472C.1
caacggggaaaaattggccccccaaaaaaaagccggggatttccggcccgggccgggggggggtcccagttttccctttgggggggcgttttaaagctgggggtaatcaggggcaaaggggttcccgggggaaaatggttttccgttaaaatttccacaaaaaatacgagcgggaagaaaaaagggaaaagccgggggggcctaaggggggggctaactcaaataaatggggtgggcctaactgcccgttttccagggggaaaacctggggggccagttgttttaataaatcggccaaccccgggggagggggggtttgctttttgggccccaggggggttttttttttccccggggagacgggcaaaaggggattgcctttaa

SEQ ID NO: 92918 - DNA, 2951 bp, Zea mays
  Clone ID: MRT4577_184730C.1
ccggccggatgcatatggcgccagccaagatatttgttgccgccctcgtcccgtccccttcttaaaccttggcagtgcaagcccaggcagcctcatcccatcccctcaggcctcagtcgtcagtccctcacacactcactatacactgctctgctgcagcaagaaggaagaagctagcgcctccctagctctcgttgtcagcaatggccaccaccgccgcgtccagcctcctcaagtcgtccttcgcgggctcccggctccccttcggccacgcgcaccaccaccccgtcgtccgtggccgtggccaccccgcgcgccggcggcggccccatccgcgcgtccatctcctcctcccccaccccgccctacgacctgacgtccttccggttcagccccatcaaggagtccatcgtgtcccgcgagatgacccggcgctacatgacggacatgatcacccacgccgacaccgacgtggtgatcgtgggcgccgggtccgcgggcctgtcctgcgcgtacgagctgtccaaggaccccaccgtgagcgtcgccatcgtggagcagtccgtgtccccgggcggcggcgcgtggctgggcgggcagctgttctcggccatggtggtgcgcaggccggcgcacctgttcctggacgagctgggcgtgggctacgacgaggccgaggactacgtggtggtcaagcacgcggcgctgttcacgtccaccgtgatgagccggctcctggcgcggcccaacgtgaagctgttcaacgccgtggcggtggaggacctgatcgtgcggcgggggcgcgtcggcggcgtggtcaccaactgggcgctcgtgtccatgaaccacgacacgcagtcgtgcatggaccccaacgtgatggaggccaaggtggtggtcagctcctgcggccacgacgggcccttcggcgccaccggcgtcaagaggctccaggacatcggcatgatcagcgccgtgcccgggatgaaggcgctcgacatgaacgccgccgaggacgagatcgtgcgcctcacgcgcgaggtcgtgcccggcatgatcgtcaccgggatggaggtcgccgagatcgacggcgccccgaggatgggcccgacgttcggcgccatgatgatctccggccagaaggcggcgcacctggcgctgaaggcactgggcaggcccaacgccgtggacgggaccatcccagaggtgtcgccggcgctgcgcgaggagttcgtgattgcgtccaaggacgacgaggtcgtggacgcctgagcgagcatccacgcgccagcatgcaagcagcgtcttatctgggccggcgccatcacggggtttcttcttttaatctgggactttgttgctgttggacgaatgaattcccttcgatcggttagctttaatctgtctcgttagtgtgtcgtgttcgtgtagcaccatgccacagctacgccatgccgtgtgctctgtcacgtgggggccactcgtggggtctccatcttctcttattcgttctgacagcagcaggagaccccacgagtggcccccacgtgacagagcacacggctggtgtgtggcatggtgctacacgaacacgacacactaacgagacagattaaagctaaccgatcgaagggaattcattcgtccaacagcaacaaagtcccagattaaaagaagaaaccccgtgatggcgccggcccagataagacgctgcttgcatgctggcgcgtggatgctcgctcaggcgtccacgacctcgtcgtccttggacgcaatcacgaactcctcgcgcagcgccggcgacacctctgggatggtcccgtccacggcgttgggcctgcccagtgccttcagcgccaggtgcgccgccttctggccggagatcatcatggcgccgaacgtcgggcccatcctcggggcgccgtcgatctctgcgacctccatcccggtgacgatcatgccgggcacgacctcgcgcgtgaggcgcacgatctcgtcctcggcggcgttcatgtcgagcgccttcatcccgggcacggcgctgatcatgccgatgtcctggagcctcttgacgccggtggcgccgaagggcccgtcgtggccgcaggagctgaccaccaccttggcctccatcacgttggggtccatgcacgactgcgtgtcgtggttcatggacacgagcgcccagttggtgaccacgccgccgacgcgcccccgccgcacgatcaggtcctccaccgccacggcgttgaacagcttcacgttgggccgcgccaggagccggctcatcacggtggacgtgaacagcgccgcgtgcttgaccaccacgtagtcctcggcctcgtcgtagcccacgcccagctcgtccaggaacaggtgcgccggcctgcgcaccaccatggccgagaacagctgcccgcccagccacgcgccgccgcccggggacacggactgctccacgatggccacgctcacggaggggtccttggacagctcgtacgcgcaggacaggcccgcggacccggcgcccacgatcaccacgtcggtgtcggcgtgggtgatcatgtccgtcatgtagcgccgggtcatctcgcgggacacgatggactccttgatggggctgaaccggaaggacgtcaggtcgtagggcggggtgggggaggaggagatggacgcgcggatggggccgccgccggcgcgcggggtggccacggccacggacgacggggtggtggtgcgcgtggccgaagggagccgggagcccgcgaaggaggacttgaggaggctggacgcggcggtggtggccattgctgacaacgagagctagggaggcgctagcttcttccttcttgctgcagcagagcagtgtatagtgagtgtgtgagggactgaggactgaggggatgcgaaaaatttaccccctcagctgcccggccggcctcgaggtaccc

SEQ ID NO: 92919 - DNA, 142 bp, Zea mays
  Clone ID: MRT4577_184731C.1
acgctcccttggggggtacaacactcacggcgaagaacgcacactacgaaaggcagcaagtacagtctgggaaaaaaatggtgagcccagtgataaggtcgatgttatgcataatggctcgtccacatggaaacaaaatgct

SEQ ID NO: 92920 - DNA, 362 bp, Zea mays
  Clone ID: MRT4577_184732C.1
ggaaggaggcgcgcgcggtcaggcacgctgacgtaatggacgagcactggtgggccaagatgcagacggtgcccgagctcgtgaaggactgcaccaccatcatatggatcgcgtatgagctacacgccgatgtcaactttgggcagtacatgtactgcgggtaccaccctaaccgtccgtccgtgagccagcgggccatgccggtgccaggctaccacgcgtacaatgagctggagaagaacccagagaagcacttcgtgcgctgcatcatcgactaacttcaggcgcgactcggtatcttgctgctggagatcctgttcagacactactacaacaaggcgtacctctgacagcgcgacacc

SEQ ID NO: 92921 - DNA, 290 bp, Zea mays
  Clone ID: MRT4577_184733C.1
gggcagccgggccggaatgaattgcctggtcgaccagctgttctttcggccgccgccctacgtactttaagtgtggtgatgatgatactgctagacattgaattcgatagcatgcctaaacggaaggaagcatcacggacttcaatgatggccgggaatggaacgcatgctcgcggtaaggaggctgtaggacatatctgacaccacgcagaaggggggctgtgctcctgaagatatatcctaactgggacatctttacgctcgtagccattctggcatggtggatcaag

SEQ ID NO: 92922 - DNA, 581 bp, Zea mays
  unsure (1)..(581): unsure at all n locations
  Clone ID: MRT4577_184734C.1
tacgtcatctcgtgacgtccttgtgttgcgccacccttatttatccgnatgactatgtctagcactggatcgaggaagacaaggaatcttcaggtgaatcacattcaacagccgctggattaatctgcttttgttagcaggatgcacgtttcacacacaatcccttctctcttgggttaacttccttgctagtctctgctcgtgttaacaacgaagaaagaaacaagtcgctagaacgatgttgccatgctctttgatggattccatgacttgccgacaaccaaagcccgacggtgttgaggctaccgtagaacttcctatggtatcaagtatacctacagcggtaaggagtgattgagaaaagagtcgattttactttgtgtggaatgcgaaaggagcgattttttttctgtaaactttcaagtgaattgtttttttcagaccaacgattacttcttcttcttcgcttgcaattattgattcctctatctaacaattgtgattggggttgaatcttggttttacgggtttgaatgaccttagctatcaattatactatggattatggattcatgagtatg

SEQ ID NO: 92923 - DNA, 867 bp, Zea mays
  Clone ID: MRT4577_184735C.1
cccgcgtccgggcgttcccgttccctgccacctcgcccgctctcctccccctctctcgaccacctcctcgggagtagaggggggctgctttgggcgtggcgcggcccccagatctgggccggcgggcggcgggcggagggcgggatgaagtcgtcgttgaggagccggcaggagccgcggcgggtcagcaacggcgtcatcatcggcgccatgctgctatccctctgcgtcctcagcatcgtcaaggccagatactgcgccacccccttcggcaaggccgaggaccagctccaggagcagatgaactccagcatccggatggagccggaggagtcgtcgccggccaggacgcccggagaggaggaggaggaggacgacggagagaatggggcgtcggccaccaccaccacggcgcccgcggtgacgaaaacgccggcggccgtcgcggccggcggcaccaggggcaagggcaagccgacgtgctacatgacgagcaagcgctcggagcggtgcgacgcgtccggtgacatccgtgtggacgggaaccgctccaccatctacgtcagcgggatagaccgggagtggaagaccaagccgtacgcgcgctaccacgacccggtcgccatggcccacgtccgcgagtacaccctcaagccgctcccggaggcggcgccggcgcccgcgtgcacccggaaccacagcgtccccggcttcctcttctccaacggcgggttctccggcaacctgtaccacgactacacggacgtgctggtgccgctgttcatcagcacgcaccagttccgggggcgcgtgcagttcctggtgagcggggataaaccgtggggggtgggcaagttcacgcccttc

SEQ ID NO: 92924 - DNA, 310 bp, Zea mays
  unsure (1)..(310): unsure at all n locations
  Clone ID: MRT4577_184736C.1
tcggtgttggactgtgatatgggcggctcggatacaaggccgaggacgtactgttggtacgaggctccgccattgggctggcgtgangtgttttcagaatgggccgtgagtgtagtaagggtaaaaattcgcaagtaggaaatgctagtatattattttgcaggtgtttcattgttgtatgtatattctgatagcaggtgcgcatgtcattttgtgtacgtgaaattagttggttaggacaaacatcagcgtgtgatgttgggtattaattgaggaaaatggacaagatatgaaatcaaagggactggct

SEQ ID NO: 92925 - DNA, 463 bp, Zea mays
  unsure (1)..(463): unsure at all n locations
  Clone ID: MRT4577_184737C.1
ctacggtctgccagtacccctccctgctgctactccacttatgaccgcggcgggcactctaggggccggacttgtacaaagtcctgcgtgacctctgctaggaaccccaggggacggccgcggccggtgggcaggaggcgggcgggcgcctctagacgcccgtggagctgtccactggaccgcggcgccaacatcttgacgcctggctatcctttaagccgtgaaccatcgtccatggggtgaacatcctcgttgctttgtacgggcaacgccgagccagccggcctaacagccgacctccgtgctgtgggctttaacactacttgcggtacgtacatgttgtgatcgtccgtgagcgggctggaggggctgcctcggagcgngcaccaggagtggagccccgccgacgtccgctcggcgctgatgacccctgactacgccagatactacgccgggtggtcac

SEQ ID NO: 92926 - DNA, 692 bp, Zea mays
  Clone ID: MRT4577_184738C.1
gtctatcccctgagatctggccgtcaatggagtttcgccggcgttccgcccggctgcgcgccggagcggaccgcatcagcgccctccccgacgacctgctcctcctcctcctcgcccgcctccgctgcgcccgcgccgccgcgcgcacggggctcatctcgcgccggtggcgcggcctcgcggcccgcctccgtgagatcgtcttccgctgcgtcgccctccacaggctcgaagccgcgctcggccgcctctcccccgcggtctcgctcctcgagatccgcgtccccaaggagcgccgcgccgacaccgcccgcggcaactcgctgctccgcgtcggcaccgcccgcgccaactcgctgctccgcgccgccgcgcggctcgagccggaggagctcgtcttcgacctcccctccgatctggtcaccggctccctcgtcgtcgacctgccttgcttgccccgcgccacctccatcgcgctgcgaatcttcctctcatcctccgcgtgcccgacggcgccgagttcccggcgctggacgcgctgtccctgtcctgcggaatcgcgcacgcccacctcgacgccctgctccgccactgaccgcgactgcgcacgctccggttcgacggtttcttgtttgaacaaggcgacctgagggtcaactcggcgtcgctgcaggagctgatcgtggaccgcg

SEQ ID NO: 92927 - DNA, 1503 bp, Zea mays
  Clone ID: MRT4577_184739C.1
atcgattcggcacgacgagaaggttccttctgcatcagcaggatataaaacactgctcattgctagcatgtgctcgtcttaaacagatgtactttgcttggaggattatgttaactgctaatcaaaatggttctttgatagtgatataccttactgctatgcctcgagattggaaagttcataaggatgtctcaccattggatgcaacctaatggttattaagtggttttataacatgagaacatagatgtggctatctgcccaacaagaaattctttggggagctgctaggattatcaaatcacatggcattgaactgggaagccccatgcagtgctgttaattcacgcttccggcacttttaagtagggtaaataccgttagcctgcagaagtgcagaacttcatacagacgctacctagccgttttgttcttctacgttttatagttgtagctccttgcaattttctaagccattctcagtttacgactacataaaggcgggatcaatagaaggcaaggtggttgaaataggactcacttctacttcattgatcaatccagaaaagctccctgtcatagtacccaactctttgttctccagtcagatgatagttaacagatcacgagctaattggcgagctagtgtgacaaagattcctatacgaattgaggatattgagaaggttccttctgcatcagaggatataaagactatgttaaggtctaatcaaaatgtgtccttggatagtgatgttccttactgctatctctcgagattggaaagttcatatggagagctcaccattggatgcaacctaaaaaacatgagaaaagatgagtggctatctgcccaacaagaaattcttttgggagctgctaggattatcaaatcacatggcattgaactgggaagcaccatgcagtgctgttaattcacgcttctggcacttttaagtaggataaataccgttagcctgcagaagtgcagaacttcatacagatgctacctagccgttttgttcttcaacgttttatgtcttcagaccatggacacccactaccaatactattctgttactgccgttttctttggaactaaggtctagtttccttttgtggtcgtcccttttggttggtgcttggatccgtttctgggagcttctttgtctatgtatactggtgaacgtttgcgccgcgcccacgcctgccctgtggtctgtggatgagccctgagcgttttattggtcaattctgtgaaatactaggtatatacccgtgcgttgctacggaatcactgaaaggaaatgcatacgacctcgtagggtggctgcaatgttagttgcaaagagagtggcagaagagtttggttgtcggctgggagaggaagttggttatgctatccgtttcgaggactgtgcaggtccggacacagtgattaagtacatgactgatggtatgcttctgcgtgaaataattgttgatgagaacctttcccagtaa

SEQ ID NO: 92928 - DNA, 429 bp, Zea mays
  Clone ID: MRT4577_18473C.1
accggacgcgtgggggcctccaacgtttcatcaacaagcacgagcacggctgcgtctcggaccacggcctggcgtcgctgatgaacccggtcacggcgaggtcccgttctcttgggtactgcgcgccggaggtcgctgacacgaggaaggcgtcccagtcctcggacgtctacagcttcggcgtcttcgtgctggagctcctcacggggaagtcgcccgtccagataaccggcggcggtggcggcgacgtggtccacctggtgagatgggtgcagtcggttgtgcgggaggagtggaccgccgaggtgttcgacggcgagcttctgcggtaccccaacatcgaggaggagatggtagagatgctgcagatcgccatggcgtgcgtgttcaggacccccgagccgcgtcccaagatggcggacgtggtga

SEQ ID NO: 92929 - DNA, 629 bp, Zea mays
  Clone ID: MRT4577_184740C.1
ggggccgccacaaaatcataaatttacttttttcgggtgggtcccgcccccaaaattaaaaatttaggcaaacggaaaaggggttccgattcaaccttaaacaaagtcccaaaaacaaataatttttttacaaaaaaaaccctaaacaatttgggggttccccctgaatcgcacgagtccatacaggcagcattttgggcccccctccaggatttggacttttaagcatcaccatcccccagttgggaaagcttggggggggcctttttgtaaccataaaaaaatgcctttttatttggagaatatttttccacaaaaggggggaaaacagggtccctcaacagggttttgtcatttgggagctaaaaaaaaccctttttggccccactcaaaagttccttgaagaaaaagttgtaaaaaaccaaagggtttgtaatccaggccccctaaaaaccaaaccgttttttggggccccttcccaagggggggccaccaaagagggcaaaaatgtcctgatcactcaaacccatttgtttgccaaaaacttgccttaggggggcaaaacccttgggggcatcaagaaaaccgccctcagggggggggtgaggcttgtcctccctgccgggggg

SEQ ID NO: 92930 - DNA, 462 bp, Zea mays
  Clone ID: MRT4577_184741C.1
caccagttaccaaaaacacaaacaggaaccacggggtaacaaaactgatgatgagcgcctggaacctaagcggcataatgcgcccactgtcatggtggacggcctgctactgtggggacgccatgctgcatgctgccaaagcatggtcagatagctgttaggtgcagattaacttctgtgacaaaaggctgaaatactgtacgcaactatagacactactggacaaatcggtggaaaactacgtcgcagcaattagcaccacaaattctacctacctacaaaagccaagtatttggacatgcgtaactgagctgaccacggaggcacggagtgatgaatggcaaccttaatcacaacagcatctagtgcctatgtatatagttatacagcggcatcgaatgactcaagggcgacgaactgatttgtggctttgtcagtgacatatacaattataataaaatg

SEQ ID NO: 92931 - DNA, 283 bp, Zea mays
  Clone ID: MRT4577_184742C.1
aggggggttcagacccctcagatggggaaaccaaagtaagccttcaataatttgatagactcacccaacaacaaataaacatcaaaacgaattgggtacgcgaggcacaaaaaaggatcttggccaatatacataaactagcaaacagatttgctaagcacatactgaccaaaacgaagatgtcgctaactagaacccgggaattcatctgcctgaaaaaaaactctttgccaatagacgaaacattttggaacaactccttcgtgggcaaaagtggaagcgt

SEQ ID NO: 92932 - DNA, 537 bp, Zea mays
  Clone ID: MRT4577_184743C.1
cggacgcgtgggggataatgaacgggaggtggtggggggagggggcaccgggacgtgtatcccttggacatgtgctagttgctacaaatttgtcgaactaattcacatcagcattttaaatcaatacatatcctctgtctctacctcatcttcagactcatcctcattcctctgaacgccgactgtctgaccctacaactctggaacatgctccaacaaagctctacgcctactactcgagctggaactagtgcccttaaacactaagtcctcctttctcataacataggcgctctcttcgcaagtcccttagtgaacttctagattttcagagagacacttagaattttgtggactaatatgactgttccaccaccatgagcgggattttcctgagtgcacctttctcttcatcttcaccaaaatataagaaaatctcctctgatatgcagagctttctcttcctgaaaggaacatactattttaagaagacacctgaaaatagataaaatgtgcaatatgattttggagaaaatg

SEQ ID NO: 92933 - DNA, 185 bp, Zea mays
  Clone ID: MRT4577_184744C.1
aggtgttttttttttcttgcttgctcggtttcttgtggggcgggccgcgaaccggcgaggcgttggcgcggggcaacgcaaagcagcgcgcgcatcgcagtgcagcaaaagcttcgagctttatccgccggattcctctcctcccctttcctcgctatcgggctccccgcttgctttgtgcttcg

SEQ ID NO: 92934 - DNA, 2169 bp, Zea mays
  Clone ID: MRT4577_184745C.1
atgggtactcagggaatagatgtctacctagggatgaactggctagacaattatcaggcagttatcagttgtgataagaggacaatcaagttggtgtccccattaggaaaggaagtggtgaccgagttagtctcgcctgagccaaagaaagaaagttgttatcagatggctattaatagcagtgaagcaggtccacttgagactatcaaggttgtgtccgagttcccagttgtgttcccaaaggacttaccaggtatgccaccagagcgaaaagttgagtttgctatagagcttcttcctggcaccgcccccatttttaagagagcttacagagtatctggaccagagttggttgagcttaagaagcagatcgatgagctatcagagaaaggatacatccggccaagcacctcgccttgggccgcccctgtcctatttgtggagaagaaagatggcactagaaggatgtgtatcgattatcgagctctgaatgaggtcatgatcaagaacaagtaccccttgcccagaatagaagatctgttcgaacatttgagaggagccagcgtgttctcaaagatagatctgaggtcaggttatcaccagctcaggattcgacctttagatatttcgaagacagcattcattaccaagtacgggttgtatgagttcactgtgatgtctttcggtctaacaaatgcaccgaccttctatatgaatctgatgaacagtgtattcatggattatcttgacaagtttgtggtggtatttattgatgacattctgatatattctcaaagcgaagcagagcatgcagatcatttgaggatggtattacagagattgcgagagcaccagctgtatgcaaagttgagcaagtggttttcaaagattgcgaaaccaatgacagttttgctaggcaacaaagttgagttcaagtggacccagaaatgtcaagaggccttcgaagcgctgaaagagaagttgactacagtgcctgtcttagtcttacctgatgtgcacaagcccttctcggtgtattgcgatgcttgttacaccggtttgggatgcgtgttgatgcaagagggaagagttgtggcttactcgtcccgacagctgaaggttcatgagaagaattatccaatccatgacctagagttggcagcagtggttcatgcactaaggacatggaggcactatctgtatgggcataaatgtgatgtttacacagaccacaagagtctaaagtacatattcactcaatcagagttgaatatgagacaacgaagatggttagagctgatcaaagactatgagttggagattcattaccatccaggcaaagcgaacgttgtggcagacgctttgagcaggaagagtcagtctattcgacagttgatcctcaaggaagctcatgagacagcttattctatacaccctggaagtgagaagatgtatcaggatttgaagaagaaattctggtggtacgaaatgaagagggaaattgcagagcatgtggctatgtgtgatagctgtcgacggatcaaggcagagcaccagagaccagctggattgttgcaaccgttgcaaattcctcagtggaaatgggatgaaatcgatcagtccggatgggacaagaggttgccttacgcagagttctcctataacaacagttaccaggccagcttgaagaattcaccatttcaggcgctttatgggaggagttgtagaactccgttgcaatgggatcagcctggagaaaagcaagtgttcgggcgagacattctgcttgaagctgaagagaacatcaagatggtccgggagaatctgaagatagtgcaatcaaggcagcgaagctatgcagacacaagaagaagagagctgattttcgaagatggagattttgtctatctgaaagtgtcaccgatcagaggagttagaagatttggagtcaagggcaagctagcaccccgctatgttggcccgtatcagattctcgcaaggcgtggagaagtggactatcagctcagtttgccagaaggcttgttcgcagtgcatgatgtctttcatgtatctcagttgaagaagtgtctgcgtgtgacagaagagcagttgccagtggaaggtctggaggtccaggaggacttgacctgcatagagaagccaacgtag

SEQ ID NO: 92935 - DNA, 354 bp, Zea mays
  Clone ID: MRT4577_184746C.1
atggatgctgaagactggctgcgcactgtggagcaggagttgcataccgctcagtgtgacgacaaggagaaagtcctgtatggtccctgtctgttgagaggagcagcccaatcatggtgggagtcttatctcgccacccatgccaacctcgacaccatcacctgggaagaattcagaggtctgatgacagtgaagaaggaggagttcctggccctcaagcaagggtcatcgtctgtcagtgagtaccgggacaggtttctgcagctgtctcgctatgctcctgaagatgtcaacaccgacgccaagagacaataccgtttcctgaaaggcttggttgaccctctgcactattag

SEQ ID NO: 92936 - DNA, 2163 bp, Zea mays
  Clone ID: MRT4577_184747C.1
atgtcgatcgagcagatgtttctgatgcagactcaggcagttcaagccatcggtcagactttggccgccattcagcagcagcagcagcaacagcagcaggccccacctcagcctcagatgcccagagacaagcgtgctgaattcatgagaggtcatccaccaacgttcgctcattcttctgaccccatggatgctgaagactggctgcgcactgtggagcgggagttgcataccgctcagtgcgatgacagggagaaagtcctgtatggtccccgtctgttgagaggagcagcccagtcatggtgggagtcttacctcgccacccatgcccaccctgacgccatcacctgggaagagttcagaggtagtttccgccagtaccatgttcctgcaggtctgatgacagtgaagaaggaggagttcctggccctcaagcaagggccatcgtctatcagtgagtaccgggacaagtttctgcaattgtctcgctatgctcctgaagatgtcaacaccgacgccaagcgacagtaccgttttctgagaggcttggttgaccctctgcagtaccaactgatgaatcataccttcccgacattccagcacctgattgatagagcaatcatgacagagaggaagcgtaaggagatggaggatcgtaagcgcaagatcagtggaccccagcctggaagcagcaatcgtcctcgtttctcaggcaatcaacctcagcagttcaggcagaaccagcgtccacctcagcagcatcagcagtttcaaaggcagtatcctcagcaccagtaccagaatcgtcagagcaatcagtcaggaggtcagtttcagaggcagaatcagcaggcacctcgtcttcctgccccaacagcccagcagaacaatcaggcagcaccagctcaggttggaaacagagcatgtttccactgtggagagcaaggccattgggtgatgcaatgtccgaagaaggcagcccagcagcagtcaggccccaatgctccagcgaagcagaatgtgcctcagccgggagcaggcaatcgctctcagccgcgctataatcatgggagactgaaccacttggaggctgaagcagttcaggagacccccgacatgatagtagtcggattgcctcgcactcgagccggctatgattccatttgggtagtagtggaccgcttgaccaagtcagcccacttcatacctgtcaagaccaactatagcagtgcagtattggcagaattgtacatgtctcggatcgtttgtcttcatggtgtgccaaagaagatagtgtcagacagaggaacgcagttcacctctcatttctggcagcagttgcatgaagccttgggcacacatctgaatttcagttcagcttatcatccacagacagatggccagaccgaaagaaccaatcaaattctcgaagacatgttgagagcctatgcgttgcaggatcagtccggatgggacaagcgattgccttatgcagagttttcctataacaatagttaccaggccagtttgaagatgtcaccatttcaggcgctctatggaaggagttgcagaactccgttgcaatgggatcagcctggagagaagcaagtgtttgggccagacattttgcttgaagccgaagagaacatcaagatggtccgagagaacctgaagatagcgcaatcgaggcagcgaagctatgcagacacaagaagaagagagctgagtttcgaagtcggagactttgtctatctgaaagtgtcaccgatcagaggagtcagaaggttcggagtcaaaggcaagctagcaccccgctacattggtccgtatcagattcttgcaagacgtggagaagtggcctatcagctcagtttgccagaaaatttgtctgctgtgcatgacgtctttcatgtgtctcagttgaagaagtgcttgcgtgtgccagaagagcagttgccagtggaaggtcttgaagtccaggaggacttgacctacgttgagaagccagtgcaggtccttgaggttgcagacagagtcacccgaaggaagaccatcagaatgtgcaaagttagatggaatcaccactctgaggaagaagcaacctgggagcgtgaagatgatctgatggctaaatatcctgagctctttgctagccaaccctga

SEQ ID NO: 92937 - DNA, 381 bp, Zea mays
  Clone ID: MRT4577_184748C.1
ctcgctgaatgactagcgttcagtgtcaaccggcgcctcctgtcctgaccaccaggcaccctgcactgcacgcccaagtttcctcttgttcccctgcccagactgcacgcctcctgtcctgaccatgcctctgaggccagttcatggctttgcgtctcttcttgtcatcttcgcctgccactgccatgggggaggaagcgagcagggagcggacgtggcggcagagcggctggagcgcgacgtgacgtcgcccctggccacggtcccggtggtggacccgacggcggcggcggcggcgacgacgacgcagtcgccggccaccggcgggagctggtgcgtggcgagccccagcgcgaggcgacggcgctgcaggtggcgctg

SEQ ID NO: 92938 - DNA, 1497 bp, Zea mays
  Clone ID: MRT4577_184749C.1
atggtccccgacacaaacgtagtggcagatgctttgagcaggaagagtcaagtcaatctgatggtcgctcgttcgatgccttacgagttggccaaggagtttgacaggttgagtctcggatttctgaacaattcgcgaggagtcacagttgagttggaacctaccttggagcgagaaatcaaagaagcgcagaagaatgatgagaagatcagtgagatccggcgactgattctagatggcagaggcaaagattttcgagaagatgcagaagatgtggtatggttcaaagaccgcttgtgtgttcccaatgtccaatccattcgggatttgatcctcaaggaagctcatgagatagcttatttgattcaccctggtagtgagaagatgtatcaggatctgaagaagaaattctggtggtacggaatgaagagggaaatcactgagcatgtggctatgtgcgatagttgtcgaagaattaaggcagagcaccagagaccagctggattgttgcaaccgttgcagatccctcagtggaaatgggatgaaatcggtatggatttcatagtcggattgcctcgcactcgagccgactacgattccatttgggtagtagtggaccgcttgaccaagtcagcccacttcatacctgtcaagaccaactacagcagtgcagtattggcagaattgtatatgtctcggatcgtttgtcttcatggtgtgccaaagaagatagtgtcagacagaggaacgcagttcacctctcatttctggcagcagttgcatgaagccttgagcacacatctgaatttcagttcagcgtatcatccgcagacagatggccagaccgaaaggaccaatcaaattcttgaagacatgttgagagcctgtgcgttgcaagatcagtccggatgggacaagagattgccttatgcagagttttcctataacaacagttaccaggccagtttgaagatgtcaccatttcaggcgctctatggaaggagttgtagaactccgttgcaatgggatcagcctagagaaaagcaagtgtttgggccagacattttgcttgagaccgaagagaacatcaggatggttcgagagaatatgaagatagtgcaatcgaggcagcgaagctatgcagacacaagaagaagagagctgagtttcgaagtcggagattttgtctatctgaaagtgtcaccgatcagaggagtcagaaggttcggagtcaaaggcaagctagcaccccgctacattggtccataccaaattctctcaaggcgtggagaagtggcctatcagctcagtctgccagagaatttgtccgctgtgcacgatgtctttcatgtgtctcagttgaaaaagtgcttgcatgtgccagaagagcagttgccagtggaaggtctcgaagtccaggaggacttgacctacgttgagaagccagtgcagatccttgaggttgcagacagagtcacccgaaggaaggccatctga

SEQ ID NO: 92939 - DNA, 316 bp, Zea mays
  Clone ID: MRT4577_18474C.1
attcggctcgagctcttttatcgcccttgtgttgaacgggtgtggctccgccagggcaggggccatttctacaccatgtcacgcacaggatccccctctcgagaaaatgaccaggggttaggcactcactaatgctttgaccttctttgggttgaaagacgatgctcactcatcacgtgaccaactcactagacagcatgatcgcatactacaatatcgggatatgtgttcatcgtatctagcatacagacggactgcagaatgcatacatatgcacaggctgaggcatactgccgtctcagtctatagagatcac

SEQ ID NO: 92940 - DNA, 389 bp, Zea mays
  Clone ID: MRT4577_184750C.1
ggtcggacgaaggccaacttgttatagttgcgcctgccgcgccgaaggcgaagggcggggctcttagcgccggaggcgaggtggcggccctcgcggctgtgagggatgaggcgggcgctgcgtcccgccggctgaaggaggtggtggagtcgctaagtcaggtggctgacttcgccaaccgcacggcgtcgggggcctttacggcagttgtgtctgccgaagttgagagacttcggacgcaacatgctgacgccgttcgagagaaatcggccgccgacaacaagtgccgcaagctggcggacaaggtggccgcgctggagggagagaaggctgacctccggcgccagttggcgggggagagaagggagaccaacgaggcccttgtcaag

SEQ ID NO: 92941 - DNA, 195 bp, Zea mays
  Clone ID: MRT4577_184751C.1
ggtgtaattaaaattaaatagggtgatataaaacaagttccatttgtgtatttaaataaatgagggtacctagttctattgtgcgttttgtgattgggatggacaaaaaaaaaacaaaacttttcagtataaaataaggatttagaatatcattagcactttctttattaaagaaatcataaagtatttgacaaa

SEQ ID NO: 92942 - DNA, 4470 bp, Zea mays
  Clone ID: MRT4577_184752C.1
atgcgcttgacaccctgctacgtcgggcatttgaccggcatacttggtccgtcgagtatcgctgtgtggtctaccagcacagtcgcggggtctacccggaccgctgggaggcaacctgcttggtgcgctgtccggagaacagtctccagggtgctgaggtctgctcagagcactattttatctctgagcgggactcagctgaggcagccatgcaagatgctgcacggcgtgcgctttcgcactactgctcggttttcgatgtcagagaacaggcgcagaggaggaaggcgtgctcaacaggagcgagccgctccgcaggatgaggtgccccagcagcagcacctgccgcccccgcccccgatgtccatcgagcagatgtttctgatgcagactcaggcagttcaagccatcggtcagactttggccgccattcagcagcagcagcagcagcagcaacaacaacaggccccacctcagcctcagatgcctcagatgcctagagacaagcgtgctgaattcatgagaggtcatccaccaacgttcgctcattcttctgaccccatggatgctgaagattggctacgcactgtggagcgggagttgcataccgctcagtgcgatgacagggagaaagtcttgtatggtccccgtctgttgagaggagcagcccagtcatggtgggagtcttacctcgccacccatgcccaccctgacgccatcacttgggaagagttcagaggtagcttttgtcagtaccatgttcctgcaggtctgatgacagtgaagaaggaggagttcctggctctcaagcaagggccgttgtctgtcagtgagtatcgagacaggtttctgcagctgtctcgttatgctcctgaagatgtcaacaccgacgccaagcagcagtaccgtttcctgagaggcttggttgaccctctgcagtaccaactgatgaatcacactttcccgacattccagcacctgattgacaaagcaatcatgacagagaggaagcgtaaggagatggaggatccaaaccagcagaacagtcaggcagcaccagctcaggttggaaacagagcatgtttccactgtggagagcaaggccactgggtaatgcaatgtccgaagaaggcagcccagcagcagtcaggccccaatgccccagcaaagcagaatgtgcctcagcctggagcagacaatcgccctcagccgcgctataatcatggaagactgaaccacttggaggctgaagcagttcaggagacccccggcatgatagtagccggtggtagaattcgagccgatagcatttgtttgaatataagtgtggaaataagggggatagcgtttcccgccaaccttatagtaatgggtactcagggaatagatgtcatcctagggatgaattggctagataagtatcaggcagttatcagttgtgataagaggacaatcaagttggtgtccccactaggagaggaagtggtgaccgagttagtcccgcctgagccaaagaaaggaagttgttatcagatagctgttgatagcagtgaagcagacccaatcgagaggatcaaggttgtgtccgagttcccagatgtgtttccaaaggacttaccgggtatgccaccagagcggaaagttgagtttgccatagagcttcttcctggaaccgcccctatctttaagagagcttacagaatatctggaccagagttggatgaacttaagaagcaaattgatgagctgtcagagaaaggttacattcggccaagcacctcgccttgggccgcccctgtcctatttgtggagaagaaagatggcaccaagaggatgtgtattgattatcgagctttgaatgaggtcacgatcaagaacaagtatcctttgcccagaatagaagatctgttcgaccagttgagaggagccagtgtgttctccaagattgatctgaggtcaggttatcatcagctcaggatccgaccttcggacattccgaagacggcattcatttccaagtatggtttgtatgagttcacagtgatgtcttttggtttgaccaatgcgccagcgttcttcatgaacttgatgaacagtgtattcatggattatctcaataagtttgtggtggtattcattgatgacattctggtttattctcaaagcgaagaagagcacgcagatcatttgaagatggtattgcagagattgcgagagcaccagttgtatgcaaagttgagcaagtgtgagttctggatcaatgaagtcctgttcttgggtcacataatcaacaaagaaggattggctgtggatccgaagaaagtggcagacattttgaactggaaagcgccaacagatgctagaggaatcaagagtttcattggaatggccggatattatcggtgatttattgaagggttttcgaagatcgcgaaacctatgacagcgttgctaggcaacaaggttgagttcaagtggacccagaaatgccaagaggcctttgaagcgctgaaagagaagttgacaacagcgcctgtcctagtcttgcctgatgtgcacaagcccttctcgatgtattgtgatgcttgttacacaggtttgggatgtgtgttgatgcaagagggaagagttgtggcttactcgtcccgacagctgaaggttcatgagaagaactacccaatccatgatctagagttggcagcagtggttcacgcactgaagacatggaggcactatctgtatggacagaaatgcgatgtttacacagatcataagagtctgaagtacatattcactcagtcagagttgaacatgaggcaacgaagatggttagagttgatcaaagactatgagttggagattcattaccatccaggcaaagcaaacatagtggcagatgctttgagcagaaagagtcaagtcaatctgatggtcgctcgtccgatgccttatgagttggccaaggagttcgacaggttgagtctcggatttctgaacaattcgcgaggagtcacagttgagttggaacctaccctggagcgcgaaatcaaagaagcgcagaagaatgatgaaaagatcagtgagattcggcgactgattctagatggcagaggcaaagattttcgagaagatgcagaaggcgtgatatggttcaaagaccgcttgtgtgttcccaatgtccagtccattcgggagttgattcttaaggaagctcatgagacagcttattcgattcaccctggcagtgagaagatgtatcaggatctgaagaagaaattctggtggtacggaatgaagagagaaatcgcagagcatgtggctatgtgtgatagttgtcgaagaattaaggcagagcaccagagacctgctggattgttgcaaccgttgcagatccctcagtggaaatgggacgaaatcggtatggatttcatagtcggattgcctcgcactcgagtcggctacgattccatttgggtagtagtggaccgtttgaccaagtcagcccacttcatacctgtcaagaccaattacagcagtgcagtattggcagagttgtatatgtctcggatcgtttgtcttcatggggtgccaaagaagatagtgtcagacagaggaacgcagttcacctctcatttctggcagcagttgcatgaagccttgggtacacatctgaatttcagttcagcttatcacccgcagacagatggccagaccgaaaggaccaatcaaattcttgaagacatgttgagagcctgtgcgttgcaagatcagtccggatgggacaagcgattgccttatgcagaattttcctataacaacagttaccaggccagtttgaggatgtcaccatttcaggcgctctatggaaggagttgcagaactccgttgcaatgggatcaacctggagagaagcaagtgtttgggccagacattttacttgaagccgaagagaacatcaagatggtccgagagaatctgaagatagcgcaatcgagacagcgaagctatgcagacacaagaagaagagagctgagttttgaagtcggagactttgtctatctgaaagtgtcaccgatcagaggagtcagaaggttcggagtcaaaggcaagctagcaccccgctacattggtccgtatcagattcttgcaagacgtggagaagtggcctatcagctcagtttgccagagaatttgtctgctgtgcataatgtctttcatgtgtctcagttgaaaaagtgcttgcgtgtgccagaagagcagttgccagtggaaggtcttgaagtccaggaggacttgacctacgttgagaagccagtgcaagtccttgaggttgcagaccgagtcacccgaaggaagaccatcagaatgtgcaaagtcagatggaatcaccactctgaggaagaagcaacctgggagcgtgaagatgatctgatggctaagtacccagagctctttgctagccagccctga

SEQ ID NO: 92943 - DNA, 4551 bp, Zea mays
  Clone ID: MRT4577_184753C.1
atgtcagagaacaggcgcagaggaggaaggcgtgctcagcaggagcgagccgctcaacaggatgaggtgccccagcagcagcacctgccgcccccgcccccgatgtccatcgagcagatgtttctgatgcagactcaggcagttcaagctatcggtcagactttggtcgccattcagcagcagcagcaggccccacctcagcctcagatgcctcagatgcccagagacaagcgtgctgaattcatgagaggtcatccaccaacgttcgctcattcttctgaccccatggatgctgaagactggctgcgcactgtggagcgggagttgcataccgctcagtgtgatgacagggagaaggtcctgtatggtccccgtctgttgagaggagcagcccagtcatggtgggagtcttacctcgccacccatgcccatcctgacgccatcacctgggaagagttcagagggagctttcgtcagtaccatgttcctgcaggtctgatgactgtgaagaaggaggagttcctggctctcaagcaagggccattgtctgtcagtgagtaccgggacaggtttctgcaattgtctcgctatgctcctgaagatgtcaacaccgacgccaagcgacagtaccgtttcctgagaggcttggttgaccctctgcagtaccaactgatgaatcacaccttcccgacattccagcacctgattgacagggcaatcatgacagaaaggaagcgtaaggagatggaggatcgtaagcgcaagatcagtggaccccagcctggaagcagcaatcgtcctcgtttctcaggcaatcaacctcagcagttcaggcagaaccagcgtccacctcagcagtatcagcagtttcaaaggcagtatcctcagcatcagtaccagaaccgtcagagcaatcagtcaggaggtcagtttcagaggcagaatccacaagcacctcgtcttcctgccccagcaaaccagcagaacaatcaggcagcaccagctcaggttggaaacagagcatgtttccactgtggagagcaaggccactgggtgatgcaatgtccgaagaaggcagcccagcagcagtcaggcctcaatgccccagcaaagcagaatgtgcctcagcctggatcaggcaatcgctctcagccgcgctataatcatggaaggctgaaccacttggaggctgaagcagttcaggagacccccggcatgatagtaggtatgttcccagtcgactcccatattgcaaaagtgttatttgatactggagcaacgcattctttcattactacatcatgggtagaagcacataatcttccaattactaccatgtcaacccccattcaaattgactcagccggtggtagaattcgagccgatagcatttgtttgaatataagtgtggaaataagggggatagcatttcccgccaacctcatagtaatgggtactcagggaatagatgtcatcctagggatgaattggctagataagtatcaggcagttatcagttgtgataaaaggacaatcaagttggtgtccccactaggagaggaagtggtgaccgagttagtcccgcctgagccaaagaaaggaagttgttatcggataactgtcgatagtggtgaagcagacccaattgagagtatcaaggttgtgtccgagttcccagacgtgtttccaaaggacttaccgggtatgccaccagagcggaaagttgagtttgccatagaacttcttcctggaaccacccctatctttaagagagcttaccgaatatccggactagagttggttgagcttaagaagcagattgatgagctgtcagagaaaggttacatccggccaagcacctcgccttgggccgcccctgtcctgtttgtggaaaagaaagatggcaccaaaaggatgtgtatcgattatcgagctttgaatgaagtcacaatcaagaacaagtatcctttgcccagaattgaagatctgttcgaccagttgagaggagccagtgtgttctccaagattgatctgaggtcaggttatcatcagctcaggatccgaccttcggacattccgaagacggcattcatttccaagtatggtttgtatgagttcacagtgatgtcttttggtttgaccaatgcgccagcgttctttatgaacttgatgaacagtgtcttcatggattaccttgataagtttgtggtggtattcattgatgacattctgatttattctcaaagcgaagaagagcacgcagatcatttgaggatggtattgcagagattgcgagagcaccagttgtatgcaaagttgagcaagtgtgagttctggatcagtgaagtcctgttcttgggtcacataatcaacaaagaaggattggctgtggatccgaagaaagtggcagacattttgaactggaaagcgccaacagatgcccgaggaatcaagagtttcattggaatggccggatattatcggcgattcattgaagggttttcgaagattgcgaaaccaatgacagcgttgctaggcaacaaagttgagttcaagtggacccagaaatgccaagagacctttgaagcgttgaaagagaagttgactatagcgcctgtcctagtcttgcctgatgtgcacaagcccttctcggtgtattgtgatgcttgttacacaggtttgggatgtgtgttgatgcaagagggaagagttgtggcttactcgtcccgacagttgaaggttcatgagaagaattacccaatccatgatctagagttggcagcagtggttcacgcactgaagacatggaggcactatttgtatgggcagaaatgtgatgtttacacagaccacaagagtctgaagtacatattcactcagtcagagttgaacatgaggcagcgaagatggttagagttgataaaagactatgagttggagattcattaccatctaggcaaagcaaacgtagtggcagatgctttgagcagaaagagtcaaatcaatctgatggttgctcgtccgatgccttatgagttggccaaagagttcgacaagttgagtctcggattcctgaataattcgcgaggagtcacagttgagttggaacctaccttggaacgagaaatcaaagaagcgcagaagaatgatgagaagattagtgagatccggcgactgattctagatggcagaggcaaagattttcgagaagatgcagaaggcgtgatatggttcaaagaccgcttatgtgttcccaatgtccagtccattcgggaattgattcttaaggaagctcatgagacagcctattcgattcaccctggcagtgagaagatgtatcaggatctgaagaagaaattttggtggtacggaatgaagagggaaatcgcagagcatgtggctatgtgcgatagttgccgaagaattaaggcagagcaccagagacctgctggactgttgcaaccgttgcagatccctcagtggaaatgggatgaaattggtatggatttcatagtcggattgcctcgcactcgagccggctacgattccatttgggtagtggtggaccgcttgaccaagtcagcccacttcatacctgtcaagaccaactacagcagtgcagtattggtagaattgtatatgtctcgaatcgtttgtcttcatggtgtgccaaagaagatagtgtcagacagaggaacgcagttcacctctcatttctggcagcagttgcatgaagccttgggcacgcatctgaatttcagttcagcttatcatccgcagacagatggccagaccgaaaggaccaaccagattcttgaagacatgttgagagcctgtgcgttgcaagatcagtccggatgggacaagcgattgccttatgcagagttttcctataacaacagttaccaggccagtttgaagatgtcaccatttcaggcgctctatggaaggagttgcagaactccgttgcaatgggatcagcctggagaaaagcaagtgtttgggccaggcattttacttgaagccgaagagaacatcaagatggtccgagagaatctgaagatagcgcaatcgaggcagcgaagctatgcagacacaagaagaagagagctgagtttcgaagtcggagactttgtctatctgaaagtgtcaccgatcagaggagtcagaagattcggagtcaaaggcaagctagcaccccgctacattggtccgtatcagattcttgcaagacatggagaagtggcctatcagctcagtttgccagagaatttgtcagctgtgcatgatgtctttcatgtgtctcagttgaagaagtgcttgcgtgtgccagaagagcagttgccagtggaaggtcttgtagtccaggaggacttgacctacgttgagaaaccagtgcaaatccttgaggttgcagacagagtcacccgaaggaagaccatcagaatgtgcaaagtcaaatggaatcatcactctgaggaagaagcaacctgggagcgtgaagatgatctgatggctaaataccctgagctctttgctagccaaccctga

SEQ ID NO: 92944 - DNA, 218 bp, Zea mays
  Clone ID: MRT4577_184754C.1
ctggtctccagcatccggacgctgctgtccctgctgcggatgggatcggtcacgccgctagacgtgcgtgcgcctcaacctcgccgacgctcgccatggaaccttgctcgttgtactcgccgtcgttccccgtccatgccgtgagctacagcgtgctcgtcgttgccgcctcctcgttggccacgttcaactcggcagctccttcgtgtcatcgattt

SEQ ID NO: 92945 - DNA, 440 bp, Zea mays
  Clone ID: MRT4577_184755C.1
gtcgatacacgcctctacatggaatcgtcatatagcttcgagaagccttggcccaatgctgcatccggttcagccgcaccaaggtccagacgtctataaaaggagcccaggtcactagggtttagttttgacgccccaccccggtgcacaagcggggacgagtaccgagaggagcacgacgatggcggttcccaaggggcgcgcacgacggctcccccaagcgcacgacggtgacggttcctgaggtgcacatgtggtggctgctctccaaggcgcatgttggcgacggttcccaagaggcgcgcgcggctggtcctcaggaggcacgaatagcggcggtggccagaagcatgcacaggcagcaacacctccctgttgtgagtgtgacagtaagggcctctacctcaaactattttcgagctccgacgaatcggacgcca

SEQ ID NO: 92946 - DNA, 1061 bp, Zea mays
  Clone ID: MRT4577_184756C.1
tcatcgagcagatgctcatgatgcagactcaggcagttcaagccatcggtcagactatggccggcattcagcaacagcagcagccaccacctcagcctcaaatgcctcaaatgcccagggacaagcgtgctgaattcatgagaggtcatcccccaatgttcgctcactcttctgaccccatggatgctgaagactggctgcgcacagtggagcgggagttgcataccgctcagtgtgatgacagggagaaagttctgtatggtccccgtctgttgagaggagcagcccagtcttggtgggagtcttatctcgccacccatgccaaccccgacaccatcacctgggaagagttcagaggaagctttcgtcagtaccatgttcctgccggtctcatgacaatgaagaaggaggagttcctggccctcaagcaagggtcatcgtcttatcagctgatgaatcacaccttcccgacattccagcacctgattgacagagcaatcatgacagagaggaagcgtaaggagatggaggattgcaagcgcaaaatcagtggaccccagcctggaagcagcaatcgccctcgtttctcaagcaatcaacctcagcagttcaggcagaaccagcgtccacctcagcagcagcagtttcaaaggcagtttcctcagcatcagaatcgccagaacaatcagtcaggaggaggtcagttccagaggcagaatcagcaggcacctcgtcttcctgccccagcaaaccagcagaacagtcaggcagcaccagctcaggttggaaacagagcatgtttccactgtggagagcaaggccattgggtgatgcaatgtccgaagaaggcagcccagcagcagtcaggcccaaatgccccagcaaagcagagtgtgtctcagcctggagcaggcaactgctctcagccgcgctataaccatgggagactgaaccacttggaggctgaagcagttcaggagacccccggcatgatagtaggtatgtttctagtcgactcccatattgcagaagtgttatttgatactggagcaatgcattaa

SEQ ID NO: 92947 - DNA, 4473 bp, Zea mays
  Clone ID: MRT4577_184757C.1
atgtcgatcgagcagatgtttctgatgcagactcaggcagttcaggccatcggtcagactctggccgccattcagcagcagcagcagcagcaacagcagcaagcaccaccccagcctcagatgcctcagatgcccagagacaagcgtgctgaattcatgagaggtcatcccccaacgttcgctcactcttctgaccccatggatgctgaagattggctgcgcactgtggagcgggagttgcataccgctcagtgtgatgacatggagaaggtcttgtatggtccccgtctgttgagaggagcagcccaatcatggtgggagtcttacctcgccacccatgccaaccccgacaccatcacctgggaagaattcagaggtagctttcgtcagtaccacgtgcctgcaggtctgatgacagtgaagaaggaggagttcctggcccttaagcaagggtcatcatctgtcagtgagtatcgagacaggtttctgcaattgtctcgctatgctcctgaggatgtcaacactgacgccaagcgacaataccgttttctgagaggcttggtcgaccccctgcagtatcaactgatgaatcacaccttcccgacattccagcacctgattgatagagcgatcatgacagaaaggaagcgtaaggagatggaagatcgtaagcgcaagatcagtggaccccagcctggaagcagcagccgccctcgtttttcaggcaatcaacctcagcagttcaggcagaaccagcgtccacctcagcagcgtcagcagcatcagcagttccaaaggcagtatcctcagcatcagtaccagaaccgtcagagcaatcagtcaggaggtcagtttcaaaggcagaatcagcaagcaccccgtcttcctgccccagcaaaccagcagaacagtcaggcagcaccagctcaggttggaaacagggcatgtttccactgtggagagcagggccattgggtgatgcaatgtccgaagaaggcagcccagcagcagtcaggccccaatgccccagcaaagcagaatgtgtctcagcctggagcaggcaatcgccctcaacagcgctataatcatggaagattgaatcacttggaggctgaagcagttcaggagacccccggcatgatagtaggtatgttcccagtcgactcccatattgcagaagtgttatttgatactggagcaacgcattctttcattactgcatcatgggtagaagcacataatcttccaactactaccatgtcaacccccattcaaattgactcagctggtggtagaattcgagctgatagcatttgtttaaatataagtgtggaaataagggggatagcgtttcccgccaaccttatagtaatgggtactcagggaatagatgtcatcctagggatgaattggttagataagtatcaggcagttatcagttgtgataaaaggacaatcaagttggtgtccccactaggaaaggaagtggtgaccgagttagtcccgcctgagccgaagagaggaagttgttatcagatggctgtcgatagcagtgaagcagatccagttgagagtatcaaggttgtgtctgaattcccagatgtgtttccaaaggatttaccgggtatgccaccagagcggaaagttgaattcgctatagagcttcttcctggaaccgcccccatctttaagagagcttacagaatatctggaccagagttggttgagcttaagaagcagattgatgagctgtcagagaaaggttacatccggccaagcacctcgccttgggccgcccctgtcttatttgtggaaaagaaagatggcaccaagaggatgtgcatcgattatcgagctttgaatgaggtcacgatcaagaacaagtatcccttgcccagaatagaagatctgttcgaccagttgagaggagccagtgtgttctccaagattgatctgaggtcaggttatcatcagctcaggatccgaccttcggacattccgaagacgacattcattaccaagtatggtttgtatgagttcacagtgatgtcttttggtttgaccaatgcaccagcgttcttcatgaatctgatgaacagtgtattcatggattaccttgataagtttgtggtggtattcattgatgacattctgatttattcccaaagcgaagaagagcacgcagatcatttgaggatggtattgcagagattgcgagagcaccagttgtacgcaaagttgagcaagtgtgagttctggatcagcgaagtcctgttcttgggtcacataatcaacaaggaaggattggctgtggatccgaagaaagtggcagacattctgaactggaaagcgccaacagatgctagaggaatcaagagcttcattggaatggccggatattatcggcgattcattgaagggttttcaaagattgcgaaaccaatgacagcgttgctaggcaacaaagttgagttcaagtggacccagaaatgtcaagaggcctttgaagcgctgaaagagaagttgactacatcgcctgtcctagtcttgcctgatgtgcacaagcccttctcggtgtattgtgatgcttgttacacaggtttgggatgtgtgttgatgcaagagggaagagttgtggcttactcgtcccgacagttgaaggttcatgagaagaattacccaatccatgatctagagttggcagcagtggttcacgcactgaagacatggaggcactatctgtatggacagaaatgcgatgtttacacagatcacaagagtctgaagtacatattcactcagacagagctgaacatgaggcaacgaagatggttagagctgatcaaagactatgagttggagattcattaccatccaggcaaagcaaacgtagtggcagatgctttgagcagaaagagtcaagtcaatctgatggtcgctcgcccgatgccttatgagttggccaaggagttcgacaggttgagtctcgggtttctgaacaattcgcgaggagtcacagttgaattggaacctaccttggagcgagaaatcaaagaagcacagaagaatgatgaaaagatcagtgagattcggcgattgattccagatggcagaggcaaagattttcgagaagatgctgaaggcgtgatatggttcaaagaccgcttatgtgttcccaatgtccagtctattcgagagttgatcctcaaggaagctcatgagacagcctattcgattcaccctggtagtgagaagatgtatcaggatctgaagaagaaattctggtggtacggaatgaagagggaaatcgcagagcatgtggctaagtgcgatagttgccgaagaattaaggcagagcaccagagaccagctggattgttgctaccgttgcagatccctcagtggaaatgggatgaaattggtatggatttcatagtcggattgcctcgcactcgagccggctacgattctatttgggtagtggtggaccgtttgaccaagtcagcccacttcatacctgtcaagaccagctacaacagtgcagtattgacagagttgtatatgtctcggatcgtttgtcttcatggtgtgccaaagaagatagtgtcagacagaggaacgcagttcacctctcatttctggcagcagttgcatgaagccttgggcacacatctggatttcagttcagcttatcacccgcagacagatggccagactaaaaggaccaatcaaattctcgaagatatgttgagagcctgtgcgttgcaagatcagtccggatgggacaagcgattgccttatgcagagttttcctataacaacagttaccaggccagtttgaagatgtcaccgtttcaggcgctttatggaaggagttgtagaactccgttgcaatgggatcagcctggagagaagcaagtgtttgggccagacattctgcttgaagccgaagagaacatcaagatggtccgagagaatctgaagatagcgcaatcgaggcagcgaagctatgcagacacaagaagaagagagctgagttttgaagtcggagactttgtctatctgaaagtgtcaccgatcagaggagtcagaagattcggagtgaaaggcaagctagcaccccgctacattggtccgtaccagatcctctcaaagcgtggagaagtggcttatcagctcagcctgccagagaatttgtctgctgtgcatgatgtctttcatgtgtctcagttgaagaagtgcttgcgtgtgccagaagagcagttgccagtggaaggtcttgaggtccaggaggacttgacctatgttgagaagccagctcagatccttgagattgcagacagagtcacccgaaggaagaccatcagaatgtgcaaagtcagatggaatcaccactctgaggaagaagcaacctgggagcgtgaagatgatctagtggccaagtacccagagctctttgctagccagccctga

SEQ ID NO: 92948 - DNA, 556 bp, Zea mays
  Clone ID: MRT4577_184758C.1
actacatataccatcaatcaaggttactcatcgcacataggaataatctcttcttaacatcagtactctaacaacagtctatcaagacggtcgctatgtacttgataatgttcgtgtcttcctcctcccagcatgtggacgcgtctcggccctggcattgctgctgctgctgctggccgtgctggcctacagctccttcgcggcaggtcagcttcgaccaggagacgtacatcacggcgccccacctctggtacaagatgctcaacaacggcgtcgccgtccacgctgtgcttcaaccgcacgctctcctccaacagccacgcccggtccgagtaccaccgccacaacacctacatctggctgaagatgatgacgggccacttcggcggcaccgtcagcatgtactacgtggccaacatcacgcggcaagtgacggacgtctatcgtacttcgagtccatcaggccacagcgtccagtgaaccataatcgactgacaccaacaagcatacgggagggaactcgctcggtgaatagcagcgcacgcggtcatcagaa

SEQ ID NO: 92949 - DNA, 4542 bp, Zea mays
  Clone ID: MRT4577_184759C.1
tgagaagctgtgtggtctgtgtggagatcagtgaagatgctcatctgttcagtgctgttgaagaattctatactcttttcttatgctgcaagaattgccagatcagttctgatgtgtggttgcattctgcagatgtcagagaacaggcgcagaggaggaaggcgtgctcagcaggagcgagccgctcaacaggaggaggtgccccagcagcagcacctgccgcccccgcccccgatgtcgatcgagcagatgtttctgatgcagactcaggcagttcaagcaatcggtcagactttggccgccattcagcagcagcagcagcagcaggccccacctcagcctcagatgcctcagatgcccagagacaagcgtgctgaattcatgagaggtcatccaccaacgttcgctcattcttctgaccctatggatgctgaagattggctgcgcactgtggagcgggagttgcataccgctcagtgcgatgacagggagaaagttctgtatggtccccgtctgttgagaggagcagcccaatcatggtgggagtcttacctcgccacccatgcccaccctgacaccatcacctgggaagaattcagaggtagctttcgtcagtaccatgtccctgcaggtctgatgacagtgaagaaggaggaattcctggccctcaagcaagggcccttgtctgtcagtgagtaccgggacaagtttctgcaattgtctcgctatgctcctgaagatgtcaacaccgacgccaagcgacagtaccgttttctgagaggcttggttgaccccctgcagtaccaactgatgaatcataccttcccgacattccagcacctgattgacagagcaatcatgacggagagaaagcgcaaggagatggaagatcgtaagcgcaagatcagtggaccccagcctggaagcagcagccgtcctcgtttctcaggcaatcaacctcagcagttcaggcagaaccagcgtccacctcagcagcatcagcagtttcaaaggcagtaccctcagaatcagtaccagaaccgtcagagcaatcagtcaggaggtcagtttcaaaggcagaatcagcagccacctcgccttcctgccccagcaaatcagcagaacagtcaggcagcaccagctcaggttggaaacagagcatgtttccactgtggagaacaaggccactgggtgatgcaatgtccgaagaaggcagcccagcagcagtcaggccccaatgccccagccaagcagaatgtgcctcagcctggagcaggcaatcgctctcagccgcgctataatcatggaagattgaaccacttggaggctgaagcagttcaggagacccccggcatgatagtaggtatgttcccagtcgactcccatattgcagaagtgttatttgatactggagcaacgcattctttcattactgcatcatgggtagaagcacataatcttccaattactaccatgtcaacccccattcaaattgactcatccggtggtagaattcgagccgatagcatttgtttgaatataagtgtgaaaataagggggatagcatttcccgccaaccttatagtaatgggtactcagggaatagatgtcatcctagggatgaattggctagataagtatcaggcagttatcagttgtgataaaaggacaatcgagttggtgtccccactaggagaggaagtggtgaccgagttagtcccgcccgagccaaagaaaggaagttgttatcagatggctgtcgatagcagtgaagcagacccaattgagagtatcaaggttgtgtccgagttcccagatgtgtttccaaaggatttaccgggtatgccaccagagcggaaagttgagtttgccatagagcttcttcctggaaccgcccctatctttaagagagcttacagaatatctggaccagagttggatgaacttaagaagcaaattgatgagctgtcagagaaaggttacattcggccaagcacctcgccttgggccgcccctgtcctgtttgtggagaagaaagatggcaccaagaggatgtgcattgattaccgagctttgaatgaggtcacgatcaagaacaagtatcccttgcccagaatagaagatctgttcgaccagttgagaggagccagtgtgttctccaagattgatctgaggtcaggttatcatcagctcagaatccgaccttcggacattccgaagacagcattcatttccaagtatggtttgtacgagttcacagtgatgtcttttggtttgaccaatgcgccagcgttcttcatgaacttgatgaacagtgtattcatggattatcttgataagtttgtggtggtattcattgatgacattctgatttattctcaaagcgaagaagagcacgcagatcatttgaggatggtgttgcagagattgcgagagcaccggttgtatgcaaagttgagcaagtgtgagttctggatcagtgaagtcctgttcttgggtcacataatcaacaaagaaggattgtctgtggatccgaagaaagtggcagacattttgaactggaaagcgccaacagatgctagaggaatcaagagtttcattggaatggccggatattatcggcgattcattgaagggttttcgaagattgcgaaaccaatgacagcgttgctaggcaacaaggttgagttcaagtggacccagagatgtcaagaggccttcgaagcgctgaaagagaagttgactacaacgcctgtcctagtcttgcctgatgtgcacaagcccttctcggtgtattgcgatgcttgttacacaggtttgggatgtgtgttgatgcaagagggaagagttgtggcttactcgtcccgacagttgaaggttcatgagaagaactacccaatccatgatctagagttggcagcagtggttcacgcactgaagtcatggaggcactatttgtatgggcagaaatgcgatgtttacacagaccacaagagtctgaagtacatattcactcagtcagagttgaacatgaggcagcgaagatggttagagttgatcaaagactatgagttggagattcattaccatccaggcaaagcaaacgtagtggcagatgctttgagcagaaagagtcaagtcaatctgatggtcgctcgtccgatgccttatgagttggccaaagagtttgacaggttgagtctcggatttctgaacaattcgcgaggagtcacagttgagttggaacctaccttggagcgcgaaatcaaagaagcgcagaagaatgatgagaaaatcagtgagatccggcgattgattctagaaggcaaaggcaaagattttcgagaagatgcagaaggcgtgatatggttcaaagaccgcttgtgtgttcccaatgtccagcccattcgggagttgattcttaaggaagctcatgagatagcttattcgattcaccctggcagtgagaagatgtatcaggatctgaagaagaaattctggtggtacggaatgaagagggaaatcgcagagcatgtggctagatcccttagtggaaatgggatgaaatcgtcagcccacttcatacctgtcaagaccaactacaacagtgcagtattggcagaattgtatatgtctcggatcgtttgtcttcatggtgtgccaaagaagatagtgtcagacagaggaacgcagttcacctctcatttctggcagcagttgcatgaagctttgggcacacatctgaattttagttcagcttatcatccgcagacagatggccagaccgaaaggaccaatcaaattcgtgaagatatgttgagagcctgtgcgttgcaagatcagtccggatgggataagagattgccttatgcagagttttcctataacaacagttaccaggccagtttgaagatgtcaccatttcaggcgctctatggaaggagttgtagaactccgttgcaatgggatcagcctggagagaagcaagtgtttgggccagacattctgcttgaagccgaagagaacatcaagatggtccgagagaatctgaagatagcgcaatcgaggcagcgaagctatgcagacacaagaagaagagagctgagttttgaagtcggagactttgtctatctgaaagtgtcaccgatcagaggagtcagaagattcggagtgaaaggcaagctagcaccccgctacattggtccgtatcagattcttgcaagacgaggagaagtggcttatcagctcagtttgcccgagaatttgtctgctgtgcataatgtctttcatgtgtctcagttgaagaagtgcttgcgtgtgccagaagagcagttgccagtggaaggtctggaagtccaggaggacttgacctacgttgagaagccagtgcaaatccttgagattgcagatagagtcacccgaaggaagaccatcagaatgtgcaaagtcagatggaatcaccactctgaggaagaagcaacctgggagcgtgaagatgatttgatggccaagtacccagagctctttgctagccagccctga

SEQ ID NO: 92950 - DNA, 532 bp, Zea mays
  Clone ID: MRT4577_18475C.1
gaggggaaggcgttcttattaacagattctcacccacccaatacaccggacaactgaaaacacgacggggacccacacggcccaaaatacaacgccaggttcactgactgaccctggaacacccaccctcacacattaactaggaactgggccttattggggggggaaaccaacaccgaaaggggacacaaagccacccacacccccaaaaacatgaccgctggggttcaggaaaccaggaagaaacgatcgattgccccctcctgcaaacacctagaatgatttaaagggggagagggagacctggaaaaaaggcttacccttcccttgccgataagactcgccttctttcttgggcaccgccgaaggatccctggtcacacgccaccagcccggggggccaaatctccggggggacggtatggaaagcatgcttcctcgctgcttgccctcacaccgccaaagatggcggggcgaccaccagtggttggatcacagcacctttttctttttggcccctctttttcctttt

SEQ ID NO: 92951 - DNA, 563 bp, Zea mays
  Clone ID: MRT4577_184760C.1
acattaactcatgaacaaatataaaattcagagctcggcaagggtaagacgagaaaggcagctggagtttgatgcttgctgacaagaaataagcgtcttatttctgttacaggctggaggagattcagcttgatctaggacgttgagaaagcaaatacacttgtacgcgggagataaacaggagtcggtgttttgaataattttttgataaaccttctcatggccttcattggacccttataatatactcctttacctacctgagatggcatgggctgatggtgccgtcagtacctaacacaatgctttaccctgttaacatatggttcatgcctcaccacactcaacttatacttatcttacctcccaacaaactgagtacatgttgcctaaaattgctcttgaagactgtcgccaatcgcaaataatattcagcccaatctgttactacttcaaatcgtgacagccagcttttaattacaggtcactgcctctagacatgctgtgactggatgcctgcagtgccaaatcgtctgatatccacactaatttccctactgtgc

SEQ ID NO: 92952 - DNA, 306 bp, Zea mays
  Clone ID: MRT4577_184762C.1
tggtgctagcgcgcaacgtgcgctcccgcctccgcccaccgctcgccgcctccgcgggtgtctcgtcggccgcggcgcaggcggagagggcgatacgggacgggccgcggaacgagtggagcaggcccggggtggaggccgtctacgactcaccggtggtcgaggtggtgtttgacggggctcaggtgcacagaagtgtccatagattcagagaagtgcaacaatggagagttgtttgagtcaagagtggtggatgcagtggagattgttgttagtgtcgtgagtcatgaagatacaacagtggat

SEQ ID NO: 92953 - DNA, 347 bp, Zea mays
  Clone ID: MRT4577_184763C.1
tttgctttttccctccaatcgcaaacagcggcgggggcgccgggccccgaaaaccctgtggagctcctcatcaatagcgagcgatccccaccgccctctcctccgggtccgccgaactctagccgtcccgggcaggcgaggcgtgcgttcggatcgcgcgggcgggagatgcagggcggcggggtggccgccgccgcggtcccggtgcacgcggccgtggggggcgacggaggaggggctggtcatatagccccccccgcgaatcctcttccccattatggataaagtgagggctccctcccaggaactgctccttgttggggtcgatggcgcccggacggctttga

SEQ ID NO: 92954 - DNA, 288 bp, Zea mays
  unsure (1)..(288): unsure at all n locations
  Clone ID: MRT4577_184764C.1
gatccgttaggcactcgctctgctggaccgcaggggtgagtcnaggcagctgcggatcgctcgagcaagtggatcctccgtccagggctgggatgccaagtgcatgcaagttggcggaggccaaacgctgttgctgtcgtaccttcgctttacttgcccagggctttgttcaacgccccaaacctgaaacccttttgaatttttttacacaaacccggaaagggggttccttccttgtgggaagccgggaaaggggcttcctcgtgggaaggcgtggtgaactttttt

SEQ ID NO: 92955 - DNA, 316 bp, Zea mays
  unsure (1)..(316): unsure at all n locations
  Clone ID: MRT4577_184765C.1
atccggttggcgatgttttaaatcctggatcccaaggtccagagggcatgccggttcggatctaatctgaaccattatagggagttcaaacggctggagtgaactcgtaccctttcggccaaacaaagtttttaaggtagtgtttggttgaagagccaagtagaacggaaacgttctatcccagttttattgttgtttggttatagagtaactagaacaaagtggctccaattagggaatattcgtaaaaattttaaaaaaaattccantggggtaaaaaaaatattattaaatataaaaaattttatttattttt

SEQ ID NO: 92956 - DNA, 448 bp, Zea mays
  Clone ID: MRT4577_184766C.1
ctccgagtccgcaatggagcacgacatgaccgccaccgcaggcgaggaagcattggaggtggagcgggaggagttgagcgactccgagtcgggctgcgagtccatcgagatctccgacctgaagcgccgcatgtggaaagaccagatgctgctcagcaagctagagggccgcgcgggcggcttcgtcgtcggggcgggcccgtcgtcgtccaggccgcttgcgccaccgacggcagcgggcgcgggcggggacgaggagacccccgaggtgcggtgccggcgcaaggcgatgctgcgcgcgcaggacggcgtcctccgccacatgctcaagatgatggaggcctgcaacgcgcgcgggttcgtgtacggcatcatcgacgaggccggcgaccccatgtccggattctccgacagccttcgcggctggtggaaggacaacgtcagcttc

SEQ ID NO: 92957 - DNA, 922 bp, Zea mays
  Clone ID: MRT4577_184767C.1
gcgtcctcctccccgtgaaggagctcgtcgccatctgccgcgaggagggcgtggacaaggtcttcgtcgacgcggcgcacgccatcggccaggtgcccatcgacgtgcgcgacatcggcgccgacttctacaccagcaacctccacaagtggttcttctgcccttccgccgtggccttcctgcacatccgcaaggatgaccccgtagcctcgcagctccaccaccccgtcgtgtctagcgagtacggcaacgggctacccatggagagcgcctggatcggcgtgcgggattacagtgcccagctcgttgtgcctgatgccgttgacttcatgagacggttcgagggcggcatcgaggcgataagcaaacggaaccatgagaaggtgatcgagatgggcacgatgctcgccgaggcttgggggacgtttcttggctcgccgccggaaatgtgcggaagcatggctatggtcgggctgccaggttgccttggcattgagagcgatgatgatgcgatgagagtgagggacatgctgaggaaccaattcaaggtcgaggtgccaatattcaacaactcaacaagtgttgaggaaggacaagagatggccaagggcgatcaagtgacagggtacgtgagaatctcacatcaggtttacaatgtcacggaggagtatgaggtcttgagagatgccgtaggcaagcttgttcttgatggtttctcctgcaccaagctgagaccttctgagaaggttatttctaactgaaactgttattacgcttaattacaatgtctttacctttgttcactcacttcaatttcttgatgaaagtatgaactgctgtagcatgttatctgctgactactcgttcttgtagactctagtctgtaatgaaacacgtttttactgtaaaaaaaaaaaaaaaa

SEQ ID NO: 92958 - DNA, 293 bp, Zea mays
  Clone ID: MRT4577_184768C.1
tcttttgtagtacgtgaccaagacctaaaggggctaccactgaccgggcacagggtggtactataacatttatgtcatgtatattgtgctgatgaactggtacaagacccttctcttacatgagtaagaggttgctgagtttgtctgcagcaaccctgaggagatccctttgcgtatctttggcactgaatattttgtctgagtctactggtgttttacactgaccaagagaaggttgcttcttacttgaagggtgctgccttgatagttgtcaattctgctcctagcaagga

SEQ ID NO: 92959 - DNA, 153 bp, Zea mays
  Clone ID: MRT4577_184769C.1
cacgctgttcacacatgcccacctgggaccatgcgagaggggtacagcactaagctaccagttactggggccatataatacataatcatgcaatgactgtgagctacatgcagatcttgaactgacaacgccaggcagcaatgtgtgcacata

SEQ ID NO: 92960 - DNA, 169 bp, Zea mays
  Clone ID: MRT4577_18476C.1
ccaaatcaattgcacagaggccatatccaactacatggtgcacctgctcaactccaaccccgagatgctcggacggcgtagttgtcctccgttccctgtccagctcctcctcctcctcctccttcttcttcttctggcccttctgctcctcctccatcttctacctctt

SEQ ID NO: 92961 - DNA, 563 bp, Zea mays
  Clone ID: MRT4577_184770C.1
gggcggagtggagcgctacgaagaaaggcagcgtcgtcttctactatgggcgctctctcatgatcgacggcagtcggggcctcttcttctccggcgccatccactaccctaggagcccgcctgagatgtggccgaagctgatcgagcgggccaaggagggcggcctcaacacgatcgagacgtacatattctggaatgcacacgagcctgagcctggcaagtacaattttgaaggcaggttcgacttgatcaagtacctcaagatgatccaggagcatgacatgtatgcaattgtgcgcatcgggcccttcatccaggcagaatggaaccatggtggactgccgtattggcttagagagattgaccacataatattccgggcaaacaatgacccgtacaagaaagaaatggagaaattcgtgagattcatagtgcagaagttgaaggatgctgagttatttgcatcgcacggaggacccatcattctaacacagattgagaatgagtatgggaacataaaaaacgatcatgcaacagatggtgacaagtacctcgagtgggca

SEQ ID NO: 92962 - DNA, 470 bp, Zea mays
  Clone ID: MRT4577_184771C.1
gtgtacaagtgaatgcctttattcattactgggtcatatattacaaatcaccaaatccgagcggaggcctctactaattaacagggcacgtatgcacgctgggattgatcaatcttgtaccgtaccctttctgccattcattacaatatgaaacaacgcacggacggatggatccatctgcacacagctcatagagatcatatgtacattgcaagaccacgttcactgcgatgggacggagcggaccaacggatggctaacacaaggatcctcccaacgagccgaacatggtggaatggcattggttggctaatgtaggcggcccaattgctgacaggccccttgccagggggggcagtctgaaccttgaatacgctgaatgccaccatggagatgcgcacgtgcttgatctccctcagttgtagccgatcctatttctccgattttaacgacgaggaccatcggatcaa

SEQ ID NO: 92963 - DNA, 367 bp, Zea mays
  Clone ID: MRT4577_184772C.1
cttttctaagcctggaggtactcaacgcgtgggggtgcatcgatgggcgagcggggtacaacaactgcgcaagggcggcactggacaccgtgttgaaggtgatcaaccgcaaagctcatgggccatgggaagccgacatgccactgtagatcgaggaggaggaggtagcgccttcccaggacagggactgacgacctacgatcctattgacctaggtctatcacaccgacgtctacctgtgggaggacaaggcgcaaactctcgtgtttgctcacatcttcggtcatgaagcaggacgtatcataaaaagtgtaggtgagggtcatactgacgtatgtccgcccgaccatacaccttcctgtgttca

SEQ ID NO: 92964 - DNA, 1427 bp, Zea mays
  Clone ID: MRT4577_184773C.1
gtttccagctgggagaaggccccgcctgcggaccgctgcgcaccacggaggaaggtgaacttctttctgccacccactacatgactatcgacatcttgttggtggtggacaagctctcctatcagcctcagtgtgtccttcgcgaggctctggaatctcgcctgacgaacaaggttgctcctgcccctccatgatccacctcaactcctcaagccccagcagaatttcagcttctggtggctgcctttgcccctctgtttcctgcctgtcgtcctctcgcaatcctgaattgtgtctcattgcaaaagccctctacttgcgtcgctgaaataaactagtttgtcaatacaatcctgggtgggtgtccgggggcttgagcgctccgcaaaaccgccgctcggctgctccaaacgccaccatgctccgcttggcagccggagggctgaccctttccggttcctccaccgcgcgacctcttcctcctctcgcccgttcttagcccaaccaccatcaccgtcatcattcataaacaaaaaggcaggcaggcagtcagtccctcggcaggcacgagcgcagacggtgcgaggcgtccgcgtcgcgtcctttcacctgtctccttcgctttgcgtgctcctggcttcaagaaaccgccgcacgccatccagcctgcggtgcgggggtcgcgcagcccgcctggctgccaccgttttttcctctcctttcgcttctccgctaccgctaccgctaccatcagcggcgcgggcctccgggtcgtccggccggattcgttccccgggccgtgcaaccacgcacgcgcttgggctccgctcgtcgccgaaagcttctgctctgctcagtttccagctgggaggaggcgccgcctgcggaccgctgcgcaccacggagggagatcgacatcttgttggtgggggactgaagctctcctctcagcctcagtgtgtctccttcgcgaggctctggaatctcgcctgacgaacaagggttgctcctgcccctccatgatccacctcaagcccccagcagaatttcagcttctggtggctgcctttgcccctctggttactgcctgtcgtcctttgccaaccgctttggctcattcccagcgcacgacccttgctttaggtagctggaaataaaacaaattaacaacttgtggcaaagataactaaaaagagccccagacgaaccaggcgagggtgaactcttatcgtctacctacaagagcaaacaacttcgtctcatctaggcccggctcgctatggggcaaatgtaccttacattacctggcaacaacagcttttgtgcaacaaacaggtcgcttgcaacaaaattggtaccagctttttactcaggttagctggtggcaaaacctgctggcttacttgcaacagcttactttcatttaa

SEQ ID NO: 92965 - DNA, 414 bp, Zea mays
  unsure (1)..(414): unsure at all n locations
  Clone ID: MRT4577_184774C.1
tgctaggccaagccaagccaagcaggaaggcccccggtattgctagctgtacgtgtctgtgtgtgcatctgaagcagggtgcaggcaggggccagtgacgtacgtgtctgtttttctatatgatattgagaccgtacctatatagagtgtgtgtgttagtactaatgaaaatgancaagaagaaaacgagagagcaggcatgaaccaagtagaagagcatgtntattatgagtgtgtagnngtggngatcggtacgtatagatgcctgttgttagcattgtgtgtnattacctaggagagtgtagggtatggatgtggttggagggcaaaagttgtatgtagataaacagtagtattagtatgaggtaaaaaaaaaaaaaaaaaaagggaggatggtgtagaggatgaaagctt

SEQ ID NO: 92966 - DNA, 628 bp, Zea mays
  Clone ID: MRT4577_184775C.1
cctcgaggccggccgggccgggaactcaaccgatcgtcgtcgtcgtcatcgtgccgtacgtacgtgctctagctaaccgtagcgtcggccggcggtcgcgtgggcagggcagcgggcaacggagggcggcaccggcatggacaggatcctggccatgtccctcgtcggtgcggggccaggcaacgtcttcggcccgggcatgagcgccggcgcgctggagagcttcgcacgccccgcggggcgcgccaggacggagcgcagcggcggcaggggtggcgcggcggcgcgcggcgcaaggtcggcgtcggcggagaagtgcggcgccgaccagatcaggacgggtgcggcggaggctgacggtgccggtggccaggagggacgcgccgccggtgcggacgcgacgcggtacggcccggcggcgttggaccgcgggttctgcttcgacgccgtcgtcgctccgtactgacatgcgcgccgccacgtggcgcaagttctcggcgagttcttgtttggacgcgatattaagaggacgacaataccgacgccaactacttctttctcattaatttctcaagcaggtcgggttctttttttttgtgaaaagaaatgaagagagtcctttttaaaa

SEQ ID NO: 92967 - DNA, 526 bp, Zea mays
  Clone ID: MRT4577_184776C.1
acaaaaccaatcaactttatacctaaccacgtctcaaccgattgcctttaatgataacaggctactgctgataacgggccccccttacgagctggatggaccataacgttgatcacacactactctccaggcaaggtgactggactacactaccatgcatgaacatgggctcccgcacaaactggactagcacactcccctggcggagcacaaactcatatacagtactatacatgttaggccaatgccacaccgtctgaactctggagctactcatgtgatggcttcttgaagaaccgcggccctcactcagagttgccatggacacacgatctggacaatcgttaatatgataagcattattctgatgccgccttcaacaagcacaatgttaactgctactgaagtcagaccctctatctgcacactgtggacagcctactgcaggtagtacatatcagccgtcatcgccccatggatttacatccataacgacggaggattcaccactttctttctttttaga

SEQ ID NO: 92968 - DNA, 4470 bp, Zea mays
  Clone ID: MRT4577_184777C.1
atgtcgatcgagcagatgtttctgatgcagactcaggcagttcaggccatcggtcagactttggccgccattcagcagcagcagcagcaacagcagcaagcaccaccccagcctcagatgcctcagatgcccagagacaagcgtgctgaattcatgagaggtcatccaccaacgttcgctcattcttctgaccctatggatgctgaagattggctgcgcactgtggagcgggagttgcataccgctcagtgcgatgacagggagaaagttctgtatggtccccgtctgttgagaggagcagcccagtcatggtgggagtcttacctcgccacccatgcccaccctgacgccatcacctgggaagaattcagaggtagctttcgtcagtaccatgttcctgcaggtctgatgacagtgaagaaggaggagttcctggctctcaagcaagggccattgtctgtcagtgagtaccgggacaagtttctgcagttgtctcgctatgctcctgaagatgtcaacactgacgccaaacgacagtaccgttttctgagaggcttggttgaccctttgcagtaccaactgatgaatcacaccttcccgacattccaacacctgattgacagagcaatcatgacagaaaggaagcgtaaggagatggaagatcgtaaacgcaagatcagtggaccccagcctggaagcagcaaccgtcctcgtttctcaagcaatcaaccccagcagttcaggcagaaccagcgtccacctcagcagcgtcagcagcatcagcagtttcaaaggcagtaccctcagaaccagtatcagaaccgtcagagcaaccagtcaggaggtcagtttcaaaggcagaatcagcaggtacctcgtcttcctgccccagcaaatcagcagaacaatcaggtagcaccagctcaggttggaaacagagcatgtttccactgtggagagcaaggccactgggtgatgcaatgtccgaagaaggcagcccagcagcagtcaggccccaatgccccagcgaagcagaatgtgcctcagcctggagcaggcaatcgctcccagccgcgctataatcatggaaggctgaaccacttggaggctgaagcagttcaggagacccccggcatgatagtaggtatgttcccagttgattcccatattgcagaagtgttatttgatactggagcaacacattctttcattactgcatcatgggtagaagcacataatcttccaactactaccatgtcaacccccattcaaattgactcagccggtggtagaattcgagccgatagcatttgtttgaatataagtgtgaaaataagggggatagcatttcccgccaaccttatagtaatgggtactcagggaatagatgtcatcctagggatgaattggctagataagtatcaggcagttatcagttgtgataaaaggacaatcaagttggtgtccccactaggaaaggaagtggtgaccgagttagtcccacctgagccgaagaaaggaagttgttatcagatggctgtcgatagcagtgaagcagatccaattgagagtatcaaggttgtgtctgaattcccagatgtgtttccaaaggatttaccgggtatgccaccagagcggaaagttgagtttgccatagagcttcttcctggaaccgcccccatctttaagagagcctacagaatatctggaccagagttggatgaacttaagaagcaaattgatgagctgtcagagaaaggttacatccggccaagcacctcgccttgggccgcccctgtcctatttgtggagaagaaagatggcaccaagaggatgtgtatcgattatcgggctttgaatgaggtcacgatcaagaacaagtatcccttgcccagaatagaagatctgttcgaccagttgagaggagccagtgtgttctccaagattgatctgaggtcaggttatcatcagctcagaatccgaccttcggatattccgaagacggcattcatttccaagtatggtttgtatgagttcacagtgatgtcttttggtttgaccaatgcgccagcattcttcatgaacttgatgaacagtgtattcatggattaccttgataagtttgtggtggtattcattgatgacattctgatttattctcaaagcgaagaagagcacgcagatcatttgaggatggtgttgcagagattgcgagagcaccagttgtatgcaaagttgagcaagtgtgagttctggatcagtgaagtcctgttcttgggtcacataatcaacaaagaaggattggctgtggatccgaagaaagtggcagacattttgaactggaaagcgccaacagatgctagaggaatcaagagcttcattggaatggccggatattatcggcgattcattgaagggttttcgaagattgcgaaaccaatgacagcgttgctaggcaacaaagttgagttcaagtggacccagaaatgccaagaggcctttgaagcgctgaaagagaagttgactacagcgcctgtcctagtcttgcctgatgtgcacaagcccttctcggtgtattgcgatgcttgttacacaggtttgggatgtgtgttgatgcaagagggaagagttgtggcttactcgtcccgacagttgaaggttcatgagaagaattacccaatccatgatctagagttggcagcagtggttcacgcactgaagacatggaggcactatttgtatgggcagaaatgcgatgtttacacagatcacaagagtctgaagtacatattcactcagtcagagttgaacatgaggcaacaaagatggttagagttgatcaaagactatgagttggagattcattaccatccaggcaaagcaaacgtagtggcagacgctttgagcagaaagagtcaagtcaatctgatggtcgctcgtccgatgccttatgagttggccaaagagtttgacaggttgagtctcggatttctgaacaattcgcgaggagtcacagttgagttggaacctaccttggagcgcgaaatcaaagaagcgcagaagaatgatgagaaaatcagtgagatccggcgactgattctagatggcaaaggcaaagattttcgagaagatgcagaaggcgtgatatggttcaaagaccgcttgtgtgttcccaatgtccagtccattcgggagttgattctcaaggaagctcatgagacagcctattcgattcaccctggcagtgagaagatgtatcaggatctgaagaagaaattctggtggtacggaatgaagagggaaatcgcagagcatgtggctatgtgcgatagttgccgaagaattaaggcagaacaccagagacctgctggattgttgcaaccgttgcagatccctcagtggaaatgggatgaaattggtatggatttcatagtcggattgcctcgcactcgagccggctacgattccatctgggtagtagtggaccgtttgaccaagtcagcccacttcatacctgtcaagaccagctacaacagtgcagtattggcagagttgtatatgtctcgaatcgtttgtcttcatggtgtgccaaagaagatagtgtcagacagaggaacacagttcacctctcatttctggcagcagttgcatgaagccttgggcacacatctgaatttcagttcagcttatcatccgcagacagatggccagaccgaaagaaccaaccaaattcttgaagatatgttgagagcatgtgcgttgcaagatcagtccggatgggataagagattgccttatgcagagttttcctataacaacagttaccaggccagtttgaagatgtcaccatttcaggcgctctatggaaggagttgtagaactccgttgcaatgggatcagcctggagaaaagcaagtgtttgggccagacattttgcttgaagccgaagagaacatcaagatggttcgagagaatctgaagatagcgcaatcgaggcagcgaagctatgcagacacaagaagaagagagctgagtttcgaagtcggagactttgtctatctgaaagtgtcaccgatcagaggagtcagaagattcggagtgaaaggcaagctagcaccccgttacattggtccgtatcagattcttgcaagacgtggagaagtggcctatcagctcagtttgcccgagaatttgtctgctgtgcataatgtctttcatgtgtctcagttgaagaagtgcttgcgtgtgccggaagagcagttgccagtggaaggtctggaagtccaggaggacttgacctatgttgagaagccagctcagatccttgcgattgcagacagagtcacccgaaggaagaccatcagaatgtgcaaagtcagatggagtcaccactctgaggaagaagcaacctgggagcgtgaagatgatctagtggccaagtacccagagctctttgctagccagccctga

SEQ ID NO: 92969 - DNA, 1387 bp, Zea mays
  Clone ID: MRT4577_184778C.1
gtcagtaccatgttcatgcaggtctgatgacagtgaagaagaaggagttcctagctctcaagcaagggccattgtctgtcagtgagtatcgagacaggtttctgcaattgtctcgctatgctcctgaagatgtcaacactgacgccaagcggcagtaccgtttcctgagaggcttggttgaccctctttagtatcagctgatgaatcacaccttcccgacattccagcacctgattgacagagcaatcatgacagaaaggaagcgtaaggagatggaggatcgtaagcgcaagatcagtggaccccagcctggaagcagcagccgtcctcgtttttcaagcaatcaaccccagcagttcaggcagaaccagcgtccacctcagcagcatcagcagcgtcagcagtatcagcagtttcaaaggcagtatcctcagcatcagtaccagaatcgtcagagcaatcagtcaggaggaggtcagtttcagaagcagaatcagcaagcaccccatcttcctgccccagcaaatcagcagaacagtcaggcagcaccagctcaggttggaaacagagcatgtttccactgtggagagcaaggccactgggtgatgcaatgtccgaagaaggcagcccagcatcagtcaggccccaatgccccagcaaagcagaatgtgtctcatggcgacgacagctcgagccacgacaccgacttctctgctaaccctgagccggaaggatgggttgctcgacccatcactcgcgacgctgctacaggggaccgggaaagggggataccccgaaagggatccttctccgcgaaggaaccgggctccgagccccccattactgatcaggggttcgaaggctggccctccgaagggttcaacagtcgcctcagatcgcgtgggcccgacacccactactggtcaggggttcgaaggccagccccccgaagggctccatggccgcctcaggctactcgggctccgcgcccattactgatcaggggttcgaaggctggcccccgaagggttcacagtcgcctcagacaccgagcgagggatgaccaggggtacgttagataaataaccaaggctcgggctgcgctcccaaggtaccttaggacatttcccagaccaacgggaccgatcttgtaacagaataccatcggaggaaggcatcgagccctcggacccagtcgctaggggactgggtccggcaaatcaatcgcaggtacttttgggcgtgccgctgggcccctatccgacccccaacgaacggggcagggacgtccactcggattaaccgcttgcagctcaccggagacaccagttcggtgcccacaagggtaacatggcgcactcccccctcctgcctggggaaagacgac

SEQ ID NO: 92970 - DNA, 111 bp, Zea mays
  Clone ID: MRT4577_184779C.1
cgtcaatatgagttaagtttcaggagccggtagaaggttgccaccagagtgattgcgaacctttgacggtacaccctttcttcagacaacccgggccctgggccttgcggg

SEQ ID NO: 92971 - DNA, 354 bp, Zea mays
  Clone ID: MRT4577_18477C.1
aacaggggggggaccaactttggtggttgagcattatcaaaccatttcacagcgttcacgggttcccacctatttgcttaaaggttaaccccaaagtttaggggctgggatttatctattcatcttattgggcggcgaagggaggaacaaattgggtttacgcaatcggaaacccaacttccggttctgtagctattgggtgagggctactcaacttgcgaaaaaccttgtgcagtctcagatttttttttgcgatccgaaggagggggcatgacttcatttacaagggggtgcaactacatcccctttgttctgagtgggttcaccacctggggcaaagtgataaatcttaag

SEQ ID NO: 92972 - DNA, 5568 bp, Zea mays
  Clone ID: MRT4577_184780C.1
atggctcgacttagacacactgcacgaaagtcagtcatccccttcttaccctcccgtcttgctgagcgtccgcttcgccgtcccgtggccggacagtccagccacttggagagactacaccaccgcctgcgtgaggagcaggaacgtcgacgacaggagcagcggagctcttccctctcgctccaccaggagatagagtctgtgaggagctgctctcctgtgcttcctctggagccgccccctgcaccaccactgggcgccccagcttctggagtagctgctggaggagacccagacaacggaggaggcgacgacagctcgagccacgacaccgacttctctgctaatcctgagccggaaggatgggttgctcgacccatcactcgcgacgctgctcgcgggtgtcacttccatgatgcgctcgacaccctgctacgtcgggcatttgaccggcatacttggtccgtcgagtatcgctgtgtggtctaccagcacagtcgcggggtctacccggaccgctgggaggcaacttgcttggtgcgctgcccggagaacagtctccagggtgcagaggcctgttcagagcactattctatctctgagcgggactcagctgaggcagccatgcaagatgctgcacggcgtgcgctttcgcactactgctcggttttcggtggggcagctgacggtcttgacctgaagtattacccccgccgttcatctggcagcacaggaggcgtgattgtctcacctgtcggtgagggcaatcctaggttgagcagcacagtcaacctagccgccgtgctaaacacggagctggaccatgcattagacgagctgagtagggctcgtgctgagatcgccctgctgcgggctgagcgcgcggaacgtcgttacctggacggtggttcccccgctcccgttgggactcagcacccagtgtgggtatcccctgcattttggtttacatactatgtcaataaaatgtcagagaacaggcgtagaggaggaaggcgtgctcagcaggagcgagccgctccgcaggatgaggtgccccagcagcagcacctgccgcccccgcccccgatgtcgattgagcagatgtttctgatgcagactcaggcagttcaagccatcggtcagactctggccgccattcagcagcagcagcagcagcaacagcagcaagcaccaccccagcctcagatgcctcagatgcctagagacaagcgtgctgaattcatgagaggtcatccaccaacgttcgctcattcttctgaccccatggatgctgaagattggctgcgcactgtggagcgggagttgcataccgctcagtgcgatgacagggagaaagttctgtatggtccccgtctgttgagaggagcagcccagtcatggtgggagtcttacctcgccacccatgccaaccccgacaccatcacctgggaagaattcaggggtagctttcgtcagtaccatgtgcctgcaggtctgatgacagtgaagaaggaggagttcctggcccttaagcaagggtcatcgtctgtcagtgagtatcgagacaggtttctgcaattgtctcgctatgctcctgaagatgtcaacaccgacgccaagcgacagtaccgtttcctgagaggcttggttgaccctctgcagtatcagctgatgaatcacaccttcccgacattccagcacctgattgacagagcaatcatgacagaaaggaagcgcaaggagatggaagatcgtaagcgcaagatcagtggaccgcagtctggaagcagcagtcgccctcgcttttcaggcaatcaacctcagcagttcaggcagaaccagcgtccacctcagcagcatcagcagcgtcagcagtatcagcagttccaaaggcagtaccctcagaatcagtaccagaaccgtcagagcaatcagtcaggaggtcagtttcagaagcagaatcagcaagcacctcgtcttcctgccccagcaaatcagcagaacagtcaggcagcaccagctcaggttggaaacagggcatgtttccactgtggagagcaaggccattgggtgatgcaatgtccgaagaaggcagcccagcagcagtcaggccccaatgccccagcaaagcagaatgtgtctcagcctggagcaggcaatcgctctcagcagcgctataatcatggaagattgaatcacttggaagctgaagcagttcaggagacccccgacatgacagtaggtatgttcccagtcgattcccatattgcagaagtgttatttgatactggagcaacacattctttcattactgcatcatgggtagaagcacataatcttccaactactaccatgtcaacccccattcaaattgactcagccggtggtagaattcgagccgatagcatttgtttgaatataagtgtgaaaataagggggatagcgtttcccgccaaccttatagtaatgggtactcagggaatagatgtcatcctagggatgaattggctagataagtatcaggcagttatcagttgtgataaaaggacaatcaagttggtgtccccactaggagaggaagtggtgaccgagttagtcccgcctgagccaaagaaaggaagttgttatcagatgactgtcgatagcagtgaagcagacccaattgagagtatcaaggttgtgtctgaattcccagatgtgtttccaaaggatttaccgggtatgccaccagagcggaaagttgagtttgctatagagcttcttcctggaaccgcccccatctctaagagagcttacagaatatctggaccagagttggttgagcttaagaagcagattgatgagctgtcagagaaaggttacatccggccaagcacctcgccttgggccgcccctgtcttgtttgtggagaagaaagatggcaccaagaggatgtgcatcgattatcgagctttgaatgaagtcacgatcaagaacaagtatcctttgcccagaatagaagatctgttcgaccagttgagaggagccagtgtgttctccaagatcgatctgaggtcaggttatcatcagctcaggatccgaccttcggacattccgaagacggcattcattaccaagtatggtttatatgagttcacagtgatgtcttttggtttgaccaatgcgccagcattctttatgaacttgatgaacagtgtattcatggattatcttgataagttcgtggtggtattcattgatgacattctggtttattctcaaagtgaagaagagcatgcagatcatttgaggatggtattgcagagattgcgagagcaccagttgtatgcaaagttgagcaagtgtgagttctggatcagtgaagtcctgttcttgggtcacataatcaacaaagaaggattggctgtggatccgaagaaagtggcagacattctaaactggaaagcgccaacggatgctagaggaatcaagagcttcattggaatggccggatattatcggcgattcattgaagggttttcgaagattgcgaagccaatgacagcgttgctaggcaacaaggttgagttcaagtggacccagaaatgccaagaggcctttgaagcgctgaaagagaagttgacaacagcgcctgtcctagtcttgcctgatgtgcacaagcccttctcggtgtattgcgatgcttgttacacaggtttgggatgtgtgttgatgcaagagggaagagttgtggcttactcgtcccgacagctgaaggttcatgagaagaattacccaatccatgatctagagttggcagcagtggttcacgcactgaagacatggaggcactatctgtatggacagaaatgcgatgtttacacagaccacaagagtctgaagtacatattcactcagtcagaattgaacatgaggcaacgaagatggttagaattgatcaaagactatgagttggagattcattaccatccaggcaaagcaaacgtagtggcagatgctttgagcagaaagagtcaagtcaatctgatggtcgctcgtccgatgccttatgagttggccaaggagtttgacaggttgagtctcgggtttctgaacaattcgcgaggagtcacagttgaattggaacctaccttggagcgcgaaatcaaagaagcgcagaaaaatgatgagaagatcagtgagattcggcgattgattctagatggcagaggcaaagactttcgagaagatgcagaaggtgtggtatggttcaaagaccgcttgtgtgttcccaatgtccagtctattcgggagttgattcttaaggaagctcatgagacagcttattcgattcaccctggcagtgagaagatgtatcaggatctgaagaagaaattctggtggtacggaatgaaaagagaaatcgcagagcatgtggctatgtgcgatagttgtcgaagaattaaggcagaacaccagagaccagctggattgttgcaaccgttgcagatccctcagtggaaatgggatgaaattggtatggatttcatagtcggattgcctcgcactcgagccggctacgattccatttgggtagtagtggaccgcttgaccaagtcagcccacttcatacctgtcaagaccaactacaacagtgcagtattggcagaattgtatatgtctcggatcgtttgtcttcatggtgtgccaaagaagatagtgtcagacagaggaacgcagttcacctctcatttctggcagcagttgcatgaagccttgggcacgcatctgaatttcagttcagcttatcacccgcagacagatggtcagaccgaaagaaccaatcaaattcttgaagatatgttgagagcctgtgcgttgcaagatcagtccggatgggacaagcgattgccttatgcagagttttcctataacaacagttaccaggccagtttgaagatgtcaccgtttcaagcgctgtatggaaggagttgcagaactccgttgcaatgggatcagcctggagagaagcaggtgtttgggccagacattttgctcgaagccgaagagaacatcaagatggtccgagagaatctgaagatagcgcaatcaaggcagcgaagctatgcagacacaagaagaagagagctgagtttcgaagtcggagactttgtttatctgaaagtgtcaccgatcagaggagtcagaagattcggagtgaaaggcaagctagcaccccgctacattggtccgtatcagattcttgcaagacgtggagaagtggcttatcagctcagcctgccagagaatttgtctgctgtgcatgatgtctttcatgtgtctcaattgaagaagtgtttgcgtgtgccagaagagcagttgccagtggaaggtcttgaggtccaggaggacttgacctatgttgagaagccagctcagatccttgagattgcagatagagtcacccgaaggaagaccgtcagaatgtgcaaagtcagatggagtcaccactctgaggaagaagcaacctgggagcgtgaagatgatctgatggccaagtacccggagctctttgctagccagccctga

SEQ ID NO: 92973 - DNA, 514 bp, Zea mays
  Clone ID: MRT4577_184781C.1
cggccgaagcgagggcgttgaggatctgctgataacaagctccggattacactgtttctaccaaaggcaggtactgtggggtgtggggataacactgtaaccaataacctgtacaccatttctgagaagggaataaaaggtcgtcttaacaggcttcccttcttcctgtgatggtgacatggctatggccaccgcgaagaatggatagcctgaccttagaaagaaggcgatgccacgctgctattgtgaggcaccgcaagccacggcgccgaaaggatggtgtcacatgtactttgaagacaatgctggagtgattgcgaacccaaacggagagaagaaatgttctgccatcactggaccgattggaaaggaatgcacggatctctggcccatgattgctagcgcggtaaatgctattgactaaaggcaccagcttgtcaaagcttcacttcaaatggggacttgacaagggagcttctaacttatgcgagcttccaaattgccccccatatgt

SEQ ID NO: 92974 - DNA, 421 bp, Zea mays
  Clone ID: MRT4577_184782C.1
cttttctgccgccctcgcctgggccgccacgcaactcctccgcgggagcctccctcctgcccgcttcgccgctgccgtctcgcctctcacatacagcagcagccgccaactctgcagtacccccatcgccaacgattcctccgccgcaggaccgtgggacgaggccgagacggagatcctccgcgacgtcgagcccatcgtgaatatcgtcaaggacatcatccactcccgcaggttgacaggcaccctgagttcaagtcaagatgtctctttgtcgttagaacaaatggcgattgggaggatttctcataccacaagtgtctccgggcataccttcaaaagaagtatccatcctattcagacaagtttctgaagaagcatcttgttaacaagagctccaatctttttcgtgttcagaaga

SEQ ID NO: 92975 - DNA, 516 bp, Zea mays
  Clone ID: MRT4577_184783C.1
cccacgcgtccgttttttttttttttttttggcgaactgtgagctatagtttactataacgaatgtagtaatgaacagatctctgcgaactctcttacatgctttctatttcttctctccccccaccccaattcatcacccccctgtaaataagaacaattcccaactctacagtttcgtctattccacacacacacgcacgcacaaccacactaaaaaaaagaagaagaagaagcatagggcaagtaaataataaaccaacacaccatttctacgagaggtctgtactctgtagtctgtaccaccatgccggtgaggtcgccgtcctgcaaggcagctcggaacgcaactggccgtcagcccgcgcggatccgcttcttgggcggcagggcgcggaacacggcggcgaggtcgcgggcgacggggaagaaggcgcggcgcgccgacgccgacgccgatgccgacggcgcagcggaagacgggagcctgcgcttggcgggcgttggtagcaccgcc

SEQ ID NO: 92976 - DNA, 1537 bp, Zea mays
  Clone ID: MRT4577_184784C.1
ctggagtatccaaatggcaccacccaacatagagaatcaatttgtactgtagcatgcctccactcgaagccgccataccagtctgcctctaaatcatttcactatcgcagattaccactgtatcgagttcatgatttgggagaagggatagaaggaaaaggaaaaccaaataggggaggaagagatgctcaggcatccatcttttggtgtcacagacctagttaattatgttcttggtagcactgatcttttagtaagatggacttgatttgtcttgttgggaaattggttcgtattttctttatctcgaccccggcccggccgggtttatgtcggtttaagtaggtttgtcccgtcgtttcattccggccggccgccgccacaccaaagcaaccatggccttttctgccgccctcgcctgggccgccacgcaactcctccgcgggagcctccctcctgcccgcttcgccgctgccgtctcgcctctcacatacagcagcagccgccaactctgcagtacccccatcgccaacgattcctccgccgcaggaccgtgggacgaggccgagacggagatcctccgcgacgtcgagcccatcgtgaatatcgtcaaggacatcatccactcccgcagaccagtgcttctaccatggtagggtcaaggcgagtacgaaatggatcaagtacacggccaccagcactaaaagcagattccgttgacacttgcatagctaagacatcacgagcaagctagcccaagagaggatattcttctttgtgtgctttccaccatgctaatatgtcaaaagtgtgttgattacttttaccaacctttagtattggatctgccaaatattttctaagtcacttgtgtcaatagaatcatcatgaccttgtccatcaaatatgtagctatcaagctcttctttgatacttgacttaatcatgtcaactgctgaagttgaggaaggtgcaacagatgatgctgagggtgtagtagagacatagtattgatacatctttttcatgagaacaacgtaacatcagtcactagtagaaatgttagtattcctaaatctcatagctccaactccagctcgcaatccatggcgtagactaacgcaagagagctagcaacactcctagcaatcaagaaaggctggggcagcccatctgcgctcagctcatggagctcccagaaggccagaacgcttcctactggctactgcagctagacaggggtcaggtgcgtgaacaacatcagtctatagctgctcggttccccacagcgctcaccggccaggccagttccgcacagcgctctacaactgctcgtctgctcggtcgtgcgagctcccctgcaagcagcttccccgcgagcagcttacccgcgagcacaacatccctctcccagaccccagccaccatctcgcagattagtagattacatattacttaccgggtgggtgccggcgtgccgccgccgccagattgggagcgctgagaagagaagtggcggcgccgcgcgcgacgaaca

SEQ ID NO: 92977 - DNA, 446 bp, Zea mays
  Clone ID: MRT4577_184785C.1
aaacaaaataagcccaattcccctttataataacccgaaaatttttttggggaccccttttaaaaattcccactctttaaaaataaagtttaaaaaactttttcaaccaggggggccccattttttaaccaccagactagtttttccccgccaaatttttggccccccaacaaaaaatcctgggggacaaaatttgaaattcccggaagggaaactgtcaacaattaaaaggggggtgaaatttcccaaccgaagctagttttgggggtttgggacccattgggggaaaaaaaaaaaaggggtaaaaccccttttttctaggggggattttttcctcaccaccttaatatgggttttttcgcccttgtttaccacccaaagttgccctccgctgtttttttttttctaaattggggtttattttttttaaaaaactcttttttttt

SEQ ID NO: 92978 - DNA, 211 bp, Zea mays
  Clone ID: MRT4577_184786C.1
gaggaagagcaaatccacgggcactcatataaagcacttcctgttgtattttaaccaacccttgagcattagatatatggcttaatacacacggtgtagaatacaggcaggcttaagaacatgcccgaagccggccgcttagaagaagttgggtgtcgtattctttgtctgaggtggcgaggatttattttgtctatctttctgctctttt

SEQ ID NO: 92979 - DNA, 243 bp, Zea mays
  Clone ID: MRT4577_184787C.1
cagacacatccgactgcccgggccaaaccaaatcaacggcagcactgacgttgttcacgctgatcctcttcatcttgtaaagggtgctcacaagctcatcctgagcactgctaacgccggtggccgtgtcgctagcggcgatcatcttactccatggctgagaacccacgcctgactaggtggtgcctaacaggaacgtttcctgcctatctcacgagacgagcataaacattcggagacatg

SEQ ID NO: 92980 - DNA, 274 bp, Zea mays
  Clone ID: MRT4577_184788C.1
gtttttcttttggatgacaacattgacatagggagcacgggctatttggaaacataccattcagagcaaaagttatctacactggcatttctctcttcatttagctggtgtgcagccaggttccactttatggtactctttacacaactgtagctgagccttccttcctagattgcgtgttatcccttgcttaaacctggggcactgtgatggagattggtattaccccaaatgggacctctggtatggcaaatgcaacttcttgtcggatcga

SEQ ID NO: 92981 - DNA, 460 bp, Zea mays
  Clone ID: MRT4577_184789C.1
gggggtattccccccgggggttaaaaccctttttaaaatttcaaacccccacccaatttttccaaagggggcctcccccccccccggaaaaatgccaaaaccacattttcccccattgaccccgggccccaaatttttccccccggaaaacccgttttttttcccttttcccgaaggggggccaagggttttcccccctttcattttccccccaaaaggaaggggggcccccttttaaacccccctttaggggccctaaaaaaaaaaatttttggggggaaacccccccccagggggtccacggggccattttaccaagaaccccccggcaaaggggtttccatattggggggttcccccccctggaaacctggcccccccttcccaaaaagggggcccaaataaaaaatccttccttggccggaaaaaaacccccccctcccctgttggggggggaaaa

SEQ ID NO: 92982 - DNA, 200 bp, Zea mays
  Clone ID: MRT4577_18478C.1
attcccgtcgcgagccactcttacgattaacctcaatatcaaccgtttttctactttcccaagcacacctacttccgggaccgggatatatccagcacggcgatgcctacaatcaactaattatgcctcattcgcttttaaaacaagtatcatattccctttaagcccaatattactccatttgctcgttcactaactta

SEQ ID NO: 92983 - DNA, 804 bp, Zea mays
  Clone ID: MRT4577_184790C.1
gggaacacgacttcttcagtgctagctctatctatctatctattggtctagtgcgctttgtaccctacttgcgtgcctgctctaacagagagcggatcagcggagacacgacgacgacgacgaagccaggctcaggctctgcaatggagcaggagccgcaccggcccatggagctgcccccgggcttccgcttccacccgaccgacgaggagctcatcacgcactacctggcccgcaaggccgccgacgcccgcttcgccgcgctcgccgtcgccgaggccgacctcaacaagtgcgagccctgggacctgccatcgctggcgaggatgggggagaaggagtggtacttcttctgcctcaaggaccgcaagtacccgacggggctgaggaccaaccgggccacggaggccgggtactggaaggccacgggcaaggacagggacgtcttcaggggcaaggcgctcgtcggctccaagaagacgctcgtcttctacacggggagggcgcctaggggcgagaagtccggatgggtcatgcacgagtaccgcctccacgccaagctccatggccacggccacggccaaggcgcagccgtcgtcgtcgtccccaagcaggccgccgggtccaagaacgagtgggtgctgtgcagggtgttcaagaagagcctcgccgtaggcggtgcagctgcagcaccggccgcaggcaagaggggcggcacggagacgtcgtccaactccaagacgggcgacgtagcggccatcgcccacctccctccgctgatggacgtgtccggctccggcgctg

SEQ ID NO: 92984 - DNA, 1681 bp, Zea mays
  unsure (1)..(1681): unsure at all n locations
  Clone ID: MRT4577_184791C.1
caccctcgcattggtttctcttgatcgctttgtcacttgaatccgtgcctgctctaacagagagcggagacgaccacgacgacggcgaggccaggctctgcgatggagcaggagccgcaccggcccatggagctgcccccgggcttccgcttccacccgaccgacgaggagctcatcacgcactacctggcccgcaaggccgccgacgcccgcttcgccgcgcttgccgtcgccgaggccgacctcaacaagtgcgagccctgggacctgccatgtaagcaacgcacgcgccggcatagctactagatcatgtttctgcacggatcgagtcatgcatggcttcataaaggaagaagaagaagggagttatgatatgtgatttggttgcgccagcgctggcgaggatgggggagaaggagtggtacttcttctgcctcaaggaccgcaagtacccgacggggctgaggaccaaccgggccacggaggccgggtactggaaggccacgggcaaggacagggacgtcttcaggggcaaggcgctcgtcggctccaagaagacgctcgtcttctacacggggagggcgcccaggggcgagaagtccggatgggtcatgcacgagtaccgcctccacgccaagctccacggccacggccacggccaaggcgcagccgtcgtcgtcgtccccaaggccgccgggtccaagaacgagtgggtgctgtgcagggtgttcaagaagagcctcgtcgtaggtggtgcagctgcagcagcagcaccaaccgcaggcaagaggggcggcacggagacgtcgtccaactccaagacgggcgacgtagcggccatcgcccacctccctccgctgatggacgtgtccggctccggctccggcgccggcccgccgcggcggcggcacacgtgacctgcttctccgacgcgctggagggccagttcttggaccagacgacgaccacgccgccgccagaagccgccaccgccgccacggacgacgacggccacctcggcgccctcgtcgccgcctcctcctcgcccttccagctgcccggcttcgcgcactactactacggcggcgggccgccgcacctgcaccagcaccacggcgccgccagcctggtgcagctcctggagggcagcgtgccgccgtgcaataagggcggcgagcgcgagcgggagcggctgagcgcgtcgcaggacacggggctcacctccgacgtcaaccccgagatctcctcctcctccggccaacgcttcgaccacgaccacgaccatgaccaccacctctgctgctggggctactgatcgtcgattcgatgagcctacgacgactaccgagcgcgcatcatgcacatgcgtcgcgttattactagcgattagtgtatagcacactgctgtaaataaaacacctactactagtactacatctgcgtgaggtcgacgatcggccgtgtggtgcctggtggtgcgtggcatgcatgcgtcgagctgcctacgttccattatttgctcgtgtgatttgttactgtagacgagtgtgggggtgtgtaattagcattgttgatgtattattattcacgatttggtggaatgaaaatctccttggttaatgaaaacgccaaaaaaaaaaaaaaaaagcggccctcgagctgccagnttgttgttctcctt

SEQ ID NO: 92985 - DNA, 798 bp, Zea mays
  Clone ID: MRT4577_184792C.1
ttgggtacctcgaggccggccgggatctgtctatctatctactggtctagtgtattgattactctacttgtcggctgtggcgcacagagagcggagacgaccacgacgacggcgaggccaggctctgcgatggagcaggagccgcaccggcccatggagctgcccccgggcttccgcttccacccgaccgacgaggagctcatcacgcactacctggcccgcaaggccgccgacgcccgcttcgccgcgcttgccgtcgccgaggccgacctcaacaagtgcgagccctgggacctgccatcgctggcgaggatgggggagaaggagtggtacttcttctgcctcaaggaccgcaagtacccgacggggctgaggaccaaccgggccacggaggccgggtactggaaggccacgggcaaggacagggacgtcttcaggggcaaggcgctcgtcggttccaagaagacgctcgtcttctacacggggagggcgcccaggggcgagaagtccggatgggtcatgcacgagtaccgcctccacgccaagctccacggccacggccacggccacggccaaggcgcagccgtcgtcgtcgtccccaaggccgccgggtccaagaacgagtgggtgctgtgcagggtgttcaagaagagcctggtcgtaggtggtgcagctgcagcagcagcaccaaccgcaggcaagaggggcggcacggagacgtcgtccaactacaagacgggcgacgtagcggccatcgcccacctccctccgctgatggacgtgtccggctccggcgct

SEQ ID NO: 92986 - DNA, 309 bp, Zea mays
  Clone ID: MRT4577_184793C.1
agaccgatgactgtcacactagatgattacatgaatcttgtcacatctaaactgaactgaattgatgacgacatggcccgaatggtcgcttctggaatcattggtaactggcacaacatttttgaataagctgattcacagaattccatgctgacactatttaagtcaagcgtatcggcaaacctacagcgcagaatcacaccgcgtagaatggaatgacgacgaatagggactaacgaatagaattgtctaagcacgtatgcttaaaaggatacaactgaatggatctgagcgcttcaattgattgat

SEQ ID NO: 92987 - DNA, 196 bp, Zea mays
  Clone ID: MRT4577_184794C.1
cccacgcgtccgaaaaaaaaaaatatatagaaaatacatagaaaagataacggaacggaaaaaaacaagacatgataacaagctaacctatactacaaataaaacatcatacgatatcatctataatatcttacgcatgttaaaactgagctattcaatcatatacgcttcagcaagcaatctcagcacgcaacat

SEQ ID NO: 92988 - DNA, 441 bp, Zea mays
  unsure (1)..(441): unsure at all n locations
  Clone ID: MRT4577_184795C.1
tattcagatagcggcggcgccgctgtagacttctccttttctatcccttcacaaagcgtcggcgtcgncccatcgataatggnttccgaagaaggataaggtcctgcncncgttgtttatattctgtttagtttttttgtttttttttttttattatttttatttgtcttcanggctacacccaaccccancangtcaccaactgtttctgctcttccccctcctcctccctcccccctccccctccccctccttcccctccctccccctcctccttcccctccccccccctcccccccctcccccccacccccccccncgccctcccccccccccctgccccccctcacgccccctccccccccctctctctcttctttttctctttcctccctccccgctcttttctttttcccctccccccccccccctccccccccc

SEQ ID NO: 92989 - DNA, 706 bp, Zea mays
  Clone ID: MRT4577_184796C.1
tgaatgagctcaagctcaaggtatactcaacaacggtcatcatcgccatgctctccatcctcgccatcgcattcctcggccttgtctcggcatcatgccgaatgatatatgctcggcacacttatcgtccccgacgcctgcaccaagttctgcagccgcaagcccaactactacaccgacgccatcaccatcccgtgtgacagcaccagcaccggcgtcatgagctgatctggatccatcccagaagcgatggacccctgagttccctatcctaatttccttatgtgtaggcattatgatgttcgttcaacagggctttactcttgcttacggacaattacctgtgacttaccaataaggaaacaatgacagaatcctcatatgcttgtgctatccctctactacaacagagattggaactcgcaaaatcacaggtccctacaaatgactatcctgtaggccctccctttatctgaacgagagcatatgtaaccatgccgaaatgtgcgacgtggatgcatggattaaagtcttatatgaataaatgcatgtgaggcctctggactgggcggaggttgactaattccatgcatgcatctgactaagttgcagtgtgtgtgaatgctgttgctgcatgtactgcgttctccaaatatatatcaatatacttattatacatacttacaaacttacaaaaaaggcccct

SEQ ID NO: 92990 - DNA, 1193 bp, Zea mays
  Clone ID: MRT4577_184797C.1
attatcaacttatttttatttgcgttactgtaccaacaataacaaattataaatgtaccttcggctcgaaggaaagcaggggtacaggcgtgacgcgaaagcaaatgccaagtcagcgtgaacagtacaggagcactgttcatctatttataggtatgggacgtagcccatgtaaaattacacccataccctttacatttgctaataactctatagcaatccatcggggtctaaatagccttttcccttttaagtcggtttctttttctgctatcacgccgaagctcccctgcgcatagcttcggctctgcgccatccttcatattctttgtgcatcttcacgttgtggttttgatctaagtccgaaggtacctgtttacacattatactctagagacattgttaaatcatgtttttgaggaccttcggaagccgaaggcccccaacacatactccgagcaaatttaaatttttcattctctaattcatgctcggcaattttagcatctaattttgctatatgatcattttgttgtttaatcatagcaatgtgatcatgaatagcatcaatattaacatctctacatctagtgcaaatagtaacatgctcaacggtagatgtagatggtttgcaggtatttaattcaacaatcttagcatgtaaaatagtgttttcatttctaagattggaaatagaaacattgcaaacatttaaatttttagccttatcaattaattttttattctcaattttaaggctagagagagatgcaatcaatttgtcaatcttagtaatcaaactagcattatcatgtctaagactaacaattaaatcatcacaaacatctaacctgtcaaccttagcaattaatttggcattttcatttctaaggtttgagataacatcatggcaagtgcttagctcactagtcaattttcacacttttctacttcctgagcataagcatttttaaccttaacatgcttcttattttctttaattaggaagtcctcttggctatccaagagttcatccttctcatgaatagctcctattaattcatttaatttttctttttgttacatgtttaggttggcaaatagggcaagtaagttatcctcatcatcactagagttatcctcatcactagatgttgcatatttagtggaggctctagagtcacctgcaggcc

SEQ ID NO: 92991 - DNA, 799 bp, Zea mays
  Clone ID: MRT4577_184798C.1
cccacgcgtccgcttagtcagattcaagttattaaagaggcagttgagcttcccttgactttccctgagctatattaatacattggtattaggccttccaagggagtcatattataaggagaacctggaacaggaaaacctcttcttgccaagaacaaattttgagggtgagcatgatacagtcactgagaaggacctagaacatctcctgcaacttttagataataaggaaagcggggatacagcttggcagaatttgatggagcgtagaacctccaacatgacatacaatgcctggcggcgtgagcctgaggttcgtctttccaattggttgtggaaaaataggatattataaaaagtacttcactactaccatgattctgaggtggcgtataacatattagtgtctgaaatctgaacgcaaagaataattctgcgtgttaaattaaaatgacgaagggctatgattttaatttttggaagtttcttttcggcacatattgtcatttcattggccagtggcattactaacaccacgagtccctttaagtttctgttagtgtactctttgttagattctagcattttctttattgaaagtgttatcctaaacggtaaacagaaacagtcagccatttaccgtttagccattatttggcgtaaatggccatataaagttaggtggtttgagtagtacttatccggtcctgagttcaattcaccatggaagcgaattttcacgctgggggttaaggaaaccctcccgtatatccacgccgaagcacaggtgtaactgtct

SEQ ID NO: 92992 - DNA, 359 bp, Zea mays
  Clone ID: MRT4577_184799C.1
gctagacgatccggcggggaccgccgaagaagctatactacaattctttgccgattcaggtggacgttcttgatgaggcagcagtcaccccagtactgtaatgatcattcatgcgcatgcactatcctttagtctctgggaatccgatctacctgatttttaggcttacccaaattggtttgccggaaggcccagccgttccagattgcttgcccattcttgcgccttagccaggaggagttcccacaaccataattgggctcctctgtgcacggacgtgcataaggaagttttcagatctccgagactccttttttgaaaaccatgcattgcctacccatgtaggatggaatgggatg

SEQ ID NO: 92993 - DNA, 267 bp, Zea mays
  Clone ID: MRT4577_18479C.1
ggcccgacccactcgtccgcctacgcgtcctcgctcgcgcgcttcatttccaaccctaccacgcgcgcctcgaggggcgcgccttacgacactacgcgggcgccccaaacgcccgcgtagccgacctccgggccgacagcatccgcacgcagacggccgccctaggactacaccacccgctgcggctacgaaacagcaaccgaggcttagttctcccgatcgcgtaccgcgcggtctacagcgacgacagctaccgtggacaccagc

SEQ ID NO: 92994 - DNA, 239 bp, Zea mays
  unsure (1)..(239): unsure at all n locations
  Clone ID: MRT4577_1847C.1
agggccgaccggngcgcgcgagaacagcgcgaggccgcatgccccgattttttttcccgcggcgatcgggccgctaatacgcgagctttttaagatcctcgccgacacccccagcgaaaaccccgccatgatcaagttctcccgcaagaaccccaggcccacctgcaacggcccgtatccctacacccccttcattttaagcgccgacacggaagaaccacccgaacatctttgtcctt

SEQ ID NO: 92995 - DNA, 235 bp, Zea mays
  Clone ID: MRT4577_184800C.1
ttccggtcgacccatcgcgtccgcccacgcgtccgcttacgcgtggtatcgagcaagctactgatggaagtaacagcgaacgtatccagtcgggcatgccgtccgctctctgtccgtgtgtcggcagagacggatggtgctgacaattccacggcggaggaacccatgagccctaccggaagaatcttggaggagatgggtgtctgtattgtcatcgtgatggcgctcagcacgc

SEQ ID NO: 92996 - DNA, 670 bp, Zea mays
  Clone ID: MRT4577_184801C.1
gaggcttcggccgggaaaaaaaaaaaaaaaaaaaaaaaaaaaaaaaaaaaaaaaaaaaaaaaaaaaaaaaaaaaaaaaaaaaaaaaaaaaaaaaaaaaaaaaaaaaaaaaaaaaaaaaaaatagaaaaaaaaaaaaaagggggccctgggccccgggtttttttccctttaagggggggtccagggccccctgggctaaacctgggaaatccctcattctgggggaaaatggtttaccgttaaaattttaaaagaacttaacggggcgggctttcttaactttaaaagccggggggccctttggggggttttaatttaaaaaaacattgcgtgccgctatgtgccgtttttcaagcaggaaaccttgcgagcccgtttgctttattgaatcctcccccccctccggggggggggtgattgggtttatggtggactttttccgcttcctgtgatccattaccatccttggccaaagggccggtcatgctggggatacagcgggaattaagggccattaagggcggggaaaacacggttaccacaaaggcccggggtatgcccttaaaataaaaattggcccccatgctccgcaaaaagcccagacccgctaaaaggggcgggaggcggacatttctacattgattccacccctgtggaaaccccacaaaaa

SEQ ID NO: 92997 - DNA, 241 bp, Zea mays
  Clone ID: MRT4577_184802C.1
gagcagacaacagacccgcaccggaatggccggggcgctcctcttgctgctcgttccgaccgtcggcctactcgccgcgctcgcattcctcacgcggccccgcgccctgatcgcgctcaaagacagccacgacttcatgaccggcgggtccagcgacattaggctcgccatggcctcagacgatgcacgggagggcgcgcgggtctccatccaggcccggaaccttggccgactaaaggag

SEQ ID NO: 92998 - DNA, 465 bp, Zea mays
  Clone ID: MRT4577_184803C.1
tttaaattggggttggtgggtttctccagcaacttgattatatggatggatgggtgggtttgttggaggcgagttcgaccctgcttctgcaatcagaagttttgaactgttcagagttccttgtttttgttcactaactatcctctctgccaatcttctttgaaaattggctttcctcaaaggtttcccttcgttagtaaatctgcagttttaggagacaccactagagttcgtcctcatagatacaaaaggacattgctggttatggagaggtcagttgaaggctggaggtttgactatgttcacccgcctctttatatgttatatatggctgttctgatgtcacttaatggtgggtgaagtttgccaccggactaatttgaagattgattgcccttaattagaaaaatgtggttagctggatcaagtgatttttttgagggataggggtagatttaagcattt

SEQ ID NO: 92999 - DNA, 292 bp, Zea mays
  unsure (1)..(292): unsure at all n locations
  Clone ID: MRT4577_184804C.1
ggacaaaccattgttggacgcgctcgcatcctgaactcaacctcatctcgtcctccagatcgcaggatggccgtcctccttgagacatagcctccccgagtgctctctgtgagctactgtgtttcgatttatcagggaatccgattgcttcatgttgtgcaggctcatatctgattgctggattcggcaaacccgcgttggatcctgtatcgatctggagaaatcgcgaagtcgtcgtcgtttngttcggagcggatctgaggcgacgatagatggaggcggcgggatctct

SEQ ID NO: 93000 - DNA, 272 bp, Zea mays
  unsure (1)..(272): unsure at all n locations
  Clone ID: MRT4577_184805C.1
tttttataattttttttttttttttttttttttttttttttttttacagtaaaaaacacactttgcccatctcacaaagcaactttcgttgccggttgtaaaaattttgctacatgttttatatataacaaaggaaaattacggccaggcttgaacccgccccctgttacaaactcaaaagccacaaatatatttaaaaggccgacatttttcggctcgttgaaatcactctcctaactacaatctattgaatgggggggggggnggggggg

SEQ ID NO: 93001 - DNA, 234 bp, Zea mays
  Clone ID: MRT4577_184806C.1
cccggtcgcccagcgtcgctccatgtccattaatacgcagtcagttaagcgaggacctgacagctgtgcaattcaattgaagttgatcgcgagatacggcctgtacgggctggcacccatcgtaaagcgggaccccgtctgtctgcgtgcttggtgtgggtggggaccctgctcactgtgctcgctggcttcgggggtggcccccttggggctcttgcggtcctctgcccgcct

SEQ ID NO: 93002 - DNA, 441 bp, Zea mays
  Clone ID: MRT4577_184807C.1
cccacgcgtccgcccacgcgtccgcggacgcgtggggtttgatctgcccgtcgttttctggtcttttaattaaatccctgatgcacagtcatgtattgatctggtttggtgttcctagatgcgtgtaataaatggggaaaaaccatgtcgtaataaaatcaatttatttttaatgaaaataatacatagccggattacttctctaatcttacgatttctggtctatttcttattaaacgaataaggtctgaatcaaggtcagagccggagatgtgcatgggtgcatctcatatggcacatcgcagacaaaagattgcatagttggctccgatcctatttggcaagtgaatcagagatggcaatggcccaatgggctcggatcctatttggctagtgattagagatggcaatgcccaatgggtacccgcgatccgatacttt

SEQ ID NO: 93003 - DNA, 545 bp, Zea mays
  Clone ID: MRT4577_184808C.1
cagacactattcatatttctagtaaaaacacagcctaacacatcaacggaggcatatggaacaaaacagaatgaaagaaaaacgactagaagaacacgtacatcgacacgtatgttccggatctaccaaaagagtccctaggatctctactaccccactagatcagagcaccaaaccacatggcacatggaagacaccaccactagcacggtgaaggacaagagggtgagttgaataacagtcaaccctgtgctgatactaaaccacgacgggtgatcgatcacaaacccagcgcaggcgcgggcacgcactcacgccacacagcgggatccactgcgtcgtatcgagcccgtccactgccacttacacctcctagcggaggacaggtgcggacggggacgcaaggtcgaagcccaaggctgccaccacttgcagactggcgacgcgcggtgcctcaatgcatgtgtaacctgtgctgcctgatgctgtcgggccgtaggcagccgtgccgcctaacggtgggctcagggccgcctggttcgcga

SEQ ID NO: 93004 - DNA, 206 bp, Zea mays
  Clone ID: MRT4577_184809C.1
aaccccaaaggggggggaaaaataaaaaccattttgacaaaacataagccccaggttacaaagaccagcaatcttgtctacattgacaaataattcaggggaacacaattgggaataaaactttattccccgggagccaaaaaatagcccacgtggtaacaggggaaactgggcatggggggggccaaacttttttggacgcgggg

SEQ ID NO: 93005 - DNA, 721 bp, Zea mays
  Clone ID: MRT4577_18480C.1
gccacgagccccagagccagtacgtgcgaagcagcacgcacgctgctggtccgcgtacgcgagacgacggtcaggtcggccggtgcctttcagtttggaataatgacggcgacgacgacgacggccgccggcggcggcaaggtgcagccgcgcgggctgcccgcggcgctgtccctgctgctgctcctggtgttggcagcggggctgggcggtggcgccgaggcgcagcagacgtgcgcggggcagctgcgcgggctggccccctgcttgcgctacagcgtgccgcccttgccggggcaggttccgccggcgcccgggcccgagtgctgctccgcgctggggggcgtgtccagggactgcgcctgcggaacgttcagcatcatcaacagcctgccggccaagtgcggcctcccgccagtcagctgccagtaatgagctgatgatagccagtgcatcgcactgggcaaaatgcaagggatccaaacacgctgaataataaagaccaccggcgtcgagtcgactcggtgtcctcattcgtagtgaatgctaaagcaaactcttgagggtcgcgtgcccttttgcgatcttgtacgcacacgaccggcctgtggctgtgcaatgtgcaacatcgctttgattcaaagaaccaacaataatacagaacccactctgcacagcagggctcactgaaaaaaaaaaaaaaaaaaaaaaaaaaaaaaaa

SEQ ID NO: 93006 - DNA, 310 bp, Zea mays
  Clone ID: MRT4577_184810C.1
cctacgcgtgcgcggacgcttgggcacacgcacactctggattggcgctcgctggctgcaactgccgggcatctacacgaaccagatatataataggggtatagaacaaggacgcagagcacggcacgcagtgaaggctccatgagaattcaacaccacctggtagcagcatcaaaagaagaatggccaccaccagcactcctcgactggcaaccatcctacatctcctggcggagccgtcacagctgatgagcgaacttcaaaaggcacccctcaaggctgcggtaggtgcaaacgctgtgccagggcc

SEQ ID NO: 93007 - DNA, 657 bp, Zea mays
  unsure (1)..(657): unsure at all n locations
  Clone ID: MRT4577_184811C.1
gctccgcccccatactcctactcacctcctactacggcacccagcacggtcatccacctcgccgaagcagagtagccatggccgcgcccccagcgatcccgcgccgcggcctcttcatcggcggcgggtggcgcgagcccaccctgggccgccgcatccccgtcatcaacccggccaccgaggacaccatcggcgacatcccggcagccaccgcggaggacgtcgagctcgccgtcgcggcggcgcggtctgcgttcttgctcgacggtgggagccgctgggcgcgtgcttccggggcgacgcgggccaagtatctgaacgcgatcgctactaagattaaagaagagatatcgtatctggcattgctggagacagttgattctggaaagcccaaggacgaagcagttgcggacatggacgatgtcgctgcatgctttgagttctatgctggtctggctgaagccttagatggtaaacaacatgcgccaatctctctgcccatggaagaattcaagacctatgttcttaaagaacccatcggggttgttggactcatcactccctggaactatcctctgttggtggctacttggaaggntgcacctgccctggctgctgggtgtacagctgtgttaaaaccatctgagctggcttctc

SEQ ID NO: 93008 - DNA, 480 bp, Zea mays
  Clone ID: MRT4577_184812C.1
tttgttttttttttgacgctcaaaaaagatgttttggattagattacatccaccatctgtttaataacagtgcatccttcatctcatgattaaaatatagagagatgcaaaggaggttcaggaacaaaaaaacaacttgctaaataaaacactgctatttactaacaaacatctaacaggttctacccagtactaaaacacaagtaaaaaccgttcagatgttctaatctctctctctctctctctctctctctctctctcttttcactgagaggttagcttcggctcaatccgtcagcaagccaaacacactgaacgccgccaatcggatgcccagccatgacggccaaaacacctgccttgctggtgaggaaacccttcttcctcgctgggggcagcgaccacattggggagtataagctaaaagagaaccaaccacaacgactttctcatgcggctgccacgcgtcccggacgctgg

SEQ ID NO: 93009 - DNA, 487 bp, Zea mays
  Clone ID: MRT4577_184813C.1
aattcggcacgaggcctcgtgccgcgggcctcctccagtcctcttcctcaccccgacgaccccgcctcaaatccaatcccactcccacctagcggtccggctggcctcgcctcctcctcctcctcctcgcttctctcagcctcaggacgacgcctgcctaggcttccaccgctgattggaccccgaaaccgcgttcccttgtccgcttcctgccgtctcagtcgtcgatacttgtcccccaaaaccccgggctccggccgatctctgcggccctcgcgcggtgaccggggcgccgttgatggtggcgaggatgatgcggtggccgcggccgccggcggcgcgcaagttccgcgtgcggctgttggtgcggcgtgcggaggggctcccgcctccttcaccttcgccttcgccgtccgccttgcccgcgacagcggcctcgccggagcgcgaggcgccgggcgccgcgcagcccaaggccggcggcgcc

SEQ ID NO: 93010 - DNA, 386 bp, Zea mays
  Clone ID: MRT4577_184814C.1
cccacgcgtccgcccacgcgtccgctttttgccctgttttctaatgtaccgtggttgtgaaccggtcaatgtgatctgaaataaaacattgcgtgccaaaaaaaaaaaaaaaaaaaaaaaaaaaaaaaaaaaaaaaaaaaaaaaaaaaaaaaaaaaaaaaaaaaaaaaaaaaaaaaaaaaaataaaaaaaaaaaaaaaaaaaaaaaataaaaaaaattaagatccaacatgttaaacaaaactggaatctgacaaaatattagtcttaaactctaaaaaatatcaggcctatatccgcatttaaacaagtggaatattttaaaaaacgtcattaaagaacattaattacaacagcttgtaattccaaatagctaatgggtactttt

SEQ ID NO: 93011 - DNA, 508 bp, Zea mays
  Clone ID: MRT4577_184815C.1
aacaccacccggaagcggcaaggcgaacgcaggaaggacggagcagacgggggcagcgggaagaaccaagagatctggctatggcgaccgtaacggggtagagaaccgctgatgccgagggcccggccaacacccaagctagcgcacagtgtccatcacaccatgatgcatcgacgaacacgataaacagcgcaacagcagtcgacggaggaaggacgggctacccaaaggaggatcgctcttgctgcaaaaacataccatgaatgcaattgaaagtgaccaagacggaccccgacgcatatcaaaagccaggaagctacggcccccagggagacgcgcaaacgaagtgactgccaatccagaggtcctataaagacgcatagctggaggaggcaagaaaaaaggacgctgcagctaaccaactaaaaggaacatccaatgatgcatatgataacgggccgaatgctacagaagatggggctaaaatgcgagcacaaacaaaagaagc

SEQ ID NO: 93012 - DNA, 576 bp, Zea mays
  Clone ID: MRT4577_184816C.1
cttcacgcgtgtgcgcggcgcctgcggccgtaaactccatattgttaacaccatttgcttaacccttaatttagcccgacgttcagtcagtggatcgatcatggacttcgtcatgggctgggccctcaggtaggccttggcgatggcctcgcagggggtgtcgcacgccctgttgctggactgcgagatggtgtggcacaacgtggcgtccaacgtcgtctccaacgtgcaggccagggcggacgacggggggggcgacagcggcgggcgcatcaacttgaacttaaacttgaccttaatcttgctgaacgagtgtatgaaggagcttgtcgagttcatgtgcgagtgcaagagcaagctcatgaacacactcatcgtgggaggcggcatcggaacggccatctaaaacatgacggtggacatcaaggtcgagcccgggagcgtggggaagagcgaattcaatgacaaattcatttacaacctggtggcgaacgtcgaggtgaacgacgagcacgactacgtcaacgagatcttcaacggtgtcttgaacgatgtcgaggcctacctcgacgccta

SEQ ID NO: 93013 - DNA, 2351 bp, Zea mays
  Clone ID: MRT4577_184817C.1
tgtcacgcgtccggccgctgcctcagccgctgctcggcggcgcctcgcccgctccggcgcgagcggcctcatccttcctccacccccttctccacacgcgccaccgcgtctccactgcacctgccgctgcctcctccttcgtgcctgcatctcactcctcccacgcgaacgacgccatgctcctccgccgtgccgccgacgtggccgaccgttctgcgggactcacctccccgcacccgaacttcgggtgcgtcatcgcacggccccagcttaataccgacagcgctgattcctgggtggtcggcgaagggttcctctatgcgcaggggacgccctgcgccgagctcctcgcctcacaggaggccggtgagcacgcgcgcggcggcacggcatacctcaatctcgagcctggggactgctttggtgacaacacagccgtcggatccctcgtccaggcaggaattacaagagttgtggtgggtcttagacatcccttgaagcacttgagagggaaggcaattcaagcattacgaaatgaaggcattcaagttgatgttgtgggggaggatctgcagagtaaattgttcaaggaagctctgaggtcatgcctcactgtaaatgctccattgctttacagagctgcctttcatgtccctttttcggtcctgaagtatgctatgacagcagatggaaaaatagcagcaagtagtggacatgcttcttggataagtggcaaagcatcaagagggcgtgtatttgaattgcgtggcagaagtgacgctgttatcgttggtggaaatacagtgcgttttgacgatcctcgattaactgcaaggcatgttaaaggacatgttccagtgcgtatagtgatgtcacagtctcttaaccttccagaggaagcaaatttatggaatcttaacgatgcctatacgattgttgcgactcagagaggtgctcggcgagattttcaaaggaagcttgctatgaagggtgttgaagtagtagagtttgacatgctgaatccaagagctgttatgtcatattgttatgatcgtggttatcttgctgtattatgggaatgtggtggaacactagctgcttctgctatatctgcgagtgttatccataaggtctatgcattctgggctccgaaaataattgggggattaaatgcacctacgccagttggtgaactggggatgagtcaaatgactcaggcaataaatttaattgatgtctcgtacgagcagattgacagggacatgctcatgagtggattcatcgaacccattcctgatctttcacctgttataccatccgtggaagaaataccttccattgatccagaagtatctccatatgaaacaaatattatttccttttacaagacttgggatatttttggggctttctcaaacttttctcctcattcaattcacatgcctgatgaaaatggagattatttcacatggccaacagtggaacactattaccaggctcataagtttgttggtgttgacaatcctcaagcaagagacattgttcaagaaataaagctagcaaagagtcctgaagaggctgctagaataggaaggacccgacaaaaagggttccctgaactggtaagaacagattgggagagtacaaaaatagatgtgatgtatagagctatcaaatgcaagttttcaacttatccccatctgactaatatgttgctgtcaactgctggctctgttctcgttgaggcatcgcctcacgatttattttggggcggtgggagggagggagaaggcctgaattacttgggtaggttgttgatgcagttgagatcagagattctggggacagtcccagcaagcgctgaagtaggggaggcagattgatcctgaagcgagcaaatcttgtttagcaggagtgttgattgcaagaccagacgttaaggtgtggctgggtcccgattgctacagtggatggtgctagtgaaacgaagcgcaaatgagattcgttaaattattatctgtatgcctgtgaagaacaaacataccatgggccctgctcttttgtcgaacaatttcatctggccctcggggtataggaattatgaaatacaaaggaggaacaccaacagtcatgcatagaatgtggtagtcctggtagatgaatgtgtttgataaggtgataaggactaatacattggaccagaagtagaagacgtgcttgttcagtaatggttgtttagtaaaaaggagggcgaattatttaataaaattaaatgcatcattgcaccaatgaagtcttttgcctttgtttcacttaggcccatcaacaggaaaagtaggtttttgggtacc

SEQ ID NO: 93014 - DNA, 912 bp, Zea mays
  Clone ID: MRT4577_184818C.1
cccgccgccggccgggtaaagttcacacgcacaacccgccgccgcacgccgggatctcgatagactctggctgccgcggaaagcggaaagaaggcagggatcgtggccaagatgcagatcttcgtgaagacgctgtcgtcgacaaggacgatcacgctggaggttgagccttcggacacggtggcggacgtgaaggccaaggtgtacgagtccgagggcgtcccgccggccgagcagcgcctcatcttcgcggggaagcagctgcgcgacggccacacgctggctgactacaacatccccaaggagacgatgctgtccttgtgctgccgcctcctcggaggcggccctaagaagcgcaatagaaagacgttcaccactcccaagaagggcacgcacgagcacaagaaccccggtctcgacgccgtgcttgggcggtacaggatcgatgaggccacggggaaggtggagaggctgcgcatgcagtgccctaacccggagtgcggcccaggcgtgctcatggcggcgcacgccgaccggcacgtctgcggcaggtgcggcctcaccttcgtcatcgagaagtagagcgcggcagatagctaggtcgcttcgtaccccctccatttgcaatggcaaagcgtttttacctttctagatatgcacttatgtctagatatgcacttatgtctagatacatagattatcttatactcacttcgttcttttttatttttcgtgttttagtttaaaaataaactaatcgacaacaaatattcgaaagcgaagatagcattttaaattagagtatgttttaggagtccataatagttcgatcagatttttttttcctgtttttcaagcatattcttttttccgccttttgtctttccttataaaactaaagtgatttctgac

SEQ ID NO: 93015 - DNA, 620 bp, Zea mays
  unsure (1)..(620): unsure at all n locations
  Clone ID: MRT4577_184819C.1
ngggcggggccgccgncgggtgcggaggcgccgacgcggaaggccagcatcactccctgcacgagctgcaggacaccacgctgggctcgctgctctccgcgctcatgcagcactgcgacccgccccagcgccggttcccgctcgagaagggcgtgccgccgccgtggtggcccgccggcgccgagccgtggtggcagcaggccgccgtgcccggggacctcggcccaccgccgtacaagaagccgcacgacctcaagaaggcgtggaaggtagccgtgctcacggccgtcatcaagcacatgtcgcccgacgtcgacaaggcgcgccgcctcgtccggcagtccaagtgcctgcaggacaagatgaccgccagggagatcgtcgcgtggctcgccgtgctcaggcaggaggaggagctctacgtccagctgcaccccggcgcccgcccggcgccgtcctccgcagccatgatcccgttctgcgccagctccggcgagtacgatgtcgacggtgaagacgacgccggccgtaaccagcagccaacctccaaccctggcgccgcaacattcctggagctttcgtcgtcgttcatggacgatgcgggccacaacaagttcgtg

SEQ ID NO: 93016 - DNA, 324 bp, Zea mays
  Clone ID: MRT4577_18481C.1
ccccaaaaataaaaggatccaattttataaaattttattttttttttccggaaaacccaggaccggccccttgtggccgccccccacccccccgggggccttttaaaagcacccctggacacccccccttccaattggctcctggggtagccaaaacctgccaaacccccccccggaaaacgtggggcctggcccttttcattggatattttaccgggaagggggcgatccccagttggggcccctgtcctaaatcccagggttcgaaattaagcaggggattggttttataaaaaaccccccccgacccaagaccaatgaaaa

SEQ ID NO: 93017 - DNA, 535 bp, Zea mays
  Clone ID: MRT4577_184820C.1
aaaacgcacacacagaccatatatgctgaaaaggtgtatataaatatgtggaaaaaatcaaaacttatatgtcaggtgatcataagttaaatgcctcgtggacataaaagttccgagctatgagattaggcccaactcccaagacaccatacctagaataacacatggtctttaattcaatgctaaatctactctgagcagaaacacaaattttcatttcaactccaacgtcacgaatttccctttttatttttgctcatgtattgctactttgctagtagtttacaaatcctactttgtctgctgcatcccctacttcgagttctagaatatttaggatgaaacagaaaattcatcatgtatggttggcaacatagaaacaaaatctgcggtaccttggtaattgcaacacccatgacaaggacgtcaaaagctgctgatgtagatgtagtgcaaattgtgtagtgaggtggagccagtattcaggacgatgatgacagtttacagagctgctttttttagcttgatatgactc

SEQ ID NO: 93018 - DNA, 339 bp, Zea mays
  Clone ID: MRT4577_184821C.1
cggggacccaatggggttttttaatttttttcgagattttatacattcatacccacttttacatattgtttccgcaaacgtaacacacaatataatccaatttgcagcacctaataagatcctagtaacccacactgaagctctgagaaaatatgctcatcccccctatatcttctgggggggaaataactaataatgtggggcaaaaaatggaataaaattgcgtgtgccaggggggggggacccaaaataaaaccgggggtttaaattaaaaaaactttcccccaaaaatagggggtttttttgggcccccggttaaaaaataaatgcgggcccccc

SEQ ID NO: 93019 - DNA, 1405 bp, Zea mays
  Clone ID: MRT4577_184822C.1
atggccgcggctcctccccggcctcgtgtcatggtgctgcccttccctgcccagggccatgtcatgccgctcatggagctgtcgcaccgcctcgtcgaccatggcttcgaggtcgacttcgtgaacacggacttcaaccacgcccgcatcgtcacggccttggcggcaggaggaggagagaccagggcagctgcccacgccgggatccacttggtctctttcccggacggcatgggccccgatggcgaccgcgcggacatcgttaggctggcccagggcttgccggcggcgatgctcggccgccttgaggagctggccagagctcagagggctcggtgggtcgtggctgatgtctccatgaactgggtgctggacctggccggcacggtgggcgtgcgcgtcgccttgttctcgacctactcggccaccgtcttcgcgctgaggacgcttattcccaagatgattgaggatggcatcattgatgaaagtgcggatgtgaggaggaatgagaagatcaagctgagccccaacatgccagtcatcgacgccgccgacctcccatggagtaagtttgatggaagccccgagatacgaagaatcatggtaaagggcatcgtcaagagcaacccaacgttggcgcgcgctgacaccattgtctgcaacacgttccatgctatcgagtccgaggtgctggccctcctccccacggccgcgctggccgtcggcccccttgaggcgccaaggtcgacctcggccagccagctctggcccgaagacagggcctgcctcgtctggctcgacgcccagccccccggatcagttgtctacgtggccttcgggagcttcacagtcttcgacaccgcaaggctccaggagctcgccgacgggctggcgctcacgggacgcccgtttctgtgggtggtccggccgaactttgccaacggcgtcgaccaaggctggctggacaagttcaggtgccgcgtcggagacacggggctcgtcgtcggctgggctccccagcagcgcgtgctctcgcaccctgcggtggcatgcttcatctcgcactgtggatggaactcgaccatggaaggggtgcgtcacggcgtcccgttcctgtgttggccatactttgccgaccagttcttgaaccagaagtacatctgcgacgtgtggggcacgggcttgagggtccgtgccgacgagcggggcgtcttcaccaaggaggagatcagggacaaagtcaaccagctgctcgctgatgatacgatcagagcgagggcactttctttgaagagagcagcgtgcgagagtatcacagatggagggtcctcgcatcaggatctgctcaagcttgtaaacctgctgaaggaacaataaaatttaccttgtcagaattttttttccc

SEQ ID NO: 93020 - DNA, 715 bp, Zea mays
  unsure (1)..(715): unsure at all n locations
  Clone ID: MRT4577_184823C.1
gggtacacctccagctttccgggttcgtgaacaccgnacttcaaccacgcccgcatcgtctcggccttggcggcaggaggaggagagaccagggcagctgcccacgccgggatccacttggtctctttcccggacggcatgggccccgacggcgaccgcgcggacatcgttaggctggcccagggcttgccggcggcgatgctcggccgccttgaggagctggccagagctcagaggactcggtgggtcgtggctgatgtctccatgaactgggtgcttgacctggccggcacggtgggcgtgcgcgtcgccttgttctcgacctactcggccaccgtcttcgcgctgaggacgcttattcccaagatgattgaggatggcatcattgatgaaagtggtaagagcgaaccgaacaccataaacacccgtgtcgtctccagacctgcagatcagaattcatgttggacacgctgtttccgtgcgcagcggatgtgaggaggaatgagaagatcaagctgagccccaacatgccagtcatcgacgccgccgacctcccatggagtaagtttgatggaagccccgagatacgaagaatcatggtaaagggcatcgtcaagagcaacccaacgttggcgcgcgctgacaccattgtctgcaacacgttccatgctatcgagtccgaggtgctggccctcctcccacggccgcgctggcc

SEQ ID NO: 93021 - DNA, 248 bp, Zea mays
  Clone ID: MRT4577_184824C.1
gccggccgggtcgggggaacacgacgattacgacgactactgattatcagtgccagctccgatcctgctacgtacttcaccttcgtacgtgtgtgtaatatatgggcgagattttttccgtgcggaattctaggaacggagtgtactgacgatgcatcaggagatgtatgtaataattttgtccagtgaaatgtaatgagcatagcgtctatagttaggggcaaaaaaaaaaaaaaaaaaggccccta

SEQ ID NO: 93022 - DNA, 251 bp, Zea mays
  Clone ID: MRT4577_184825C.1
atagtacgtcgtattaagcacagcctccctctctcgcggccctttcccacacatccgagcgatggagagtcctccttccattccttctgtcctcgtgaaggcgtctagtgaggcgtgctttcttgctcgcctctgccaggcactggtcacaagaaggtcgcctcgtgttcgggtcatcttgccttcacaagggggacgggagttccctgctagggggagaccttccgttgcacgtgtacgcacgcatgcag

SEQ ID NO: 93023 - DNA, 758 bp, Zea mays
  unsure (1)..(758): unsure at all n locations
  Clone ID: MRT4577_184826C.1
cattgggacctcgaggcggcgggaagagttccgcgcagcgggttgcgataggaatctcctttggcaactcgtacagctctattgcctttaccactggtgagggcaaggcagaagttattgccaacgaagacggagaccgccagattcccaccgccctgtcctacgtcgagggcgaagaactccacggtggccaggccaagccccagattgtccgcaatgcaaagaacactgtcgcatactttcgcgatttcctcggtcaagattacaagtcgatagacccctcgccatgccaccagtcggcccaccccatcgagcacgagaacagcattgcgttcagcatccgcgacggcactgaggagcaggaaaacaccatttccattgtcgatatcactacgcgtcaccttaagagactacgaacctctgcctctgactaccttggaaaggatgtcaacgctgctgtcatcaccgttcccacaaacttctctgacgcccagaaggaggcgctcaagaaggcttcaacaagtgctggtatggaggtcctgcaattcatcagcgagcccaccgccgctgtcctggcctacgacgctcgccccggtgcgcagctcgcggacaaggtcgtcgtcgttgccgacctgggtggcacccgtgccgatgttgctgttgtcgcatcccgtggcggcatctacaccatcttggccacagntcacgactacgatgtcagtggctttcagctcgaccaggtcctcatggacactttg

SEQ ID NO: 93024 - DNA, 608 bp, Zea mays
  Clone ID: MRT4577_184827C.1
aacctgttcatccatcaagatcacatcaaggctcataagttcatcagttgtaggattgattatatcccatgttcatgttactttcacttaaaaatcccagttttggtctcttgttgaagtctctcagcttcttgtattcccaggcattttcagttgaaaaggattaaaacacactgcttcaaaaggattgaaaaagtagttgtcaattgataatgtgcatatgaagattgtagctgacaaaagtgagttcatagtaataataattactaaccatgttgattcaggtgagaagaaaactcagacggttgggtgtgacttacgtagaaatccagttgcatgccacttcataatttgggctggcttcgatatttgcggagcgccaagtccaaacatcttgcatcacagagtctgttggcttcaactgtcctggtggtggcatcgtcggcatcatagagttggctggcttcaattttcctcataaaatatgtatagcataaacctattcatccatcaagatcagatcaaggctcataagttcatgagttgtaggattgattatatcccatgttcttgttactttcacttaaaaatcccagttttggtctctt

SEQ ID NO: 93025 - DNA, 174 bp, Zea mays
  Clone ID: MRT4577_184828C.1
cgtccgaatccaagtttctctatttctctgatcctcattagttaacatcaagcttatcacactggttagatagtctccacctccaccttcctgtctaccttcgccagtaggtctgaggcatgcgataacctgctcatcgcgtgccgtccttccagaagatcatcatgttcttgc

SEQ ID NO: 93026 - DNA, 768 bp, Zea mays
  Clone ID: MRT4577_184829C.1
aaaaaaaaaaaaaaaaaaaaaaaaaaaaaaaaatccaagctcaggtgacaacagggactcctctcgtctagccaccgttgagagtcgcacaagaaaagtgtcgcccggctccttggccctcctcctccggcggtgctgccgtcgtgagcgagcatggggaaggtagccaggtctctcctccgtcaagtaggtgtaagattaggtttaggactgagtctaggtttgtctctatggcgtttgacgtgatgtcgagttggagcttcgtccaggcgtcctcgagcagcgcctggcggcaagttctctcccgaggtgagcttccatggtggaagttgacagcgggtggtagatctggtgatagcttccctaataagctcgaatctttccctgatctggaggatctccgtcgccttgttccatttgttcgtcgctgtcgtggagatggggacagaaagtggaagaggtggagcgcaagtttgtttcgattgggtttgtgcatattctcatcggtgcttggagtggagctccggcgcccactggagctgccggtctccgccgccttcccggtgacatttctggccgaagggcggcctggtgaagccatgctggcttcgtttcttcctcctggcttgatgccatttgagaggcaactgttcaacttcaacatggagtcctcttcttccatctttgtccggagatggagtagtggcggtccggtgatctcaagtggccacgtccccggtgatggccggactggatctacgctggagt

SEQ ID NO: 93027 - DNA, 793 bp, Zea mays
  unsure (1)..(793): unsure at all n locations
  Clone ID: MRT4577_18482C.1
cactcctaagggcgattgggatcctcgaggccggccggaatactactactactacgatcgttcaccactaactagtctgccgtctcagtccgattcacgtcctaccatagattacatatttcccaccgacaacgggaagactccgaagcctgaaccgcccaccgatgtcaagatgcattcagaacgcgaggagaacatgagtctccaccacgaaatccaccttgccatattgcggcatgacgccgacgagatggaaggggagcctaatagacgtagaggcgagacctgacactcacacgtactactctgacatctgctgtctacgcacattgctggtatcgccacacactccctgcgatctccatctatattgtgctatcgaatctccggccgatgacagacgaggagcagcactcccagggatgacaccatcctcaatccccactctccactagctatagattcatgaagatggagcaggtgctctattcagccggcgacaacacctgcatctcacaccattgagatgcagagggacggtattgacccatacnatgatgcacattgtgcaggtgatgtgggctccatgaccatacagtaaacgactacctgcaattccatttcttcatggagcatacttcagatccccgagcagaatcacgagcgacttatagtctcatgggccatgaacagagtagaagctgcactaactacgacagtgatcatccccactttcattagcgtatatattcgcacacgtataagtctgatgactcccctctcatcatcatca

SEQ ID NO: 93028 - DNA, 107 bp, Zea mays
  Clone ID: MRT4577_184830C.1
aaattgagcactaaacctgtgccaagagcccatttgttttccaagacagttaaggccattccgtgaagaagatttgacagtctcagacaaacctagcctaccataaa

SEQ ID NO: 93029 - DNA, 600 bp, Zea mays
  Clone ID: MRT4577_184831C.1
acgggtttcctcagaggctcctcgcctctcgtctctccggcggatcgcccgactgtgagacagctctctccatggccgcgcaggaggagcttgacttccgcccgctggacgaggggtcgctgctcgcctacatcaatggcacgccggccgctcgcctcccgcctcggcggcggtggtaggctacactccatcgagaccaaggaggccggcgacggctacctcaacttcgtctacatcgcgccagccgaggccggcgccatcgccgttcagccggcgctcccgtacgcagcgctgcgcgccgcattctctggcccatgacgcgagagcgcgcctactttgatgtctctacgctgcagcagcacggacgcctgtgtgcggagcacacccccgaggagtaccacttcgagcgcaacttgccactgatggggatgctctacatcgagcccccgcacatcatcctccataaagaactcgtcgccggagtcgaggacccgctgctcgacgaccacatgtatgattacatgcgcaacacgctcttcttcaaatacctcctctatgacaatacctcgcatcataatagaggagatgctaagtactctg

SEQ ID NO: 93030 - DNA, 423 bp, Zea mays
  Clone ID: MRT4577_184832C.1
tttttggggttttttttttttttttttttgtttttacccatcacacacatgcttgcatacctagacacagtcaagcattacacacatgcttgcataccttgacacagtcacgcaaaatgcgaccagttgttacaggaaagggtcacaaccatatgaaaacataaccaaccatgcaaaaaaaagaagctcaaaaagtaagcggagatagttagaaggacctttttttccggatacacttacttaagagggtgtaacaaccatgtttgagcagaatctgaaaggggaaaccaccggccattttttaggccatgcacctattggaacaacaagatgctaacgttttttgcgggcagacgcttgaagaaattctgcggaacaaatgggattttgtggcggaccctggggagccttagatcgtacagg

SEQ ID NO: 93031 - DNA, 520 bp, Zea mays
  Clone ID: MRT4577_184833C.1
cctcgaggccggccgggccgggatctaatggaacgcgtgtgcttgctgttgctgctgcatgcgtgcgtgcacctgtcgtcgcgtgtcaaagtactcgtggtctatttcatcttacccttatttattcatctacttttcatatattcagggatgaattcagtttccctgtttcaatatcaaaaaaaaaaaaaaaaaaaaaaaaaaaaaaaaaaaaaaaaaaaaaaaaaaaaaaaaaaaagaccctaaaaaaaaaaaaaaaaaaaaaaaaaaaaaaaaaaaaaaaaaaaaaaagggcccgatgggcccaaaaatgcacatttttgttccctgagggaaagtgaaatccgcccatagggaaaacaagataaaaaccggaaccagaaagaaaaaagtatgcggtgccaatttgaaagaaataactcacctgaaatgaaaaggggaaactgcggggtgtccaatggggaaacctaccccgccaaatgggttaaggaacccggcaacgtttccaaagagaaaaatt

SEQ ID NO: 93032 - DNA, 421 bp, Zea mays
  unsure (1)..(421): unsure at all n locations
  Clone ID: MRT4577_184834C.1
ctcgaatcttttaaagagcgagccttacatggggtacgtacataatactactgggaagggtgtcaccatcacccatgggggggggggggggccaagcatgaaccaatacaaaagtaagggatagaaccataggagacgtatgctgcatgctgacctatcaatggggatcaccgatgccgccgccgccccaactaccaccgtagctgcgaccgccgccgccagatcccccaccgccgcgggagccgtagccccccccatgggggggaccgggacaaactttattctgaggccggccatttgcgagtgtgtagtgcaactagcgagtcgggtttttattgggccccggggatctctctaccagagtatgaagcantaaaagtgtaaaaagatgcccccaggcgacgggctggctcaaactgga

SEQ ID NO: 93033 - DNA, 135 bp, Zea mays
  Clone ID: MRT4577_184835C.1
gtttgacacaaggacatgtcacaggaactgccgagcctaatcacgtctactgaggcccaatagtgtgtgtagatgttcatgtgccatgccggatgtccgctgcgagggtcatgttaactcgctagagaagaattg

SEQ ID NO: 93034 - DNA, 458 bp, Zea mays
  Clone ID: MRT4577_184836C.1
cccaaacccgcgggaaaccctatgcttttttcacggggcaaagggccaaaaaaaaaaaagggcgggacatggatggggtctttaactaacaggcggggttaattcagggcctatacggggggcatggaaatattaaaagactaacagggagacgggcccgtttggggcttccggggcttaagtgggggggccccataaccggggggaggggcacctcccttgaccacagccaaattgtaatcgttcccgggcgccgccgccgccttaaactttgacgtttccaattttgacggttccgggagaagcctccttgtccttggggccgaagacggggggctttggggggagcgcaaacgggaacctgtttttgcccggcctcctgttggggccgacccgctcgagggcctccttaagggaaaagaattctttttcaagctccaacacgcgctgtttaatgc

SEQ ID NO: 93035 - DNA, 296 bp, Zea mays
  unsure (1)..(296): unsure at all n locations
  Clone ID: MRT4577_184837C.1
aaaaaaaaaaaaactcaatctctctcttctcctttcctcgccttggtgttactcgctgggtagcgcctgccgaagcgaagcttctgtcctccccggcgccgggctcgggtcgtcgtcggccaggaagatggctggcggcttcagggtactgcatctggtcaggccttttctggctttcttgccagaggtgcagagcgcccatagggggatagcnttgggataaaaanttatatacactnttatttcccttttcattgggagggagtgnagccagntaccactatatgggattgatg

SEQ ID NO: 93036 - DNA, 225 bp, Zea mays
  unsure (1)..(225): unsure at all n locations
  Clone ID: MRT4577_184838C.1
ggactgcttgctcccttttggccttgggnattctgaaccatcccgccatggctgccaagctgactcgcctncaagtcttcgcgaacgccttggtgccaccttntcctcccatcccaatgaactgatagcactcttttccagggatgttnaggagggcaggggaatgttttagngnnatgagntgnttggggggggggggcgcccctttttttttttnnggggggg

SEQ ID NO: 93037 - DNA, 674 bp, Zea mays
  Clone ID: MRT4577_184839C.1
aattcggcacgaggcttcgctgctggctatcatcatcaagccgctcaacgctgtctcccaccagatccctccatccctaagctgccgctagattttgctgaatccgttgttctcaagcatctctcagcatatttcacttcatattatacgagtggttagggattttttgaaatgcagccaccttcctctgttcctgcggcgaccagccccacccctgccgtcgccggggctctccccaccgattcgccggccggtaacccccgtcctcgccaccaaacaacagatcagcccttcacctaccgctgttgccccgtcccagccaggtttgcaggcgctcccgtgagccctggcttccacccctccgtgggctggccaactctgccgcgaccatgcctcaagccggccgcggggagacaggctgcgacggctccccacgacaagaaagttcagtttgctgtcccgtccctgcccgcgaaacagcttcgtcgcccacacaggaccgcgaaacagcttcgtcgcccacacaggcttgcgtctgctgcacagggagctttcactccgcgccgtatcgatgggacttcttgccagccacagctttcaagccaacttcgcatcaaggagcaactatgcgaaatcgaatccattgaagacgatgttgcggctgggtggactac

SEQ ID NO: 93038 - DNA, 459 bp, Zea mays
  Clone ID: MRT4577_18483C.1
aaccaaacagggctttattttggggttattgggaagggggggaaaaaggggggccaaaaaaagtgggggggggggcccttgtttgaaaaaaggaaattttttttcggggggaaaaaaaaatgaagagcttggggggggtcctaaagcactgtttaaagggggggttgttgacgtaggggtgggcccactcgggggggggggggaacccctcgccggcgaagaggaccacccgggggggcttcttgatgaccccgacccagggggccagggcaaagggggggatgtcaaaaaaaccgagggcctccccgccaaaaaacctttgccccctgaggtgggcctaaagaaaagccaggttttccttgggctccttggcaaaaacctccctgggctcctcgggggccggccaaaaaaaaatccaaaaagggcgggcaaacttttggtcgaagaagggggcccaaa

SEQ ID NO: 93039 - DNA, 303 bp, Zea mays
  Clone ID: MRT4577_184840C.1
ggacactatgaaagcttgactccatgccgctctagctcgaatcctgggctggactatattatttagagcagggaatttaaagatttggcggtcaactacagatccgcctgtttcaaagaacacttcttgaatatgaatttggcagcgagactttaatacctttgattatgagaactgttggagataatagtttggggttttgaattcttttgcagcaacatcaatggaaagcatgtgagttattgcccaaccctgatgtctgaccgcgatgtctaagcctaggtactcaagagcagtgtactg

SEQ ID NO: 93040 - DNA, 892 bp, Zea mays
  unsure (1)..(892): unsure at all n locations
  Clone ID: MRT4577_184841C.1
cgtttttgtccgcccttttttttttttttaaataaaggaccattttccattcatatgggcttttcatgggcctgtgggggccaatcatagtctaccaatgcatcttccataaaggtcctaccaggccccaaaaaaacagcgagcaacccatccatcagtagtacaacagagaaaatgtggggaatcattaaaagcctacaggatgtgataagcatcaatttggaaactatttacatcctgcatccttagttccttaccagtcaaaaatgccccaacctgaattttgttgtctgaatcaggagccagccgcacgagagacagacccaatatcaatttagcaagaggggcagagagctcgggcaggtttaccatggccgccaagctcatatcatatcgatcatgacagcaaggtttctttccttgtacccttgctacctcccttaaagttcaaggacggcagtgcatctaccgcccattgaggtgatttggttcctatccatagagcttgccctgaatctcttgttcttgaaatcaggatgctttagtgtcggcttgtctgctcggttgtcccaccagtttgctggattgttcacacgcccccgccacacttcaagtctttgctttgactgacacagcagatctgggcgcttcatcatcctcctcccagtctttgttgtaccatcacgtctttgtgctgacncagcagatgcatctgggctcttcatattcctccagtttgtactcgttccgaaaggtttatcttttctttcagtggtgtacccactaccgaacaccanatcatccagcttctcaagaactgatgtcggtgcactgtcagccagagtacctcatctgaaacctgttcttaaaatcaggatactttgggctcctg

SEQ ID NO: 93041 - DNA, 342 bp, Zea mays
  Clone ID: MRT4577_184842C.1
acgaatcatgcggcgaatgctgcacacactatatttcgtggagacgactggatctccggaatcgcggccctaccaggctacggccaagtctgcttcagcccctaagcctactcaagctcctccaaatggttgaatacggaaacccaatctttgtaaacaatttacttttaacgctcaggttttaatggaagtactcatgatccaacttattgatgctaacctacttcattcatcgacatgccactgctcgacgtcgggggctaaactataatgacgcccatagctcttgatcgacttgcatatctgcatattgaataccctatgctaattacggtattacaa

SEQ ID NO: 93042 - DNA, 487 bp, Zea mays
  Clone ID: MRT4577_184843C.1
gggcaaaaaaaaataaaaggtttgggggaccagtttaaacccgcccaaaaccggggcaaagcctaagagggctttgggaaggggtggaaaccaaccccgggggaaccaaaaaaaaaaaagggggggcaggttttaaaaaggtttcccccaaatttccattttttaaaaaaaatttttaccccgttcaaagggacgcccttaaaagcccccctttttaaaccttttaattttgggggacccaagggcccaggcaaacccgggggggccccccattggcccaattctttctttccctagggcccagggcccaccgggatttttggggggggaaaaggcattatttttttattaatcccccccctgaaaaaaattttagccattttgttgggggggggattgggaggcccttacacttcttagccccaaaccccccaaaattcgagggtttccgcccaatagggcaacccccttggcccccataaaaagg

SEQ ID NO: 93043 - DNA, 365 bp, Zea mays
  unsure (1)..(365): unsure at all n locations
  Clone ID: MRT4577_184844C.1
ttttcgaaaagaggtcggggccctccaccctcntctcttcatcacctcacgtccgccgtcgcctcccctcatccctccaccggcccggttgaccctctccctggctcgctcgttctgctcctcctccgtacccggcctagtaagtttagcgctcaatttttttcaagggggggcccgccgccccccgagagcagctgcctagccacttgctgcggttcgatatggcgcgccccgcgccggcgagagggctgcgcgccctcgtgctgtttatcgggaggagatagatggggcccggccgccagagcagcgtcgcgatcagggccactgaggtagggctcgcgctgattggcatccccctggccctg

SEQ ID NO: 93044 - DNA, 306 bp, Zea mays
  Clone ID: MRT4577_184845C.1
cattgggtacctcgagggccggcgggatgctctctaatcactggcacgggttgttatcaccgtctggttcgtgttaaggacctaggggagctccaccagtatgcgtctcgagctatagaggaacaacaagtcggcgcgcgatgccttactaggctgcgttggactggagatacttctgagtgacagatgaccactgcctccgtagaccgtccagcacatactgagaggacctctgctaagtatttaatcgatgaaggaaatgatagcgcccgcgccgcagtggaaggagactgccctgctcatgca

SEQ ID NO: 93045 - DNA, 1000 bp, Zea mays
  Clone ID: MRT4577_184846C.1
aatgaggggggagaaaaaaaaacgctgagagacacattgcaaaaagaatcgcttatttcaatggtgtaaactagtgagtggtacaggagttatggggtcaggaaccctcatcctaatagggacaccttgattagtgaggtcaagaataggtttctgggcatccaaatctggaacccagttgatgaattaagaaaatgacatcaggttggatctgtaagggagtatatgagccagtttgaaaaagtaaaggccggactggactgatcttggaaaaccctaatcttactgagaagtttttcttttcctcttttctaagtggtttaaaggaggaagtgaagtatatggtcactgctcaacaccctaccctaatagtgtgaacaaggctttatgaacatgctatgcactatgagttagcacttgagtcagccagtaagaaatctagagtggtacctaggtgcagaattccgaaagagagagcgcggctcacttcaaactaccgctttctttctacttatgagatttgcactagaaagacagaagtggaaagagacagagaggagactagtaaagccaatttcacctaaaaagcggaaaatgacactaacttctactgtgggcaagtcatcatttccagaatggattcagtcgtagaatgctgaagtagagcagtaccaaggttcggttttgggacagacagaaagttggataagaggatcgttcttagccccagctacgagagaataatatgcatcttccgtcatttcattagacgttcttgttggatttgaacgcgcatcggattacttaccttctacaaccttctctctttgaattcatctctcaaaatagaaaagcttctttcttctggattcagtgttcagattagcttccttctgaaagcaagtataccgagcattcattcgatgacatctaggtcctaaatccaaaaccttaaacactagatcaccggcatacctagcgtaaaagaagagttgggccc

SEQ ID NO: 93046 - DNA, 390 bp, Zea mays
  unsure (1)..(390): unsure at all n locations
  Clone ID: MRT4577_184847C.1
cntacncntnntcttacccntngntnncaatctaaatcctcaatccccntaatatcaggancatttaaattgaagagagagtgaanaaanaaatcaanatacttatattatttatncatcctcatatcatacncctttataaagtgatagatacacctgctgatatttatttttttatggaggatattaaatctggagagttgtttgattacattgttgagaagggaagactacattaaaaagaaacccggcgcttttttcaacaaatcatatctggtgtttaatatttccataagaacatggtttctcacctttatttaaaaccaaaaaatcttctttttgattccaaattcaacattaaaaatgcttattttggcttaaataatgtta

SEQ ID NO: 93047 - DNA, 277 bp, Zea mays
  Clone ID: MRT4577_184848C.1
gtttgttcactgtttcaacttcatttctgaattttgtattttgtttgtgtctagacaaacaaattatttttaaaatgaaagctcaattgtctatcgttttgtttgccttcttggctgtttcaatggtgtctgccgacactttgaccgaaaaattgcgtgctttgtaccaagaaaacgctgaatcagttggaaaattggcagaacaaattgaaactttgcgcaaagatgcttccttaagtttgtcagacaaacaaaatcaaattgaacaatcagtcaa

SEQ ID NO: 93048 - DNA, 1018 bp, Zea mays
  Clone ID: MRT4577_184849C.1
aagcagatcagcggacagatcaaatcaggacaggcatgctgaactaggcgaggtggactgggcgagcgagcgagatggagtggacgacggtggagacgagggacggcgcgaagctgagcgtgcggctgttcaagccccccgcgtccggaacggggttggagccggagccgagggaggacgtggcggtggtgctggtgcatccctacaccatcctcggcggcgtgcagggcctgctgcgggggatggcggagggcgtcgcgcggcggggttacaccgccgtcaccttcgacatgcgcggcgcgggccggtccacggggcgggcgtcgctcacgggctccaccgaagtcggggacgtcgtcgccgtctgccgatgggtcgcagagaacatcaagccgcgcggcatcctcctcgtcggatcctcagctggggcaccaattgccggatctgcagttgataaagtggatgaagtgattggttacgttagcatcgggtacccctttggtctgatggcctcagtcctattcggaaggcataatgatgctatactcaagtctgaaaaaccaaagcttttcatcatggggaccaaagatggcttcaccagtgtgaaacaactgcaaaacaagctcaaatctgcagctggacgggctgatacacacttgattgaaggagctgggcacttccaaatggagggccctgcttttgatgcccagatggtagaaattattattaaattcattaattccttgccaaaatagcatttatggtgactgtttgagagtttgcaaaaattctagcgatgagcaaagcttgttatttaaatacagccacgatggtttgtattttctcatcctgcatatgtgtgctctctggtgttattgaaacagtgtaactgtgtgtgttgtatcttaatatattctgatcccgcacctccccaaaaaaaaaaaaaaaaaaaaaaaaaaaaagtactctgcgttgttaccactgctatatttcaaaaaaaaaaaaaaaaaaagctgtg

SEQ ID NO: 93049 - DNA, 319 bp, Zea mays
  Clone ID: MRT4577_18484C.1
cattgggtacctcgaggccggccggggtcgaacacatacctaattatcacctgtaagccagctgaaccacatctcgtcgtgcacatccggagcccgggaacacacacacacattgtcatggccatgcccaagcccgtcctgagcctgctcgtgcacctacacgccgccgtcctgttccttcccgccccggccggcggcgcggtctacaacgtgctgcgctacggcgcgcgccccgacggcgtgaaggacgcgacggggatccttcctccgcgcgcgcgagcccccccgcctctcgcccctcccggtccccccccccccc

SEQ ID NO: 93050 - DNA, 116 bp, Zea mays
  Clone ID: MRT4577_184850C.1
accaaccaaagtcctcacaactgattaactaagcttccttcaaactccaacgggggtataccaaaagagaccacaatcacaatcccaattgcaatagcaaataaacatataactac

SEQ ID NO: 93051 - DNA, 183 bp, Zea mays
  Clone ID: MRT4577_184851C.1
ccggaaggccatggcatcgacgccgcccttgagtcctgcccccaagatgacgatgatccccctcgccggtttcaccgtcctatctgccgccggcctcctgctgcatgttctcctgcttcctgctgcaaactcaaggagcagccagcagcagcgaggaggagcggtacgagccggagcgcatgg

SEQ ID NO: 93052 - DNA, 373 bp, Zea mays
  Clone ID: MRT4577_184852C.1
gttagggtccgggtaacttgaaatttttattgcaccatttttttttttttttgggaagggcccaagctttactttttaaactgggaaaccggcaaatttccatttccggccggggttcttgggggttaaaaaaacagggcccactggtttacttttcctgcaacaacctgggtttttcacacttgcgttcccggaaaaaaaatagcgtgggggggttgacacattacaacacaaaaatgggccccttttccgggggggggcttttaacccccaaccttttttttaatgtccacgacaaccccccccgttggaaaatgggggtctccggggggagggcaaaggggccactctccgtttttttgcccaaaccggg

SEQ ID NO: 93053 - DNA, 275 bp, Zea mays
  Clone ID: MRT4577_184853C.1
agctagcagcttcatgtgtgggtacgtcaccgcggccgtcagtgcataaacaccaacaacacagactcggggtagggcaccagggtcacgggggtcaactggagggggtcaagagttgccgtcgcagatctcgtctgggaaaacatcgaagggagctccagcagcccgcgggccagtaggctgagctgctccaagaacttgaggtcctagcgagatatcccaacaagcttcggccttgggtcgaaccggtccataagatggaaagcatgagtggg

SEQ ID NO: 93054 - DNA, 873 bp, Zea mays
  unsure (1)..(873): unsure at all n locations
  Clone ID: MRT4577_184854C.1
ggtaccctcgcaggcttnccgggacacggtcccgttctgcctggtgcctgcccgctgccttttcttcttccgtcgccacccagcgtgctctctctccctctttctctctctctcgtggcggcgcctgggcagccgtcgctgccgcctgcgctaggtgccaggtcttcttcgggcccttcgccggcgacgagtaccaccaggttgtacatgtgtacacccatgtgctttactgggtcggaccctactcatcctccacactaaggccatctccatagactgcactgtttagactccactgtttagagagtggagatagggagtgagatagagagtggaatagggaggatgctggagatagcctaaggttgccactgagtgtgtgcatgattcagaggcaatgtcatcacaaactggaggtggcaaagagagtgacgccggccctgggcaacacaggcagatgcaaagtttggcaagacaagggtctttatacaaccttaccctcgatgaggtgcagaaccatttgggggagccattgcttagcatgaattttgatgagctcctgaagagcgtgtttcctgatggtgtagattcagatggtgctgtcacaggcaagcctgatcggacctcgagcctgcagcgacaggggagcatcctgatgcctccgcagttgagcaagaagactgttgacgaggtgtggaagggcatccagggtggaccagagaccagtactgtggtggatggtctgcagaggcgagagaggcatccaacacttggggagatgacacttgaggacttcttggtcaagctgggggttgttactgaaggacttgtgaaggattcagctgattttccaagcatatggatacagctggc

SEQ ID NO: 93055 - DNA, 728 bp, Zea mays
  unsure (1)..(728): unsure at all n locations
  Clone ID: MRT4577_184855C.1
gggtacctcgaggccggccggggtctccacgctccacggtcccactcgcaccccccgacgggtcggaacctcagctcagaggatcggaagaacggacgacggcgagatggcaagcggggaagaaggcaagggcgagacggtgctggtcaccggggccagcggcttcatcggttcgaccctcgtccgcggcctcctcggccgcggctacaacgtccgcgccggcgtcctcgaccccgacgacagggcggagacggaccacctcctcgcgctcgccgccggcgccggccgcctcagcttcttccgctgcgacctcctggacggcgccgcgctgctcgacgcggcaagggggtgctcgggcgtcttccacctcgcgtcaccctgcaccgtcgaccccgtcaaggacccccaggtatgtacgtcgtcgtgccgcgcgcagtgcagtatagtagtgacggtaaccagtcgccgccgtctgcccgctcggcgccgcgcgcacacccatgacccacgcacgccgaccctgctccgcnntcgccttcggtgcagaatcagctgatggtgcctggcggtggaagggacgctgaacgtggtgcgcgcggccaggacgccggcggagtggcgncggggtggtcgtgactcgcncatcttccggccgtcgtgcccaaaccccgggtggcccgccgcgcgagggtcgtcgacgagcgttgctggaccgacatcgactactg

SEQ ID NO: 93056 - DNA, 1421 bp, Zea mays
  Clone ID: MRT4577_184856C.1
tgggtacctcgaggccggccgggaaaagtcgagaggcgggtaccaaccgcatccctagtacagatcgagtgtaccgtatcgactccgggtcgccacgctccacggtcccactcgcaccccccgacgggtcggaacctcagctcagaggatcggaagaacggacgacggcgagatggcaagcggggaagaaggcaagggcgagacggtgctggtcaccggggccagcggcttcatcggttcgaccctcgtccgcggcctcctcggccgcggctacaacgtccgcgccggcgtcctcgaccccgacgacagggcggagacggaccacctcctcgcgctcgccgccggcgccggccgcctcagcttcttccgctgcgacctcctggacggcgccgcgctgctcgacgcggcaagggggtgctcgggcgtcttccacctcgcgtcaccctgcaccgtcgaccccgtcaaggacccccagaatcagctgatggtgcctgcggtggaagggacgctgaacgtggtgcgcgcggccaaggacgccggcggagtgcggcgggtggtcgtgacctcgtccatctcggccgtcgtgcccaaccccgggtggcccgccggcgaggtcgtcgacgagcggttgctggaccgacatcgactactgcgagaagaatggggtttggtaccctgcttccaagacgctggcggagaaggcggcgtggaagtttgcagaggagaacgggctggatgtggttgtggttaacccggggactgtgctgggcccgatgattccaccagccatcaacgctagcatggccatgttttgtcgcctccttcaaggctgcacggaggagtacgccgatttcttcctagggccagtgcacgtggaagacgtcgccatggcgcatatcctggtgttcgagagcgcatcggcgtcggggaggcacctgtgcgtccactccatctgccactggagcgacttcgccgccaaagtcgccgagctctaccccgactacaaagtgcccaagttccccatggacacccagcctgggctggtgagacaggaggtggggtccaagaagctcaccgcgctggggcttcagatcacccccatggagaagatcatcagggatgccgtcgagagcctcaagagccgaggccacatctcctgaatcctgatggatggcaggatgggcagtgcttgtgatgcgtgaggccgtacgtcatggaccttgctaagttgctagcgtggcttgtgtaactagttgtaataaataatgatgtcaccagacgacgacgacgaacctgagaaggaaaattgagctaatagctcgattttcagttcttaatcacgaagtttcaggtaccgaactggattggattctttgtcgcagatgaggcctagagacacacgctgaacgttctgatagttg

SEQ ID NO: 93057 - DNA, 290 bp, Zea mays
  Clone ID: MRT4577_184857C.1
taagctcggaattcggctcgagcgacgttctcaccaatttgatactcccccacagccactcagcctcacaggaggggtttatatgaacctcttcgggggataacaaccctcccccacacaaacaatacatccaactagcgaaatacctggaactactaccaccccaacactgagcacgcatcgatcctgctgaccatacacaacatgttggtggtccaatccatcacgcaggagaccatcgcctacatacactcctacagactgatcacctccatctgctggctagccac

SEQ ID NO: 93058 - DNA, 492 bp, Zea mays
  Clone ID: MRT4577_184858C.1
accaaacccaaaatggcatgggtgggaattggttggccgaaagaacagggacccaccaacacaaggcacaacaaggtttaacccggggagggttgggggacccggccatttaaaccggggcccaccaccttttccacccggggcaaatttttttttgcccacgttatttggaaaccggaccgggcaagttcacccgacagttactgtttggttcgtaccggggttctttcggcacacacacacaggggggggcccccgttaccgttgggttcttaaaaggaaaattccgtgttttttttgcatttacgcgcgggggggatttccccggcacggggggacgcctattccctggggcctgggccccccccttttgtgcgcacgggcttatttggtgggctttttggggttcttaagaggaggaatcttcgtcttggggggcggtttttggggaccaggaggggggggggccctcgggtttgccggggggaggtt

SEQ ID NO: 93059 - DNA, 278 bp, Zea mays
  Clone ID: MRT4577_184859C.1
aaaccaaatttaattttatatggacactggtacaataccgcgggggaactacacttataactggattaccagggggttttgaacaacacaggggaatccctactcagagaggggcggactgacgtttaaagatccaaacgaaaccccttttttggaaggggaaggcatccttcatgaccaaaagcgcaccaatagttgcccacgcttttaaaaaaagcccagggccacgccgcagggggcgcaaacaaaccacagggggggagggatcacaacaaacc

SEQ ID NO: 93060 - DNA, 307 bp, Zea mays
  Clone ID: MRT4577_18485C.1
gcgaccacgcgtacgcccacgcgtgcgcggacgcgtgggaatctcgaggcgtgaccgcacatgcgtgatgcctccaccacccaagtcctccacccatccgccgacggtggaatagggtaacaaaaaaaagccgtcgaggacggcaccttatccaagctcacgcaggatgcgcatcaacgagctccgactcgccctccaggcgggattcgaccccgccaggtgcggctctagctcctagatttttacttcctgtgatgaactggtgtcattgagcaaatgtgtctgcactttcgggtggaagaataac

SEQ ID NO: 93061 - DNA, 108 bp, Zea mays
  Clone ID: MRT4577_184860C.1
ccgacaactaggccatggatccggattccgcgccattcagctggactcacgggcgccaggctcagctttgattaaagctgatgactgggggattcgccgattctctcc

SEQ ID NO: 93062 - DNA, 397 bp, Zea mays
  Clone ID: MRT4577_184861C.1
ggttatctaatattcagagaaatagatgttacagacggttagattatttggagtacttgcaatttatagcattatctttgacaatgttttcgtttcagactttgtcagtttcaggacatctagacttggcacattgaataataggctactgtgccaaacctcaatcgccgtggaatcctcaagatccaatcagcaacaacaagtttcctgcggcaatcaacagatgtgtgcaagagggcctaagataatcaccgttagttgcatggaactaacagtgccatgaagggtgtcaaatatagcagctcttgcaacccattcgtctaactttggctctcgggcaatcttggaaatcctaaaaccgcatggagtagatacagtcatcggctagcaccctagc

SEQ ID NO: 93063 - DNA, 143 bp, Zea mays
  unsure (1)..(143): unsure at all n locations
  Clone ID: MRT4577_184862C.1
taggaaatttgtatccatgnggcaagtacagtccagagagggaacggcggacaaacagagaacactactagctgcagaggagctagaaatggcgatccaatgcanttcgaagcaggaaaaatgcttatcancattgctgaact

SEQ ID NO: 93064 - DNA, 316 bp, Zea mays
  Clone ID: MRT4577_184863C.1
ctgtgatgcccgtcatagctcgtattcgctcgaggtacatggtgaacggaagatgcgacgcttctggcagtggcaggcaggcatgcagcgcatgcgttcctgcgaccgcctgagagatggatgcctgccatgcatgggccatggttgcctcccgctgttcacttgagccactgctcgcagtcacagcatgagcagcgtcagcaacagccagcctcgatgggagtcatcagggacaggactggtcactagtcacggggggacaagaagggtcagagtacacctacagacaaaagaaatcgatcagtataaaccaatc

SEQ ID NO: 93065 - DNA, 201 bp, Zea mays
  Clone ID: MRT4577_184864C.1
tttcttacacgggcttgctcttcctggcagggggtcatagggagcgacgcattcagtgagacacaaaggatgatgctgaatgcagcacaatgtaacaataccagtgacaccatccatgatgtggagggcatcctatgaatacggctcgcttcctagatcacccttaataccatgccctatttcctgcgatacgtgcaccat

SEQ ID NO: 93066 - DNA, 780 bp, Zea mays
  unsure (1)..(780): unsure at all n locations
  Clone ID: MRT4577_184865C.1
ccggccgggacatctacgacgtgcttgcttctctcctccgaaatgctatcgccttctcacaagcaagtgaacgtttttcaccccatctcttctacttcttcctcacatgctttcgataagtctacaaagagaggatacctgatctaacactacactaaccgacctctgatatgtctacgaccgacagatgtcttcaacctccgagtactatgaatcacttccacctataaacagaagcatagtggggacattcgtgtttctttaccaccgacgctaactcaactccagattttgcacccattatttctttacttaaattaccccttgtcgttctagaagtttgaggctagcttctatttctgatttcccttacgccacgtttggattattgcaattgaattccattctaataatagtaatttaagcatatatctattaagctaattcaattttatgcaaaatatatcggtatattattattagcaagatgtcggagatatttatgtgctatatttttactgtagatgagtgaatcgaggagcgtcctgtaagttacaaagtagatacaaattctactaatacataaaatcatttctcatcctccactccatgaatttgagatagacttatatctgaactttggaaagtagtggaatgtcaaattccaagctaaataggttattttataagcaaattccaattcctataaaatgtanggatccaaacgccccgttatcctaattgcatcacatcgatacagtttaacattattattgcttt

SEQ ID NO: 93067 - DNA, 269 bp, Zea mays
  Clone ID: MRT4577_184866C.1
ggtgatgaatggctttcaaaaccgtaagcccatgaaggggaaagtgttccaggaacctctggttcatgaggtccccagatctgtggattggagagagaaaggctacgtgactcctgtgaagaatcagggtcagtgtggttcttgttgggcttttagtgctactggtgctcttgaaggacagatgctctagaaaactgggaggcttatctcactgagtgagcagaatctggtagactgctctgggcctcaaggcaatgaaggctgcaatg

SEQ ID NO: 93068 - DNA, 854 bp, Zea mays
  Clone ID: MRT4577_184867C.1
gccattcatcatcagagctagctagctcagagaagagaagagctgttgcgtagcgcgcgcgcgcgctgtgacgacgactgtgagtagcgagagagtgagtgagtggtgactatttcaagaacatcagctcggccgtttcttcgaccccgcgcccttttttggaactaactgaaccatgagaggcacgctggagtacctgtcggacctgctgggcggcggaagcagcagcagccggcgccggtacaacaggaggaggacgcagttccagacggtggagctcaaggtgcgcatggactgcgacggctgcgagatgaaggtcaggaacgccctctcccgcatgaaaggggtgcattccgtggagatcgaccggaagcagtccaaggtgacggtgcaggggtacgtggagcctcacaaggtggtcaagcgggtgcaggccacggggaagaaggcggccgagatctggccctacgtgccctacagcctcgtcgcgcacccttacgccgcgccggcctacgacaggaaggcgccgccgggctacgtgcgcagggtcgacgccgtcatgcccgtctccagctacggcggacccacggcggccggcccgcaggaggagcggctcgtcaacatgttcagcgacgacaaccccaacgcatgctccatcatgtgaatttgagttactactgtgtcaaatagctatagacacagaccgaccacgggtgcagctctcttcgatcacagaacaaatatatgcatgatcgcctcggttggattggatgtttatatccatgacagaatgtgcatgtacgtacgtagctgtatgttgttgtatgctttgtatattattgtttgatggaacc

SEQ ID NO: 93069 - DNA, 453 bp, Zea mays
  Clone ID: MRT4577_184868C.1
aaaaagcctggaacgggaatttcagttctcaaagcactatcaggaatctcaaaacacaccaggggaaacacgaataacgccgaggccccctggggttaacaaaaccccccctaaaccgctaaattaaactgggagcgccacatgaaaaactaaaaccccccctcaaatcacccccatttttttcaaaccccaaggaaccgccccagggggaggccaccatgaccggggggggggggccccaccaccccgatcagagagaccttggggaggcgcccccaatcaaggaccttgaccaccttggagggggagcccttgcgggggcccacctttttgatggccttgaccacatccatgccctcgacgacctggacgaaaacaaagtgcttgccgttgagcccaggggtcgccacggggcaaataaaaaactgggagcccttggtgttgggccccgcc

SEQ ID NO: 93070 - DNA, 565 bp, Zea mays
  unsure (1)..(565): unsure at all n locations
  Clone ID: MRT4577_184869C.1
gccaaccagcaaataaaaagttacatttccagattctaatgtgaaaaaaaaaaaaaaaaaaaaaaaaaaaaaaaaaaaaaaaaaaaaaaaaaaaaaaaaaaaaaaaaaaaaaaaaaaaaaaaaaaaaaaaaaaaaaaaaattaaaaaaaaaaaaaaaaaaaaaaaaaaaaaaaaagttttttcctttccccgggagggccttttaaaaaggggcaaattttggaaaatttacaaaaaaattggggggccgtttgaaccttttttttaaaggggcccaaattcccccttaaaaaaaggnggtttaaaaaaaaatgggcccgggttttaaaaaagtgggaatggaaaaaaccttgggtttcccaaattaaatccttttgaaaaaaaccccctttttccaagttgggaaaaaaaaaaaaagcccccacccaaacccctttccaaaaatttgccaaccttaaagggaaaaggaaccccccttttaggggccattaaaccccggggggtggggggtttaccccaagtggaacctttaaatttgcaagcccttaagcccccttttttttgg

SEQ ID NO: 93071 - DNA, 383 bp, Zea mays
  Clone ID: MRT4577_18486C.1
tttttgtgttttttatttgtatctcaccataagaaaacaaccggaggctgatttgcgtgaggaaacatgccgggaattgtcttaatacatctacataccacccacaccttaatgcttgaaaaagcgaacctaagaagctggaccaccatcatccttacatagacgatacttgcccctcctcaaataacatttattggtgtgagcatcgggttattatgtaccgacaacttctgagccaccggtagatacgaacggtctacacatggcggtggggatacatccggcagagcatgggtagcgccccatattgggatttcacctttcaatagcgtacccgtgaaaagaggtgacctgaggggtatgttacccgattacaaacaccg

SEQ ID NO: 93072 - DNA, 789 bp, Zea mays
  Clone ID: MRT4577_184870C.1
acttcggcacgagtgcggcggaggtgggcgtccgtccttcccgttcaccagagccccctgcttcgcttccacccaccggccaccaccccgcagtctctcaaaactaaagtggtattttcttcaaggtcttgaaagacaaaaggaaaaaaaatccctttcacgatatacttctggcaacaaggacttactcttactgtgttgagtcagagtactgtgttaagcaggagtggtacctggtggtttttttgtttttcaaaaagaagacagaaatgtcttcctcgaggcctgcccactcttcaagttcatccagcaggactcgccagagctcccgggcaaggatattagcacaaacaacccttgatgctgaactcaatgcagagtacgaagaatctggtgattcctttgattactccaagttggttgaagcacagcggagcactccacctgagcagcaagggcgatcgggaaaggtcatagcctacttgcagcatattcaaagagggaagcttatccaaccatttggttgcctgttggcccttgacgagaagagcttcagggtcattgcattcagtgagaatgcacctgaaatgcttacaacggtcagccatgctgtgccaaacgttgatgatcccccgaagctaggaattggtaccaatgtgcgctcccttttcactgaccctggtgctacagcactgcagaaggcacttggatttgctgatgttttctttgctgaatcctatcctgggtcagtgcagacctcaggcaagccattctatgccattgttcaca

SEQ ID NO: 93073 - DNA, 201 bp, Zea mays
  Clone ID: MRT4577_184871C.1
cgtctccagttcttccaacttgtttgaatttacacatattgaatgaagacacagaatgttcaagaggccaccctcttcagctctgactttatcaatgagccaaaagccttcaacaagcccctgcgttcccccttcaagatggtcaagattgaaggattggaactgtcctgtggacggttagactgggtcattaacctgtta

SEQ ID NO: 93074 - DNA, 242 bp, Zea mays
  unsure (1)..(242): unsure at all n locations
  Clone ID: MRT4577_184872C.1
acgaagagacccaccgagtgcttgcgcgcgtgcagattcataattaggtcataaacctgcaaagatgaatcgngtgcgtacacttagatggaatctgttctctcgtccaagtatatcaacgctgcaaggtggtttaatcacattgatacgctcgcgaggctgaacagaattactgcagagggccaaggtgtgaaggttgaatcctaagcagttccttaagccccaactccagatgttgctga

SEQ ID NO: 93075 - DNA, 352 bp, Zea mays
  Clone ID: MRT4577_184873C.1
aatgcccacgcgtgcgcaccaaggcgagtgcgcgcggtagcaacaatgggctcatacatggcccacacggagagcacattcctggggacccacctggaggaccctgcgccacacaacggctgcatagcgaccgaactggtttaccatttggggaacaaggtgaccaacgagcccaagaaggtgacgaaaacatagaccttctctgacgtgaccctgtaggtcatcagcacaggggtgcccgagtacatgcaccggtcgctgaatcgggaagtacgggtagtccccggtctgcgtactgaagaccgtggagtacctgccggacgaggacaacttcgtgaaccagaagctgccc

SEQ ID NO: 93076 - DNA, 709 bp, Zea mays
  Clone ID: MRT4577_184874C.1
gtgcgctcgaggccggccgagacgaactttgtctactaacccgacaacccgcccattccacagcaaaaatgaccaaggtccagtcaatggtcgcgagctctcgccgcaaatcgcgaaaggcgcacttcagtgcgccgagtagtgtgcgtcgggtcatcatgagcgcgcctttgagtaaggagctccgcgagaagcacggagtgcgcagcattcccattcgcaaggatgacgagatcaccgttgtccgcggttccaacaagggccgtgagggcaaggtctcctccgtctaccgcctcaagtactgcatccacgtcaacggcatcgtccgcgagaagagcaacggccagtcggtccccatccccatcgctccctccaaggtcgtcatcaccaagctcaagctcgacaaggaccgcgagtctatcctagagcgcaagagcgccggtcgcgaggagaagaagaagcagagggaggcttaagcgtctcgctttttgtttctttgtttgacgacacaccacggcttcgaggcacatgggcatgggctgtcccaccgcctctgagtggatgaaatgcatatcatgggttcacggtctgggcatgcgatgtgcgcatggaaaagcagggcgttttaccggctactagctccaacaatggacttgccgccatgcggccccgtcaagaaaaaaaaaaaaaaaaaagcggccctcgagct

SEQ ID NO: 93077 - DNA, 422 bp, Zea mays
  Clone ID: MRT4577_184875C.1
ttacggccacacgtatggccacgcgtacgaccttgccattcttacagacgctgtgctgtacatagaatgacagagctagctcttataagctttgcttcatggtcgccagacgggtggagcatcttctgaagatattattttcgggatacaagatcaccatcagcgtgtgggccaaataggagttcttcgaaggaagcaacggtccgcatgatatacactcgaaacctatgtgccagtcctgtgcttagctctacacaaaactttgcattagccctaccaaatattatggtagcaacatatatttggcacacaaatcattcagtgatcacttttctagtaaataaagttgagtcactttttcctatagcaaacccattcttaattaaaaaatctttaagacagtcataccaagctctaggggc

SEQ ID NO: 93078 - DNA, 284 bp, Zea mays
  unsure (1)..(284): unsure at all n locations
  Clone ID: MRT4577_184876C.1
ccacaactattcttctttctatcttctaccccccactaaaatcatacacatcttgtggctcccnaancaataccctnccnggcccacttaccaatcccagcaagcttaccaagtgttactacgacggctccacaacctcccaccccccctgatatgacacacaggtcatcctgtacccacaagccatcttcaacgacccattcaggacgggcaacaacatacttgtcatctactattgctacaccccaactgactatccaattcccaccaacaaaaatttcatc

SEQ ID NO: 93079 - DNA, 279 bp, Zea mays
  Clone ID: MRT4577_184877C.1
agcagcctgacctgagggtatgtaggaagttggagaaggccagggggaatgtgaactctgtttgctttggtttctcatacctgcaaatgctaaatttgagaagaagccacacggcatgttggaaatttggttaattctggttggttttcttcattcaagaaagctcgtgattcttcactgcaaaatgtttgcattagaaatggggtcatgctctttaaaggggggagaaggacagaggccccatgtcagcccagggttttactggtgatcagttcaagt

SEQ ID NO: 93080 - DNA, 647 bp, Zea mays
  Clone ID: MRT4577_184878C.1
attcatcacatacattggagataaattctacatacgtacttgagtagaagatcaataatgcaaacttctaacacatgagaaaatgtaattaattttatgcaacagacatggagtcatttcaaactggtctatcaagcaaatcgaagccttgcaacaagtttttcaggttataatcttaacctatcagaaataacatcagaatgttaacctgtatctttttcacttctcttacagcaaatcaattccattgtataagccaaagatatatggaatacttgaattataacagtaaatcatgatacgtgagctgctctgtttcaatacatcccactagttgagcttgcttttttcctctggtacttaagatgttagatgagtacgatacatatcaaagttcaatccactcttgcacagggtatgattaaatgaaaaatcctttttagtgatggaagtatttgtcagagtagattcaaatttcattttattatatggtattatgctttcttcatattggtattgttacttcaacatgcctgaatatatggtttagatgtttgggtatttcatctcatttattaaaagatcattcctgcatacttaaaatcgttagataagccttcataaataatacatgtctgctttgaatg

SEQ ID NO: 93081 - DNA, 248 bp, Zea mays
  Clone ID: MRT4577_184879C.1
attcaaaagtttgagcggatgtgcacgcttatatgtaaatggaattacagattgccacaacattgattggtcttatttcataatcatgaggcggacgtggtctacccaagaagaagaggctgttggtgcgtccgcacgtcgctaacattggcctccgcgtcacaacgggcacggcgaaccgttatcccgttcctgcgcgccagaacggacgacgtatacagtatagcaggggcgtgctgttgcaccac

SEQ ID NO: 93082 - DNA, 351 bp, Zea mays
  Clone ID: MRT4577_18487C.1
ccgttaaccaaaaatagatgccgcattatttttttcttgctccaaccgatccctcgtcggtctcccaaaaacttcgggtgcccgcatcgagctgctcccctccctcatattttggtgtgagtaatctttccccaatccgagctcccgttcgttctcccgcgtttttttggtaccgcacgtcgcttttgtggatgttgcgcgaagcgacggtggtgagaaagccatacactacgttcgaggatgaggcgctgggagattcaacccgcagaatcagtcgctccaaatgttcagcgcgtatcatgacggaaccgccataccttgcgagaagttgtctccatcggtgacaggctc

SEQ ID NO: 93083 - DNA, 176 bp, Zea mays
  Clone ID: MRT4577_184880C.1
cgggacgtcgtgggcgcccacccaacacacatgcaaatacctggaattatttggcacttggggcttttaccaaatatttatttcaaccctggtattattcaaaagccttatgggtggcactttggtagacatttaaattccaggtcttggaatgagggggtgccaaatgggttggg

SEQ ID NO: 93084 - DNA, 1081 bp, Zea mays
  Clone ID: MRT4577_184881C.1
ccggccgggaggtcgatcggccagagcaactgagcgtgagagaccccccataccttctagtctagcatggctgaacctcaccacacaagcagcaacggagctgctcacggtgatgctgatgatgcgtcggagaaaatgccgcccaagaggctacagagatatgattcactgcacatggaggctggaatgttccctgctggtggatcgacgcatgcagccaaggttggctgggcgaccacactgcacctagcattccagagcataggtgtggtctacggagacatggggacttctccgctctatgttttctccagcaccttcacaaacgggatcaacaacacagatgacctcctcggagtcatgtctctcattatctacactgtgattctccttccgttgataaaatattgttttattgtcctgcgagctaatgataacggtgatggaggaacgtttgcactttattcattgatatcacggtatgctagggttagcttgatacctaatcagcgggctgaagatgcgatggtatctcactacaagttagagtctcccacatatcccatgaagagggctcattggatcaagaagaagatggaaagcagtccaaaatttaaggtcttgctttttctagtgacagtcctggcaacatccatggtgattggtgatggtgtactaactccatctatgtcagtacttagcgctgtcggggggatccaacaaagagcaacgaacctgactcaaggacaaattgttggcatctcaatagccattttgatcgtcctctttcttgttcagtgctttggcacagacaaagttggttacacatttgcacctataatcttggcatggttcctcctgattgcgggtattggagtttataatttgatcaaacatgatgttagtgtcctgaaagcattcaatccaaaatatatcgtggactatttcaaaaggaatggaaagcagggctggatttctcttggaggagttattttatgcatcacaggaactgaggcaatgtttgcggaccttggtcacttcaatgggagagctattcagattggcttttcagtagttcttt

SEQ ID NO: 93085 - DNA, 347 bp, Zea mays
  Clone ID: MRT4577_184882C.1
atcttatattacccctgcagacaatttcctcaccatttcaatgtacatagccgccagaggagattcacatcgagcaggaaaacagtatctagacgatcattacttacatatatactgaagaccaattaatacacgaattcgcaccctttaaacacgcactacttgtccacattcctgctcattcaccaacacatatgtacgaacaatataccccaattcatatttgcatgtgctagtaaacacctaaacacatacacaatcacaacactcatgctaatatagcaggtgatattattaatgcttcatcttactctgatcatttgacactacatgctcttgaaactact

SEQ ID NO: 93086 - DNA, 360 bp, Zea mays
  unsure (1)..(360): unsure at all n locations
  Clone ID: MRT4577_184883C.1
ttgtttttttttttactttagattttccaagcttttttattttgtgnttgcgacgacaaaaattttgtgtagtgtgacctatatttttttactggccgtctttttacaacgttgtgactgggtaaacccaaacgggggcaacccccccgccgtggaaacatggggggggggaaaaaaaacccgttttttttggggtggggggcgcccacaaaaaaaaacaggggggggggctggaagaaaaacggcacacactttgtggcggcgcaccaaacacgtgaaaaaaggggggtacgcgctgttttacctccacaaaaaaaaaccccctacctcttttttttttaaaggggggcccaggggggc

SEQ ID NO: 93087 - DNA, 701 bp, Zea mays
  Clone ID: MRT4577_184884C.1
gggtacctcgaggccggccgggaatctatttgatgaatctcgatgcctcttgctttatgctcacgatgcccggccgaatcacttcgtcaccaccgccaccttctttactgtgaagacgcattttgcgcacctcgctgaaccctggtgagtctgcccttgatgtatgatctctatggtgtcttcccaactgatgatgacctcaacacagctatgactccgaacagattacctgaggacgcccttgccaacatcagctaccataaagaggcgctcgcacacggcctctggaagcttaaaaaggtgacctcggaggtacatcgctacctctaacgccaagcggagaagatatacaagaccctatatcacctggagggtttcctcaggcattatgcatgctcgcgaccacgacatgcctcatcgacacgaatctgctccacaatgaagactatacgttcgacatgcaatcaaccgtcgccgatgatatccctacgccagcccctctaggagctgattgaggacttcacccttgtcgacaatgctcgatgcactcttcgggaacaacttgcgatacgccacactcatgctgcaactggggtatgagcttcatgttggaatgcataatgatcatatatgttttgtttcgccgccactggtacaagctacaatcttggcgcgactgcttagctctataattccgacga

SEQ ID NO: 93088 - DNA, 231 bp, Zea mays
  Clone ID: MRT4577_184885C.1
acttctactaatcaacaagggacggctacttataaagtgggctgagacaagcatcctattcacatcattacttcattaacacctgaaacctcaaactacgtagatctaaatgatcaattacatgcacactcacctattcgtcatgatctattacatactaatcatactaactaatacccacctgttccacactacatttatcctctcaatgagcatactttaatacaccat

SEQ ID NO: 93089 - DNA, 550 bp, Zea mays
  Clone ID: MRT4577_184886C.1
tcgtaaaaaaaaaaaaaaaaaaaaaaaaaaaaaaaaaaaaaaaaaaaaaaaaaaaaaaaaaagaaaaaaaataaaagaaacaaaaataaaaaaaaaaaaaaaaaaaaaaaataaagataatataatagaaataacattaatcgaatttactagaccgtcgttgtttcggcataaccctgtggtaaaccctttgggttgcctagcttaatatccttgtttcacctcctcttttagtcagctggcgttttggccaaaaggcccttaccgttcgttcttcccactatttggccaatgtgactggccatggggaggcgccttgaagcggggctttaagcccgttgcttttggtggttccgctcaggttgaccgcgtcatttgcccccttcctttcgctcgcttcttttgctttcttgccttgttttctggcctttttcgccggtttttccagcgagggtttaatttggggtttccttttagggttccactttactgctttccggaacctcttgcttaaagagatggtttaggtagggggtcctcgtattgggcc

SEQ ID NO: 93090 - DNA, 245 bp, Zea mays
  Clone ID: MRT4577_184887C.1
ctgacgcctttactctgtctatctctacgctttattccttgaaatccactcatgtatccagggtactttattacataccgtggagacattaaccatgtttattcatctctctacatgctcgtatagattttcgaaatataaaaccacttcttaattccattcactacaccaccatcttttactacctcaaacttttccacatctctatcactactaccacctttatattcaactttcatactgtc

SEQ ID NO: 93091 - DNA, 282 bp, Zea mays
  Clone ID: MRT4577_184888C.1
gggataaaaaacatccatccacctttgatttttgcttggaaactgaattttggacacaggggttttaaatcctttaggctaccaacacaggacacattaatggcggggaaccgtaaattacagggcacattcggttttttttttacatccgaaataatttagtagggcacttttagcaatcagtttaagtttttccccccaaaaaaattaagggttaaatggcgtgcttttaaacaaacaaggggggccatactcgtccttacatggaggccttattttttc

SEQ ID NO: 93092 - DNA, 174 bp, Zea mays
  Clone ID: MRT4577_184889C.1
aactatgtgcctgagaatcgggatgtaacatggtgcatgctcacgcatgtcttacaccatgcggatttgacagatcgacagaatgccaatcctgctgagtcggtggcacagtatgaccgttctgcaggagtccgtgaccccaacggccttcttttcatgttcggaatggcgctc

SEQ ID NO: 93093 - DNA, 293 bp, Zea mays
  Clone ID: MRT4577_18488C.1
ctcctcactctagcctccgcctcttcccctgcgccccgagccaatatgaatggggaatgggtcaagaagatggcaggtgctgtgcgcactgtggggaagggtagcatgcgcatgatgaatatggctgttcacatgactacgaccacagatgattaaaggctttagagcaccctgtattgaatttgagtgatcaccattcctgatattgtagaggtcaacatttttaaggatgattttattattcagtttgtgaatcctaaagtgtccagttttaatttgtgctaatacatgtg

SEQ ID NO: 93094 - DNA, 607 bp, Zea mays
  unsure (1)..(607): unsure at all n locations
  Clone ID: MRT4577_184890C.1
ctcgaggccggccgggaaccttcatcaccaatcaactctcaaactccaaccaactacaactaccacttccaaacctccaaccaaccaacaatcaacatgtctgactccatgcgcaagggcctcggcgagcaagcctccgagaagatcacccccgactcccagaagtccaccaccgagaaggccagcgagagcctcaccggagctggtgaccgcattgccggcgccgtccagcctgagggccagaagtccaccggacagaagcttggtgacgcaacccgctccggcggcgacgatgcgtccaaccagggccagggcgtcatgaagcaagcccaggacatggcctccaacgctggccagagcatctccgacaccctctccggcgccactggccagaagaagtaaagcactcctcttcttgttcgcctggtagccacgatgccttcttcctcctctctattgtatggcatgaagacctgagaatggaccaacatggtattgcgatggatggaacgaaacatacncctttcggcgtgaaagccgcgtatctatataccctaccaatgaataaaataatgacttgaacaaaaaaaaaaaaaaaaaagcggcc

SEQ ID NO: 93095 - DNA, 508 bp, Zea mays
  Clone ID: MRT4577_184891C.1
gcgtcgtgcctagctgatcatggtggagcacctagtatctgacctgctcaatcatcagcgtagagtggcggaaggtgaatgtgtctcttgatgagctggttgcaacggacatggcgacgtggggtgctcatgtgcccttgctgctgctgcacctgggcgtgctgaagtcctgctccttggcggcggtcagactagcaccatgagctggacatcacgcggcgcgacgggcggggcaaggtccttgacaacgggcggctgctgacgctggcgctggaccgcacgtgcggctccatgttccagaaccggcacgagtacctgttcggaaagatcgacatgcacgctgctgcatggctgcgcgcgcaatctacgccgggcacgcgacaccgcgctactacgctgcacgtgcgcagcgggcgagcgcgcacgatcgcagatcggactcgcgagttacctggcacaacgcagcaccgatcgagctcctacacgcatgctacaccaaccatgcgtc

SEQ ID NO: 93096 - DNA, 396 bp, Zea mays
  Clone ID: MRT4577_184892C.1
ttgtggacgcgtgggcggggctcggatccggcgagtaggagcggaggggccgagatctatgcgcggagggggaggaggaccggtctgaggaggaggaggagggaagtttaccatgagagcatatggtgaggactttgactttgctcagatacttgcgtttaagtggagcatataggtcatccctgctatcacaagctcggttattaacgtgtgaagataagatggcaggaatttagagtgtgaaactagcggataccaataaatgcagtgcagtctttggaaagctgaacttatagatctgaaaggacctgccagggaataccccttactaaaggtgctaatgggcaatgtaaaagatgattgccaagtactcgtgctcttttcataaaggagtac

SEQ ID NO: 93097 - DNA, 788 bp, Zea mays
  Clone ID: MRT4577_184893C.1
caattccaggtgttactcatctgcttcattatctgcacttttagctatggcctgacaggtgtcattggatacttgatgtttgggaaatcattaagctcccaggtgactctgaaccttccagctaaccattttgcctccaacattgcgatctacacgacgttgatcaatccgtttaccaagttcgcgctgctgatcactccaatagcagaggctatcgaagataaacttcatgtggacaagaataagaccgtcagtatcttaatccggactgcgctggttgtcagcacaaccattgtggcccttgccgtgcccttctttgcctatgttgtcgctcttactggttcgtttctcagcagcacggtcacaattttgctaccatgtgtttgctaccgggaattcagctcacggacctccaggaatctgaggttggagctggtagtttgcttgggtattatcatgattggggtgggattagttttggtcggcacgtatagctcactgaaaaagattgttcatagcttttgatttctgaatgatatatgcaccttgaggccttagttcgtttcatcctttattaaaccatgaagactgaaggggatgattgatgaacaaggcctgagtgggtgtaatgtaaggcagaagaaaccctaggcagatactgtagcaaatgaatcgtagacaagccgatcttgcgatctagaataagtcgcttactgagaagtcaaactcgtgtaaatttaatcaaatatatgtaaaaaattactaaaaaaaaaaaaaaaaaaaaaaaa

SEQ ID NO: 93098 - DNA, 373 bp, Zea mays
  Clone ID: MRT4577_184894C.1
gaaactactgagtttcaggaaaaatgctagctactctgcagttaacgtgctttggacttgcagttatcatagttttgggagagtcagtattgtttaacaaatgcaagtgagaactagaagggttaataaagttgctccttagagtggtgtcaaaccagaacccagacacttaaaaagtacttcattttttgaatggaaaatattggagaaaagtatgggagatgcaggtagcatgtgagtaaatactacggtctagccttcgagcatcccaaattctgggggtaacttgacagtgctgtgctctcctttgtcatttatatctggcttaagaatggaatagtaataacaagatgccagtgatttggaattgttt

SEQ ID NO: 93099 - DNA, 277 bp, Zea mays
  Clone ID: MRT4577_184895C.1
acaacataaggcctgtccttctcggctgcagaccgcgacgcgcactacctgtggggactagctgccagccgcgctggcggtttatgagctgcaggagaagaagctcatgctcaatctgtggtagtaccagcggctcgttgcaccagtacatacgccttgatggacctgcaagagcgtaatgagaggctcttatactagcttctcatcagcaacgtcagaagagctggctcccgtcgtctacttgcccacagttggggagggctgtccgaagaacagc

SEQ ID NO: 93100 - DNA, 302 bp, Zea mays
  Clone ID: MRT4577_184896C.1
ctctgagggccacgggcttgggtagtggttagggtgtttgggaaattgttaaatcagttacccgtagtagagctattttttgtacttctaagttttctagaagtggaaggattgtagtcatcctgaaaatgggtttacttcaaaatccctcagccttgttcttcacgactgtctatactgagagtgtcatgtttccacaaagggctgacacctgagcctggattttcactcatccctgagaagccctttccagtagggtgggcaattcccaacttccttgccactaagttcccaggctttct

SEQ ID NO: 93101 - DNA, 321 bp, Zea mays
  Clone ID: MRT4577_184897C.1
cccacgcgtccgcccacgcgtccgcccactcgtccgcccactcgtactcccactcggtgggatcctcatcagacattacaccaattgatcaccaaaatatatcgctttaataccaactactcatgtcattgtactgtcggcaacaaatctagctgatgtttctgatcctgcccttaatcgcactggcagatttgaccgtctcgttatgctttaagctcctgataggtttggaaaagaatcaattctaaaaattcatgtcaaaagaagatagcttccactgaataaacatgtacatctaatcaatatagctgcaatgacaac

SEQ ID NO: 93102 - DNA, 534 bp, Zea mays
  Clone ID: MRT4577_184898C.1
acgtaaaactgatgatctagctgatgagacatcccactcgccgtgcgtccttgaagagcgagcagcaatggcgcatgagatctagcacacccacctccccatctcgcgtgcctcaacctccacgtcgcacaagtaggcacaggtgaactgggcacggtggtgttcctgcacggcttcccggagatatgggactcgtggcgccaccagatgtcggaccgcggccgcgacgtggaaccgcgccttcgcgacggcactgccgcgctaaccggctgtcttaccacgcgtctcagcttagacaagcatctcctgacgacactcgtcgccgattcagtctgctactagcccccgtttttttgactacaccgcgcccgccggtcgccccccgccggctagctatgtagctagctcctgcgtgagttaataactagtgccatgcgtcctctctgtcgttcggttttgcttcgggccaccgggtaccctttgcttgcttggcttcctcgtcccctttttccttttttttttcctcttttcccc

SEQ ID NO: 93103 - DNA, 359 bp, Zea mays
  Clone ID: MRT4577_184899C.1
gtcgtgctgctcatcttcgtatttatacaagtaccgaacccagggatgagcatgggcgacttcgatgatgatcacttccaatcctagggcgacgcagttagggcgcaagacctaccctcagcatgttggaaccgttcataagaacctgttcattatgattatgaaccagctctgcaacgtcgaggaggaatatacctgaaagagtgctgacgcatcgacatcgctattgtgcagtttcgtgccttataacgtctggaggggaaacttcttgacgatgtatgttctttatagcataactgtgatgttgcgaatgttaaccgtactgagcaccacgtgctagatctatctcaggatggata

SEQ ID NO: 93104 - DNA, 304 bp, Zea mays
  Clone ID: MRT4577_18489C.1
gccactcgttcggagacgcgtcaggctgaatgcaaaaggggacaatctctgagcacggggtcagatcgacctactttccttcacccgttaccacgtacgtactaaaggatacactcgtctgcttcaagctgggatagtgcggatattcgatcgcagttgtcatcaccatttgtccaactacttagagacaaactgagacctggggccccaataccagagacgaagcaaagactgggacgaccaattccggagctgtatacaggagagccaacacaggaagccttagcccggctctacatgaaga

SEQ ID NO: 93105 - DNA, 280 bp, Zea mays
  Clone ID: MRT4577_1848C.1
gacaacctggtgaagacggtgaacaacacgggcgaggagggaccacccaagcaacctctgcctggccggagacagattacacaccgtgagacaagccaaggggagcgtggacgccaagcctgcgagtgccaaccaggtgtcgaggggcgacaacctggcgatggacacgcgaggcgtcatatggatgaatagcaggcccgctgacgcgctggagccggccaggcaggacgagctggagtacatggccaccaaacggcgagaacaaggtgccggagccgta

SEQ ID NO: 93106 - DNA, 555 bp, Zea mays
  Clone ID: MRT4577_184900C.1
ccgggcccgatcgtcttctctgtgatcgtctcctctgactgaattgagacagctggccgtggccgtgatccgatccatgtgcgcagcgtgctatgcggattctatcgccgtctcctccccttctgcgctattttccagtcgccgggatcagacgagttggatctccaggtataaagagttgcgggcgcccggagaggatactatggctgcggtgctcgccgcatacgctacccttcgagccgccgatgccatcgcctgcggagactcctccttcccctgttctcatcgtctcaagcatggttttaatatgagaaattttacaagtagcaattatcattatcctttgcgttgcttccgcacaagcacgtctctctcggcatcggtcctcacctctcacatttcggttgttggtctgcatgtgctcgatccgagtgttactttggctatgcgtgttctctccttgcctgagatcgttgcctggattctacctgcctatcgcaaggagactaggcggttcttatctactgacacataggatgtatctcaatcactcta

SEQ ID NO: 93107 - DNA, 696 bp, Zea mays
  Clone ID: MRT4577_184901C.1
ttttttttttttttttcgagacaataacccaagtgggttttatagtttttcctaatacattaacaatccagaataccttccaactcgtagataccaacaaaagaagcaacgtatgtgcgcaacaaaggcctgatatacccagactgctccatacctgaagaaacgagaaaccctctaaaatgcagtcatgaattcttgacgccacgcaggaaccaaagattaaattggtgcgcggcctcgcttacagagcgaaagcggccatgacgagaccagcaacaacggcaatgggagcgccgaagcgggcagcaccagagacggggacgggagtaggggtgggctggccgtagacaggaggctgagcagcgggctgagtaggaacaacaggaggctgagcagggtgggtgtagacgggagggttgggagcagtgccgttgttggcagggggagcaggaggagcagggtagtgggtcttgacaacggggacgaaggtggtgggagagccagcagtgttgttgcaagggacggtgacggtctcggaaacagcaacgacggtggtctcagggacggggtaagcggccttggtggtgggcttaggggcgacggaggaggggacctcgtagtcgttcttggttgaagagggcttgtcctcggacttcttggcaccctcaatcttgaaggggaaagagtactggaaaa

SEQ ID NO: 93108 - DNA, 416 bp, Zea mays
  Clone ID: MRT4577_184902C.1
gtccggaatccttcctgcccggcctgcttcccctctacgcactagggccggggggttagggttagcttcaccgccggccttcccctccgacgcggcaccggctcctcgctgcaccgtgtccgtatgctatgctactctagctgaagcgaccctctgcacctggggtgcgccgctctccgcgctcgcctgggaggatgccttggatgctgtcctaagcccactcacaatccctgcagtcgacgatgccttccaagcggccgaggatccagcggtgatcagcatggaaggctagcctttaccaggacatcctgcagcacgagcgcccatgagatgctagaacagctgcatccaatcatacagggagcctgtcgttgatcagaacgctggctcactgcacaaaaccgcatgcgtcagga

SEQ ID NO: 93109 - DNA, 383 bp, Zea mays
  Clone ID: MRT4577_184903C.1
agattcaacacatcacgccgatctctgcctactaatgataacaggcgcctgccgtatcctcgacccgctgccgtccaacaacagtactcgatgcggaggccagaccacaaggcggagaactcgtcttccacgatataccacatgctacagtgcgagactcgccttcatcttcttcccactagaggggctggagtagagcaccctgcacaagcgcggcgtgtacacggggattcatcctccgttttctatggacgctggccctctctggaatatggtatgcgaccacctctgctgctcccatgaaaaatcgaaaaagtgtgggagaagaatgaaaagttttgttttccatacgcgcacgacgatctgcaagaactgcgggtggt

SEQ ID NO: 93110 - DNA, 271 bp, Zea mays
  Clone ID: MRT4577_184904C.1
atacttatcttctgaacagggcccaaaaggacgaataggggctaaccttaacactcgcctaccgatgcaacccaggctaatcatcagaaaaaaaacagacccatcgggagataacaaaaaactattgagaaagcccctctggttaccgaggagcaacactgaagcaacttcacgcgagaaccattctgtttagggaccatacttaaggaactaccacccactgttgggaagagggcacacttgtccggtaaatagccaacggttgacacaa

SEQ ID NO: 93111 - DNA, 290 bp, Zea mays
  Clone ID: MRT4577_184905C.1
tcgcacgcgttcgaaaaaaataaaaaaaaaattataaattacaaaaaaaaaaaaaaaaaaaaaagaacacggtttaaaaaaatcctggcccactcaaaactaccaaaccttactttccctagcatacaacttcatatcctattctataatctcacctaaattcaacacactgtcacacgtttaacaccttcaaaaccgtaaaaacacccaccttacccaacttaatcaccttgcaacatattccattttcacaaatttccataataccaaaaaatcccacacttaccaac

SEQ ID NO: 93112 - DNA, 291 bp, Zea mays
  Clone ID: MRT4577_184906C.1
aaccgaagcagggagttgatttatccgctgcagccatgagtaagttgcagtccgactctgtcaaggatgctatctcccatattgttggggatgccattgagaagatgatgaagttcactgagactgtggaacttcagattggtctgaacaattatgatccacagaaggacaagcgtgtcactggctctgttaagttgccccatatccctcgtcccagtatgaatgtgtgcatgcttggtgatgcccatcatgtttaggatgccgacaagatgggacttgactacatggatg

SEQ ID NO: 93113 - DNA, 304 bp, Zea mays
  Clone ID: MRT4577_184907C.1
catgggtggagactgagcatacatgcataccttcatcgaaaagatgcccactacgttcatcgggacagagggggcccactggcatatctttgcctacacggtgctggcgaagaagagcttgcagtagagcagctaattccaggtgttctgcacgagcccgaggcaccagtgcgtgcagccggacttgcttctggggtcggcgcgctgctcggccgtccgtacacccactgcttcttgtacgtctgcatgtgcgcgtcccgggggtactcggacagccgtgcgatattgaccagtccgacgggca

SEQ ID NO: 93114 - DNA, 354 bp, Zea mays
  Clone ID: MRT4577_184908C.1
ggggggggggggagcctcccttttgcaggctaaaggctgcaaaggggttaatgcgaaatcagcataaacaatcccagggcatcccacccccgaggcacaaaaggaccatgccccacaatctgacaaggaaaaaggagttgtcactccagaggatcaccggattccatccatgcaagcagccgctcgaaacccggtctgatctcagggtcccacgtaaggcgaacaaactagagacgatacagacgcaacacacaacacattcaggagttatagcagaaaagctcttactgaccatggcaatgggggcaaaaaaaacctttttttccgggggggagggaaagatcccggcagacc

SEQ ID NO: 93115 - DNA, 381 bp, Zea mays
  Clone ID: MRT4577_184909C.1
acgattgggggaactccgagcggccgccagttatgacattttttctgcaaccagggacttttttaaactattgttatatttaaaaacaaaaggccgattttacacccactctaggctacccccccgaacctgccttcttgcgcgccacgcgctctggcccgtccgtccgtcccccaccacgtgcactctcctgccccgccggactcagacaatcagaggtggtgcctgtcatgggcccgccccgcccagcctacctaaccgaccgactggcatggcctgtgcgtggcgtttctccttgcgcgcgcgctcacgtacgtacgtactaccgaaacaccacaccgtcgcttttcctccttggcttcttcttcttattcttcttct

SEQ ID NO: 93116 - DNA, 131 bp, Zea mays
  Clone ID: MRT4577_18490C.1
agcgtcgtgttaggatatacagcaatggcctataggagaggacttgctgctccttggggctcaatgctcgctctgcccaaggagcagctcggtcctctccttgtgggcgtcttggcgttgttcttcgcgcg

SEQ ID NO: 93117 - DNA, 369 bp, Zea mays
  Clone ID: MRT4577_184910C.1
cccaaacaacaccgttaggcatgtggagccgggcgtcgcacctccttatcgctgaccgcctgtcgtttccgcgcgcatgaccgagagtcttggcacgtcgtctgtccgagcgacaaaggctgcataacacatgcgcctgactggagctgcctcctacgtcaacttgcacggcgccatgcatgcaccccaccttagacccgcagcaggccgatatgcgctctgggagataagcgctgcctgcaccggtaccacatctgccgcggacacgtcatcggcttcaggacggcgaagaaccatcgacaaggggccaagaagaggctgactccgctgcctgtagattggatccagatgctggagaaacaccagatc

SEQ ID NO: 93118 - DNA, 981 bp, Zea mays
  Clone ID: MRT4577_184911C.1
aaccttgtcttgtgcgtggctccgctattaaagtctgcgtacagtccgccgcggctaggcgaccgcatccgcatctccccaacgtcttctcgccggtcgcgcacgggcaaagcagcgatggctacagcgacggcagttggcggacccgacagggtggagactgcggcgtcgtccgcggcggcagtgctggccgtcgccgttgcctcgcagaggttgctaggtctgctcgctcttgcggttcaaactgtaaatgttggagcagaaatatataataaagatcagcgggcaatatacaagttattatctggaagaatcaaatctgaaaatgtccctgaaaataaggatgggtcagatgacgacgatgatgacgacgacgatgaagacaatgacgatgagggtggtgacgacgatgatgatgctgaggaggaattctctggagaagaagatgggggtgatgacgatgatgaagatgatgatcctgaagctaatggtgaaggaggaagtgacaacgacaatgatgacgacgaagatggtgatgatgatggcgatgaggacgacgaaggtgatgaggacgacgaagacgaggacgatgatgaagatgacgaagaccagccaccttccaagaagaagaaatgatttgctcatccatggatttacctcagcttctccatgctgttagttgtgttgtttagatcatggacagctttgggatcaatgtagcttgttgcttgtcatggtatcgtagtgtaggaaaatttgacatctgatgttaaatcactatcctgctttcccctctgtgcatgtagtcttaaatcttgatttttactctattggagctgcgattgtgtcatgccattcaatatttgttctaaaaaggcctatcatgccagcctgcccaaaaaaaaaaaaaaaaaaaaaaaaaaaaaaaaaagcaaaaaaaaaaaaaaaaaaaaaaaagtactctgcgttgttaccactgct

SEQ ID NO: 93119 - DNA, 390 bp, Zea mays
  unsure (1)..(390): unsure at all n locations
  Clone ID: MRT4577_184912C.1
gcaaaagaacccgaccgaaccaggagggagnggcgcgnggcccacgcncgccgggcncncgcggggagcgccaccaccacgcaaacaagcggcggcggcggcagccagccaccgccgccggtttttttaccgccgggggagcancngccaccnccggagcaccggcctccttcggagcaacccccaccgccggaccaccggccgccgccggggcaccggccaccgccggnccaggggccgccgccggaacaacagccgccgccaccaggccactacccgacgcaaccgccccggccacagccggatccccagccacacccatgcccgagccaacagccgaatccaagcccgagccagctgcaaggaaccggcggcgaaggcagcaccccg

SEQ ID NO: 93120 - DNA, 720 bp, Zea mays
  Clone ID: MRT4577_184913C.1
acatttccgtcagttcaggtcaccgcaccgcaccaccaccggtagccatgggacccacaggtcagtgtcgcaccctcttgcttctgctcctcgccgccgccgccgccgccgccgcgccggagcacgaatccttgctccgcctcccctcctcggcgcgctccctcgccccgaagaccccccgctccgccggcgccgacctcatccgcgccctcaacctccaccctcgcgacgccttcccccgccgccccggcggcgtcggcgtcggcggcagcgatgctctcccggccggaaccctcgtcgagaggccgatccgcctcgcgtctctggtggccggagacgacggcacgtcggtgagcaacctcgggcaccacgccgggtactaccgcctccccaccactcacgacgccaggctcttctacttcttcttcgaatccaggcagcacaaggaggaggaccccgtggtgatctggctgacgggagggcccggctgcagcagcgagctagccctcttctacgagaatggccccttcaacatagcagacaacatgtcgctactctggaatgagtttggctgggatcaggagtccaatcttatctatgttgatcagccaactgggactgggttcagctacagctctgattcgcgggatacccgccataacgaagcgaccgtcagcaacgacctatatgacttcctgcaggccttcttcaaggagcacc

SEQ ID NO: 93121 - DNA, 1280 bp, Zea mays
  Clone ID: MRT4577_184914C.1
cggcctctctcgccgtcgttttcttggcgttattagtcctgccggccggcctggaggggaggatcgatcagcaaggccaatagccaggcgccagtcgccagccagccagccagccgcataaatccatccatctcctccatcttgctctccctctccctgcaggccggcagccgctggaggcacagacgacaaggcatcggccccggatcgagcccgacccctcttctcgtctcgtctcgtctctgcgctgggaacgccggctgccatggctcagcagaagaacgcgcacgtgcccaagttcggcaactgggacagcgacggcaacgtgccgtacacgctcttcttcgagaacgcgcgcaagggcaagggagccggagccgccggcggcaggatgatcaaccccaacgaccccgccgagaacccggaggccttctccgtggccgcgccgtcgccgccgccgggccgccacgagcgccgccccagcgacgcgccgccgccgccgatgtcgcccaacccctactacgccgccgggtcgccgtaccaccgccacgccgccggcgagccgccaaggagggccgccgggtacagcgtcgaccagtcgccggcgcacccctacagctccgagagcgccgggtacggcctcgtcgccagctccgtcgaccgctcccgcgccaagggcgcctcgcgcggcaacgagacgccgacgaggggctcggcggtgcccaagttcggcgactgggacgccaacccggcgtcggcggacggctacacgcacatcttcaacaaggtgagggaggagaagcagacgacccaggcggggaagccagcggcgtacggcaaggacggcatgcgtaccaacggccccaagcagcacgacgacgacggctacgtctcatcgaaattctcgtgctttgggtggtgcaagtagagagcgattgcctgatgaatggtgacgatggatggatggatgcagacgctggttcctctgggtctggggatgtaagtctggagaacgaggggcatgaaacgatctccatgatctttcctgtggtagattttcacttcaatttatgaagtgagacatagagttgctgtcatgttagaagtaagcattccattgttgcgttggttcttccgtattgaattgaatttacagtacatgtatcatgtatgtacgattgtacgcaggattggactctgaactccgaggtgaatatatgtgtgtttgtttggtgtccaaaaaaaaagacgaacaacaagatcaaaacttacctacacct

SEQ ID NO: 93122 - DNA, 479 bp, Zea mays
  Clone ID: MRT4577_184915C.1
gcccttttgtgcacacgagatgttctgtcctcgttgagctctatctgtagacacctgcgtacatcttttaacagtatagtcgccggcccagcacagagactccccacctgacaatgtcttccgtccggcatcggaccggcgaggtcggacgctatggagaccaaaaggaggggcgtggccccggtttcgacccgagaactgagttgactaacgataaaagggcaggggttgcactggcgccaatgagctacaactcatactacctatctcaagtgattcaacaacgccagactaaagacaagcttaaacaggactttgacatacgataccagctgcagggcggattcatgggatggagcagctttgatatacattcacatagtgactggaaaccctccattataccttcactgcacccatataattacatggcgaggattcatgctgctttaatagacgaatagtgtctagcatccaca

SEQ ID NO: 93123 - DNA, 305 bp, Zea mays
  unsure (1)..(305): unsure at all n locations
  Clone ID: MRT4577_184916C.1
gtgtttttttttttttttttttttttttttttttttttttataaaaaggaagtccgggtttagtttatattttgtntcaaatcatatcatcggggcccaattaatttatggtttccggagatgcaatcgggtcaaccaacatgcaggggggggggggggcgttcctgggcacaaagactggcgccaaacatgctggggggggttgcaaactgaagaactctgttttttttttttttacaccccccccacaattcctttttttgggagccagctcgggccttgctttttattggttaacctccccc

SEQ ID NO: 93124 - DNA, 538 bp, Zea mays
  Clone ID: MRT4577_184917C.1
tttctttttttttttttttttttttggtttttttttttttttttttttttttttttttttttttttttttttttttttttttttttttttttttttttttttttttttttttttttttttttttttttttttttttttccccccaaaaaagctgtttttttaaaagcaaaaacaaaaagaagacaaaaaggggcccccccccaaaggggtggggggggggggggccccgcggcttttaaaaacaggggacccaaagggacaaaaaaggggtaacgccaaaggggggggggggcaaccccccccattggagaaaaaagaagagccatgcgggggggaaaaaaaaaaaaaacaggggtggccgccatttggccaaaaagggaaaaaaaatccccccaccaaaaaaaagcgggggaccacgggcggcaacaagaaaaaagaggaaaaatgctttctgcagaaataaaaaacccctcatacggaaaggagcaaattgtggggggtaaaagaaaacagagcgatattccaagccaggggagag

SEQ ID NO: 93125 - DNA, 664 bp, Zea mays
  Clone ID: MRT4577_184918C.1
agtgctaactgcgcagatgcgaacggcttgaccgttttagccagcgaaactctcctgcggttaggtggtctgctgcctgccctagcccaaaccctatagcaccagagcccatcgcatagagagcgtacagcttccttagtgactgagagagatagaaccgcacactgagattagagcaagcgcctgagcggaaatggattgaggaccaagtcgatgtagttggagacgtctagatcgaccaccttgtgcagctgctttcagttggcgagaagaaggctggcgcagggcctaagcacgggcccgggccggccaggttgtccaagaagactccgccggacgagctagcctgagaggtgggaaaggatgctatggcgcttgacacgtgcgatgggcgcacggaacaggcgagaagcaaggatgaaggtccatgctacggtgacttgaccaagggacacgggaacggtacgaggaccaagggccatatgatgatatctatgcgttagctctgtcctgtgagcgtatgacaagcatacgatgcgcaatgcatgcagtacatgagacagtgccggattatgagatgggcggatgcctatgcatgcttttcactaactgctgctactactactactctaacctgtcttgctactgtgagcaccagaatgag

SEQ ID NO: 93126 - DNA, 264 bp, Zea mays
  unsure (1)..(264): unsure at all n locations
  Clone ID: MRT4577_184919C.1
gccaaaacaaggcttatatcgcatcatgcggggagggggaggaacttacatgagggcttctgaaacatatgtctttcttaaatacaacatactacacacagggggtggatgctacttaagattaccataacagagnnngagcnggagcgccacaaggtataacacttgtactacctcatgcatgtcaaaaataggcaggtaggcagtgcttgctgaacttatgatcatacgaatctgcagtatcttcaaaggtgggacgaggct

SEQ ID NO: 93127 - DNA, 386 bp, Zea mays
  Clone ID: MRT4577_18491C.1
aacttatataacactcttctacttgcttcgctataacataaatgtagtatataactatatctctcatatgatttaggataatatacaaatatattacatatataaatatataaatttagttagttttgtctcaattataattattaaaatggaattcaattccaacgaaataaatggggcctaagcgttttcctgtagtggatagttatggccgacgttctttaaacgttttcgtggatagttgtttagatcactgcggcggcacatgtcgtagacttattttatttttattttttgccaaactttaccctacctttgattcgattttagccactacactttctgtggcaatcataatttgggggggcgtagcaaagtacaacact

SEQ ID NO: 93128 - DNA, 824 bp, Zea mays
  Clone ID: MRT4577_184920C.1
cggacgcgtgggcggatctgagacgagacgagtgctctccccccacctcgcctcacccaaccggaacgaacaagttaccatctcatcccaactccgcctcgaccggatctcgtcggactcggatccgcccgaccaccccgcgccgccgcagatcaaagaagatggcagctgtcgacacattcctcttcacctcggagtctgtgaacgagggacaccctgacaagctctgtgaccaggtctcagatgccgttcttgacgcttgccttgctgaggaccctgacagcaaggttgcttgtgagacctgcaccaagaccaacatggtcatggtctttggtgagatcaccaccaaggccaatgttgactacgagaagattgtcagggagacctgccgcaacattggttttgtgtcaaacgatgttgggcttgacgccgaccactgcaaggtgctcgtgaacattgagcagcagtcccctgatattgctcagggtgtgcatggccacttcaccaagcgccccgaggagattggagctggtgaccagggacacatgttcgggtatgcgaccgatgagacccctgagttgatgcccctcagccatgtccttgccaccaagctaggtgctcgtctcaccgaggtccgcaagaacggaacctgcccctggctcaggcctgatgggaagacccaggtgacagtcgagtaccgcatgaggggtggtgccatggtccccatccgtgtccacagccgtcctcatcttcacccagcacgacgagacaaagtccaatgatgagatcgctgatgaccttatggagcatgtcatcatgcctgt

SEQ ID NO: 93129 - DNA, 218 bp, Zea mays
  unsure (1)..(218): unsure at all n locations
  Clone ID: MRT4577_184921C.1
gggcggancnacgcgtccggatgaatattnaccactcctgaaccctttttcacgatctccgccccaaacccatcgtctggcgattgtgccatcttccatatcaacaacctattacctctaacctccagcgacagctccctcgacgcgctgtccaactaggtttacagcggctagccgggactggggcttctacaggttatgaaccactgcatccccat

SEQ ID NO: 93130 - DNA, 302 bp, Zea mays
  Clone ID: MRT4577_184922C.1
aaaaaaaacaaaactcccctcaacttttttttaaaaaaattatttcacggaaaactgcaataacttttcacatttacacaaatatttcccccccaaaaaaaattttcttgattaaaccaaagtttaatcatttttgaaaaaaacaccttaatatacatccaaagttaaaaccaatttgccctgataatggcaaaaaactaatactacaagttataaaaacaattgcctacatttttaaatcaactttaaacatctgtaaacaaactttacccaaacatttttaaaaaaaaaaatttccttta

SEQ ID NO: 93131 - DNA, 232 bp, Zea mays
  Clone ID: MRT4577_184923C.1
atggagtctggagacgacgtgcagaaatggcacctcgaaaggggaaggaaaagatctcagaacagttcatcagcctcggacctcaggtggctgaaggagagaatgtatttggtgtctgccatatctgtgcatccttcaatgacacttttgtccatgtcactgatctttctggcaaggaaaccatctgccgtgtgactggggggatgagggtagggggacgccgagatgcatc

SEQ ID NO: 93132 - DNA, 309 bp, Zea mays
  unsure (1)..(309): unsure at all n locations
  Clone ID: MRT4577_184924C.1
cccgacgccggccccatcggcggcgcattgagggagctggagctcgggaacggccgggancgagtcatcggtgtccgatccggcgtccgccagcgccgagatggcgctcaaggcgccttccgatggcaatgcgaagaaacggaagctagcgggaaggggaaaggcaaggacggccccgggtccaccgccgcnaccaaggaggagtccagtgggnaaacggtgcaaatnggcggagganagcaatggcgcggangnaaantccggcaagggtaacgccgccggnanancaacaggacaagggtgggaaaa

SEQ ID NO: 93133 - DNA, 468 bp, Zea mays
  unsure (1)..(468): unsure at all n locations
  Clone ID: MRT4577_184925C.1
ctctggaatttctttgttcgcatcctaaaactggcgctatattacaacgatcgaaagaaaaaaagaagcagaaaaaaaaaatcgagacaaggggaatccgatgcattattgccagcgtggccgctgcctaatcctgtggatctctcatgagcaccatggccagcttctccggcctgttgttcctgcggccaccgacgacgtccctctccctgtcggccttcctctccttggccggcgacgacggcatgaacaggtgcccgaagccgaagacgctgatcaccggatccacgcgcacgttggccgagtaggaccgctccatgcccctcggccgtcgcggcccgacgcccgccgacgccggcgtgctcgcgcagcgctccagcccgcggaacaccacgcgcccggacgcgctcacgcgcgggctctccgccgncgccgggggccgggacgggcgagaaggccccgcgctgc

SEQ ID NO: 93134 - DNA, 279 bp, Zea mays
  Clone ID: MRT4577_184926C.1
tcgagaatccccaaacaaacaaacagggttttaggggagagggagaggagaggagaggagaggttgggtctgggacaccatggcttcgatgaagctgtacggggcggtgatgtcgtggaacgtgacgaggtgcgcaacggcgcttgaggagggtggcttcgactacgagaacgtgcccattaactttggcaccggcgagcacaagagccccgagcaccttgttcgcaaaccgtttggtcaggtttcatactctgcaagatggggagttttacctttttt

SEQ ID NO: 93135 - DNA, 1440 bp, Zea mays
  Clone ID: MRT4577_184927C.1
ctggccgggttatatgtcatgtccgcttctggaggaaaaatctatctgttaacatgatgacttctaagacaatgacaacgtttatgcctgcaccgccgacagcaacttttattgcatttcacccccaagataacaacataatagcaattggaatggatgttgggccgggcaggccggtccggtccgcgttgatgaccgaccgagcaagcccttcggtcactctaagagaatcacgggtcttgccttttcaaatgtcctaaatggctttacttttacggaatttgatgctctaatacaagtttggaacacggatacattagcaagggataacaacagatttttgctgataccttcagttcgccaatctaataggtttgataatcaagttgagttccaccgagattaaatgcactttctttaaccaactgaaaccctaaaggctatctatgaaactacaaaactagaaccagtgaagcacccaactgatctatgcaatcattatggatgccactgttggcatatttaatgcttcgagtttgagactattgtgtcggattcttgcagcttcgtatctccccccaaatatcggtccgagtgttcatcctgttgtggttgcggcacacccttcggaagcaagccagtttgctctagggctgactgatggtggtgtttttgtgttggaacctttggaatcggagagaaaatggggaaatcctccaccagtagagaatgggtctgctagcaacttgtccacaccgcctcctaatggagcttcaagttctgaccaaccagaaagatgattaagaagttggaactggtagatttttcgtggcacgagtctaaccaagaaggtatccttcaaagttaatgaaacaaattggaacttctttatttaaattccttggcatgatatgtatagaacatttatttataacgtattgatgcaatttaggagtttgacaataagctgccatgatttactcagaaatatgatcaatataatcatgtgaacatagaatatagtgtatgtttttggccaacagattaatttctcttttactgacggacaaagacccaactatgtttgatgaatgccaaatgaaacatattgtcaaatacagatattcaggatagagttcttgttcagttcataacctcatcttgttctgcagacagggcttcaaagggtggtgcgactaaccttggcagataggttccaagggagccggacaacgcgctcaataaaaataagttcaacagaagtttgtccgttgcttgtataaatatttgtattgactatcgagtgaggagtcctagtatttcatttttgctttgtttgcggtgctgtgaaaaggatcagtagataagctgtagtacaacaactatcagactggatgtacttacctatatttatgactattagttaatgtatgttgtttc

SEQ ID NO: 93136 - DNA, 3303 bp, Zea mays
  Clone ID: MRT4577_184928C.1
tcctcgatcgaggaaaaattcaaagagacagtccacaagctcgagcaggagtccggattctatttcaacataaagtactttgaggacgaagtcctcaatgggaattgggatgaggtggagcgctaccttggtggattcaccaaggttgacgataaccgctactccatgaagatattctttgagatccggaagcagaagtatctggaggctcttgataagcatgatcggtcaaaggctgttgaaatcttggtcaaggaccttaaggtctttgcatccttcaatgaggagttgttcaaggagatcacacagcaataacacatcctgctgtgtctggtggtgccattggatttggcactccaacaaatcgtgccctcttgttgaagcggcctagaacacccacaactggtaatcctggtatggattatccatcaggagattctgaccacatttccaagagaactagaccggttggcatgtctgaggagatgaatcttccggtgaacatgctgcctgtgacttatccacagagccataattaccaacaagatgatttccacaaagctgttgcacggaccttgagccaaggatcagcacctatgagcatggatttccatccacttcaacaaactcttcttcttgttggtaccaatgttggcgacattggattgtgggatgttggtaccaaagagagactcgttgtaagaaacttcaaagtctgggaccttggtaaatgtacaatgaccctacaggcagcactggttaaggacccagctgtgtcagttaatcgcataatatggagtcctgatggaaccttgtttggtgttgcttattcaaggcatattgtacagatttattcctataacggtggcgatgatattagacaacacttggagattgatgcacatgttggtggtgtaaatgacatagcatttgctcatccaaataagcagctatgtataattacatgtggagatgataagacaattaaggtatgggaggccactagtggagctaagcaatttacctttgaaggacatgaagctcctgtttattctgtgtgtccacattacaaggaaaatattcagttcatcttctcaactgctttagatgggaagatcaaggcatggctatatgataatttgggatctagagttgactatgatgcaccaggtcattggtgcactacaatggcatatagtgcagatggttcaaggttattttcatgtgggactagcaaggatggtgaatcacatctagtagaatggaatgaaagtgaaggagcagtgaagagaacatatcagggattccgtaagcgatctatgggtgttgtgcaattcgataccacccggaacaggtttttggccgcgggggacgaattcatgattaagatatgggacatggacagcacgggtcttctgactaccattgatgctgatggtggcttaactgcaagtccacggatacgcttcaacaaggagggaactctattggctgtctccactgctgacaatggtatcaagatcttagcaaatgctgatggacttcggttgctgcgcacactggaaaatcgttcttttgatgcttctcgtaatgcatctgaggctgtaacaaagcctctaataaatcccttgactgctgcggcaaatgcagctgcagcaagcagttcaggagctggtgctccgtcagctataactgcaatgaatggtgatagcagaagtttggttgatgtaaaacctagaatagctgatgagtcacttgacaagtcaaaggtatggaagcttatggagataactgagtcaagtcagtgcagatcaatcaaactggcggataacatgagaacaagcaagatttcgagattgatttacacaaactctggtcttgctatcttggctttaacttcaagcgctgttcatctactctggaaatggccacgcagtgatcggaattctggaaaggcaaccgcaagtgtatctcccactctatggcaaccaccaagtggcatcttgatgactaatgacacgactgacaataatcctgaagaagctgttcactgctttgctttgtcgaagaatgattcatatgtcatgtctgcttctggaggaaaaatctctctgttcaacatgatgactttcaagacaatgacaacgtttatgcctgcaccgccggcagcaacttttcttgcatttcatccccaagataacaacataattgcaattggaatggatgactcaaccatccaaatctataatgtccgaattgatgaggtcaaaagcaagctcagaggtcactctaagagaatcacaggtcttgccttttcaaatgtgctaaatgttttagtctcgtcaggagctgatgcccagttatgtgtttggaacacggatggatgggagaagcaaaagaacagatttttgcagataccatcaggtcgccaatccaatatcttggacactcgtgttcagttccaccaagatcaaatgcactttcttgttgtgcatgaaacccagattgccatctatgaaactacaaaactagaaccagtgaagcagtggcctgttcgagagaattcacctccaatcacacatgccacattctcgtgtgatagtcaactgatctatgcaagctttatggatgccactgttggcatatttaatgggtcgagtttgagacttcaatgtcggattcttccagcttcgtatcttcctccaaatatcagtccgagcgttcatcctgttgtggttgcggcacacccttcggaagcaagccagtttgctctagggctgactgatggtggtgtttttgtgttggaacctttggaatcggagagaaaatggggaaatcctccaccagtagagaatgggtctgctagcaacttgtccacaccgcctcctaatggagcttcaagttctgaccaaccagaaagatgattaagaagttggaactggtagatttttcgtggcacgagtctaaccaagaagacagggcttcaaagggtggtgcgactaaccttggcagataggttccaagggagccggacaatgcgctcaataaaaataagttcaacagaagtttgtccgttgcttgtataaatatttgtattgactatcgagtgaggagtcctagtatttcatttttgctttgtttgcggtgctgtgaaaaggatcagtagataagctgtagtacaacaactatcagactggctgtacttacctatatttatgactattagttaatgtatgttgtttcatttgcctttttggctccgttcagccgtttttgctatcataaagtgctgtttctgtggtc

SEQ ID NO: 93137 - DNA, 248 bp, Zea mays
  Clone ID: MRT4577_184929C.1
gggacctcgaggcggcgggtacagcttttccaatggaccatctcccgatcaaagattatcactgcctctgagactgtgcacccattccctcgcttgctgtaggtgtcagcgtattgtctcatatactacagtcgcgttcgtgtagttatccacactaccacgctccacagtatggccgcggacgaccaagccactgctactgctcagctgacgagggtctcatccctgcctacgatccgggctccgca

SEQ ID NO: 93138 - DNA, 460 bp, Zea mays
  Clone ID: MRT4577_18492C.1
gcatgatcccgaccgccatggccgcgggataccaaaagaccttcctcctgatactgcgctgctggacctgcaaaacaacaaaataactgagatcaaagatggagactttaagaacctgaagaaccttcatacactgattctcatcaacaacaaaattagcaaaatcagccctggggcatttgctcctttggtgaaattggaacgactttatctttccaagaatcaactgaaggaattgccagagaaaatgcccaaaactcttcaggagctgcgtgtccatgagaacgagatcaccaaagtgcgaaagtctgtgttcaatggattgaaccagatgatcgtcgtagaacttggcaccaacccgctgaagagctcaggcattgaaaatggagcctttcagggaatgaagaagctctcctacatccgcattgctgacacaaatataactaccatccctcaaggt

SEQ ID NO: 93139 - DNA, 693 bp, Zea mays
  Clone ID: MRT4577_184930C.1
ggcaaacaaacaaccatattatgtggatagattatataatttcaaggtcagattatgataatcccataatttatttaagatgagtttattggagattatttttggtaaaagatccactgcctatggttatgttactagaaattacaacgtctgtcattcacttttcttcacgaacatgctaaacccgaaaccccagcacattccatccagccatcgcatcgcttctccaatccaacccgcctgcagcatgtccatgaacaacccgttcacgacgacggctgatccacggtggcagcgcggctgcagagcttcatgttgcgggcagaggaggtcgcacttctatccatggcgtgcatgagcggcggacgtgacctcgccaataacaccgccggtgcagggcgcgacctcgaccccatgcttgcgacacgcaccatcagccacggtcgtgaactagagaacggcggcacgggctcgtcaactgtgtcatggggcgtcatcaactgtggcgcatggcgcgaactaccgaatgccggcatcgccacagtagtccacggcgtagatgctgcctaccatagtttgagtgtgctctagctgctcgataaaatgttcacaagaaacatacatgtgcatgcctctgttgtagcttcttgtggatgaataacattcatgatcaaactgccaattcattaaaaa

SEQ ID NO: 93140 - DNA, 377 bp, Zea mays
  Clone ID: MRT4577_184931C.1
agagcacacaaggtagctaatatagatgctaattgcacttcgtcaatgtgaatacatgaattgcgatttacttgagtgtataccttcatagttcatatcacttgagtcccattgaccttactgttgcagtggctaacatggttatggaacggcaatgcaggagctggaagggaggtcgcttcgtcttagtctggcagaacagaacccgccacctggttccccgcctagcactgcgcaggcacagcaggaagaaacggattcaggcgcacctgctggtgggggtacggaggcagccagttcttcagaaccatctgaagcagaggtgggcgagagcaacttgcaaacagcttatgccgaagcagaacttgctgaaagat

SEQ ID NO: 93141 - DNA, 247 bp, Zea mays
  unsure (1)..(247): unsure at all n locations
  Clone ID: MRT4577_184932C.1
gggggcgacccacgcgaccgaccacgcgnacggaagagccctccactacgaaagcgcgcatccgaggagagggctagagccgcgagggagcacacaccaaggcaccgcgcaccctgcaggcagtgcacgccgacgccgcccacgcgctcgaggacgccggcacggacaagaaggcggggcctgacaggagggacaccaccgacgggacccgccggacgggaaaccacgaaacgggccaacagggggg

SEQ ID NO: 93142 - DNA, 183 bp, Zea mays
  Clone ID: MRT4577_184933C.1
gcctgatgactgtataacttggtagccaatctcaacctttttcctggtctaatgcaggtagacacacatggtacataaggccgaaagcagggcattctatgatgactacaaagaggcccacctcaagctctgcgtaatggagattgcagatgctttaatggtacatatactgaggcggaacac

SEQ ID NO: 93143 - DNA, 212 bp, Zea mays
  Clone ID: MRT4577_184934C.1
ccaccgaaaaaactttacgttgaaattggggggaaatggggtatagtctttatagataagactcttcaacgattccactttatttttctttgggatcgttgcccgatgaaaaaaaaaaaattctttgtaattacccgtccaaatatgtacaaaaaaaattgcgttcttgaaaccgcaaaaaactgcaaattttgtgataaaaacaaaccttt

SEQ ID NO: 93144 - DNA, 344 bp, Zea mays
  unsure (1)..(344): unsure at all n locations
  Clone ID: MRT4577_184935C.1
gctgcagcgtcgtcagtcggaatcggctcgaaatcgagccgaatcggctcgaggtatacttcttctctctctcagtagtctcnctcgcagctagagtcgtcgtagcagatcagatctcaacacctaccgaccaacagctgcttgctcgggacgggaaccggagttggattgcgatggcgctgcagtacgtggatgcgcacggcaggcgcgccggatctcgccgactgtatgcttcctcgccgactctaccagcagaagctaggcaccactcaccctcagctcgaccattctacagtccagccgacagacggagcactatcatcagctctacacaattcatcatg

SEQ ID NO: 93145 - DNA, 364 bp, Zea mays
  Clone ID: MRT4577_184936C.1
atgctaggtaaaattcagttcatcattccttagaactttggtcttgtggtattactgaagcctatttggttgtcagctactatcctctttcaatagtaatggttggggtgggtgatggaccatgggatgcgatgcagcattttgatgactgtatccctgaaagagcttttgacaattttcaggtgattataatactgctctatgatgttgaaattccaaagccttgatgttcctccacttatagcagtaccctgttcttgctatcgtacttgtaccagtcattgttttacataaagttgtaaacatattgattattccagtaagaaaaactatactaacctgaattaaacttattttctaccga

SEQ ID NO: 93146 - DNA, 815 bp, Zea mays
  Clone ID: MRT4577_184937C.1
aaccatcgtcttagcctttgcgaaaagcttgcccatattccagcactagtcctgtactcccgtgcgctagtgcgctcggcgctgcccctgtccgcccgcagtccgtccccgctcgccgcccatgcgctcgccggccgcccctcggcgctcccccatctcctcccgctccgcccccgccctccgtctggtagtccgtcgccgctcctcccgcacgccagcacgacctagtagacggctcgaagcgaagacggtcccatttccagtctccgtggtcaagatggatttagaggtatccgagggttcaggtactaatgccacctcgagacgaccaatcggtgcaaacgctgcctagaagggcaaagcttttggagtattttcaaccggagttagttgaggtcaatggcgtgatgaaggctatttgcaaatattgcggggcgatgttgaggagttcaagcacaaatagccttagaaaccacgttgcggatacatgtcctaaaatttcagttgaggaccgcaagcaattcattgctacaatggaaaaaggaccagcggaagcttcatttgtgtttgactctcaaaaggctcgtgagtgtatggttaagtggtgcatcagtgccgaggtcgcattcaacaagtttgacgatcctttctttgctcagtggatggagtcaatgcagccatcattcagcggtgttgcgcgtcaaacaatgcaaaatgattgtattaccagattcaagatgatgaggcaagagctaagaaatgagctacaaagtcttaactctcggatttgcttgacaactaatctttggacccca

SEQ ID NO: 93147 - DNA, 877 bp, Zea mays
  unsure (1)..(877): unsure at all n locations
  Clone ID: MRT4577_184938C.1
gggaccctcgaggccggccggggtgtaccgtgatgccattgggattgagcggtttgacaaggatacaactccccatacacgtcttgacccaacataccctgctaccgacacgtgctatccgctcttctgcacgcagcacaacaaccgaccgaggtctcgagagacagctttccgaatacctacatcagcaacagctcgcccgtgagcctagacgcccacaaagacaagaaaccatgtcgtttatctcgccgggacttcgtagaggcctgatgctcagcacgccgctcattctctcgacaccactgctggcatatcaattccgaaatgcgcagcgcatacactgcgatggaccggatcccatcacaaagattactagtgacttgaagagcaactatgccgccgaagcgagaactcccgttgttactcagtcaggtgcggtaaaccccaaggcaattcgacaaattagcatggggagtattctcggtgttattggagggttgggaattagcgtctttagcaagccgctggctatattgattggattaggcatctttgctgtacagttcatcgagtcgcgaggaatccatatcataccatactcgttcctccagcgccggttaaagtccatgaatgtccggtcgctggtccaagacaatgttgctttcaaattgtccttcggcctgactttcgccatggctgcgtttgctgaattttaaatccgacaaattttggataagctgctcaatatgtagccggttgagggaagccttgngcgaagcgatgcgctgngttcatcacctgtggttggagctgcatctgcagctgtttgcaactcgaccaaaggcncttaccgtgtccttgaaagcacactgctcct

SEQ ID NO: 93148 - DNA, 181 bp, Zea mays
  unsure (1)..(181): unsure at all n locations
  Clone ID: MRT4577_184939C.1
gtcgcgccgncgtcgtcgtcgaaacagcacatttctctctcgatctcagccatggccgaagtggggcaggcccaggacgccgtgaagctctttaaccggttgaccttcgacgatgtccacgtgaacgatatctcgctgaacgactacctgggtgtgactgtggggaaacacacgacatttc

SEQ ID NO: 93149 - DNA, 519 bp, Zea mays
  Clone ID: MRT4577_18493C.1
tttacgcgtccggatccaagcatccgcccataccatcaatggctccttggcaattagaaaagttcatatagccttcgttttgtgaagtactgtcgaaatgcttgatttctcatggtacaaataattcagcctctttgtcatttcttattggtgttctacattcaactttttagtgctttgaatgattatatatacttatttacagtacctgctttgtgccgtctacatagttctggttggcttacccagatgatgttgtgcattatgctgaccatacacacgtctgatcccagttgatacgttgtcatattatacacatagaccataaattgtttgcatgttgtctaaagctatctattttcccgtgatttgtcattacgttgggtgacaattagttaacatttggtgataaagttgttctattatacacacctttttctcttgaaattcttatcagtatagagattgctcttgaagatcttacaagtgtatacactggcatgactgattgatagtatt

SEQ ID NO: 93150 - DNA, 287 bp, Zea mays
  Clone ID: MRT4577_184940C.1
ccgatgcgcacgtacgggtcgacccaagcttgcgctggacacagagtggctcatgtatacgggcgtcaggactacctacatcctaggggtctacttcatctgactccattgaactctacagcctatatatgcacacactggctcacgcgtggacccgtcgacaaccttcttgcacttggccgtcacaaaccaatgtctccatcgtaagaacagaacaccttcagctgatgaccatcgcatgcacatcccattgacttggcgcgagcattttgataatggcatacacc

SEQ ID NO: 93151 - DNA, 266 bp, Zea mays
  Clone ID: MRT4577_184941C.1
actcgccttcgccccttctgtctcccttcgtccgtagcagaccaggaacgcccaaggcgctagcgtctccaagatggtgctgaaaacgacattgacttactcaatccaccggagagctgagaagtaaagccaagaagagcggctagtcagtcccaactccttcttcatggagtcaagtgcagggtgttcagcaaacatgtgttcagcactccagactgggtggtgccaggtgcaaatgtctggcaactacggtggaagcagctacg

SEQ ID NO: 93152 - DNA, 836 bp, Zea mays
  Clone ID: MRT4577_184942C.1
cggccgggccgggaagtgcattccaatttcattacaaggcatttcctccttctagtaccaccgtgtgtgctccaagcctcaagtgctgtgtactagtactactactactactacgtgtgtgtgtgatacactagtgagtgtgtgagtagtacgtgtgtgtgctcatccaccggtcatctatcagtgtactcgagtgctagcgagtagttctgggctgtcagtgccgcctgctcgtgtccgacccctccttggtccgccgctgcttgccggaggacgcgtgccgctcgtcgcctttccccggcttcttcgcccagcaacggcgccctagagggctccccgagccgtgcttcgtccaggggccccgtccggtgttcggcctgctcgactgtccccgccttgtcggctgtgccgactccgccgtgccgctgacctctcgcggcggcctcctcctcgtgcgcgtcggcgacctgccggtcctgtgcaacccgctcaccggcaggttcaagtcgctgccccctctaaagcacaactgcggttcttctgccaattactcgaccgggtacgccatcctgaccgcggccgactgttcgagctcctccggtgtcgacggcgacgagctgtccttcttcaaggtgctgaccatgaccatccagaaggacgcgatgcagtaccgcctccacacgttctcgtcggccggggattggggatggagcacgcgctccggccgcgtgaccacaacctgtgcgtgccgctctcccagcaaaacgcggtcgtgtgcggcggcgccgcgcggtggttcttctgcaacaagtcgggcttgcactcgtttgacgtcg

SEQ ID NO: 93153 - DNA, 275 bp, Zea mays
  Clone ID: MRT4577_184943C.1
gaggagctgaaatactccccaaaaggggtgctctattctcggggtccggatgactacaaaatccccactgttaccgagataccagaggagttctacctcactatggtgcgctctcgaaaccccatagccatttattcatccaagggattgggtgaggctgggatgttcctggggtcctccgttctgtttgccatatatgatgcagtgaccactgcccgcaaggagagagggctgagcgacatcttccccttgaatagcccagcaacacctgaagt

SEQ ID NO: 93154 - DNA, 289 bp, Zea mays
  Clone ID: MRT4577_184944C.1
aatccaacaattgggaacataaatctctgtacatgtcttcagaaattaagtgtaaaattctcatttttcaagcacgttcttacccaggctctagagtgcgctacgtctaaaactgctggatcatctgtaaacagcaaagacaaagatccaaacccaacaaacaaggaagcagcaaggagaaaaccaatcacacctccaacctgcaggactttgtataaaaccacgcgggctggcttggagttcccttttgcatattcgctagcaagtagagcctggccagcaagggcta

SEQ ID NO: 93155 - DNA, 330 bp, Zea mays
  Clone ID: MRT4577_184945C.1
attggggtaccccttcgaggcccggcccgggcccgggctctgctatcgccggtcgcgcatcctattgacctcgcgccaccgtcgccgccagatgacagcgagccaccgccctgccgtcgcctgaggtagacaccaagccaccgccatggggcgtatgcacagccgtgggaagggtatctcttaatcgtcgctgtcgcacaagaggactattccgatctggctcaagacagctaccaccgaggtggaggagatgattaccatggctgcgaaaaagggccagatgccgtcgcagattgaggttctactccgtgaccagtacggaatcccgct

SEQ ID NO: 93156 - DNA, 318 bp, Zea mays
  Clone ID: MRT4577_184946C.1
cgtactcattatcgtgtactaaacaggcttgctacaaccaggatgtacagccatgtgtgttgaatatagatgcaccaacttttgatcctcatggctatactggtactggctggtgcttgaaggatctacaccctgcacaaatttgtatatgaatgtgcaccaagttagtgaggggtgaatattgtacctagatcggatgacagaaacttgagcttttggtgtgatgcggctatatttatattaaactgctattggtaaagtgaaatggctgatagaaaggaatagaaaaaagggcgattcgtttttaaaggatccaag

SEQ ID NO: 93157 - DNA, 837 bp, Zea mays
  unsure (1)..(837): unsure at all n locations
  Clone ID: MRT4577_184947C.1
cattgggacctcgagccggccgggcttccttccgtattgccacagccacaccgggccgcctctcctcctccctcggacagggagagaccctttccatccaagctagccaaaccctagccaccgtcggttccaatctgccaacgtctcgtccgctggttggtggctcggcggcatggcctcgtccgcctacgccgcttgggacgccgcggaggaggcggacatcgacgcctccgcatcgcaggaggagctcatcggccgcgcccgcttcatctccccccgctcccgctccctcccctccctcggacagtaagagtcgccgtccggagcgggtcaaattgaagccgcggaagaaggtctgcaagaggaagagggtctgcaagaggaaggtgagaagagccaacaagatcaggtctccgactccgagccgcagccccgaactggaccctctcgccagggccgtgctcatgatcccaaccgctccttctacaatcaccggtggtgaggatatcctcgaggttgctcgcagccgcggcatcttctagatctactagttgcctgtgtattttgtgcattgtagcgtagtcccttgtgtttctgccgatcaatccatatgctatggcctggctggattttgtgcattgtccatcgactgcatatgaccttgcttgaaggaaactagttagcagcagtgcagtgctctttaattcagatgatacacacagacttacgtcgtcgtcggcggcggcggcgtcgtcctgttgatttcttcagcaagggtacaacgatcatgccgngaaacctgagttatcacgggaaaaaaaaaaaaaaaggccccta

SEQ ID NO: 93158 - DNA, 173 bp, Zea mays
  Clone ID: MRT4577_184948C.1
cccacgcgtccacccacacgtcccagaaatctttttcccctggctactaccaaatatacgccttttaaacttttgatgagggcgcgtgtcgattcctcacgaactacttaccgttggttccaaattatccttccacaccgtatcatctcaaccccggcacacctttttgcgtc

SEQ ID NO: 93159 - DNA, 367 bp, Zea mays
  Clone ID: MRT4577_184949C.1
caaacaaacagctatcttaattaaagggcaaagggttaacacagcagaattttacaaacacgatcttccaagacaagctttggttcgtatgataaactagacgaacaagtctcaatagttatcatgtgatacaccggtaagacagcaccacagaggaaactcacaaatacaccgtgagacatcagctaaagcatgctgccccaccaaccgtgaaacccaagcagccaaaatctattactcgaattgaacctacataagaagaaagtcttttgcacgaaaattccacagcatgatacacagcaaacaaggagtcacagaaaactagtcttcattcatgccaccttggtgggggggacggggacctcct

SEQ ID NO: 93160 - DNA, 134 bp, Zea mays
  unsure (1)..(134): unsure at all n locations
  Clone ID: MRT4577_18494C.1
cccagcgtccgcccagcgtccgcagttggtagnagccaagacgacggcggctggcgcagacaganggctgcgaggaagacaggctgaggaagaagcttacgtgcagcagctcgagaactagcagatcaggcttc

SEQ ID NO: 93161 - DNA, 1426 bp, Zea mays
  Clone ID: MRT4577_184950C.1
cattgggctgccccgtttcggtaagtgcgccgccgcctctgctcctctgctgccccttcgaatcgggcaccacaagagcaagggtgtagatgggagagcccaacggattggtatagaatcttttcctcaacccgtcgattgtagttgctcagcactaaggaaattctctgatctggtagcaaggaacttgatcaatagtaccttctgaggcaatatgacatcagtaggtctactatcatcaggttatgaagcaagtaccagtggaaccactgatcgattgccagatgagatgaacgggatgagcataagggatgaaaaggaagtggaagccgttgttgtcaatggcaatgggatggaggttggtcatactattgtgacgactgttggtggaagaaattcacagcagaggcagactattagttatgtggcagagcgtatcgtggggcaaggttcatttggagttgtcttccaggccaggtgtctggaaactggtgagagagtagctataaagaaagttcttcaagatgtgagatacaagaaccgtgagctgcaaacaatgcaagttcttgatcacccaaatgttgtatgcttgaagcattacttctgctcaaccactgataaggaagagctttacctcaatttggtgcttgaatatgtgccagaaactgttcaccgtgttattaaacattacaataagatgaaccaacggatgccattgatttatgttaaactttatatgtatcagatttgtagagctttggcttaccttcacaactgcgtaggagtgtgccacagagatataaagccacaaaatattctggtgaacccacatacccatcagctgaagttgtgtgacttcggcagtgccaaagtcttggtacaaggggaaccaaatatttcatatatttgttctagatactacagagccccagagctcatatttggggctactgagtatacaacagctattgacgtgtggtctgctggttgtgtacttgctgagcttcttctaggtcagcctgtttttcctggggacagtggtgtcgatcagcttgttgaaattattaaggttctaggtactccaacacgggatgaaattaagcgcatgaatccaaactacaccgaatttaagtttccgcaaatcaaagctcacccatggcacaaaatcttccacaaaagaatgccatctgaagctgtagattttgtgtctcggcttctgcagtactcaccaaacctccggtgcacagcattggaggcgttaatccatccattctttgatgaactgcggacccaaactcacgtccaatggcctgtccccccccttttcaattttactaatagttaaggagaccaagagtttgttggcattgtcctcagcatgtaaaacaatgtgtttttaggagttaaaacagttcaattttattcc

SEQ ID NO: 93162 - DNA, 180 bp, Zea mays
  Clone ID: MRT4577_184951C.1
ggagtttctgtattccttgaaatcgcgacgttagttgtagctacctggaaaaaatcacctgcgattaacacagggcaacatgacttcaatgtaaaaaaaaaggtttgggatttaacaaaaaaaattgtaattttgtgtccacaaatttaaattgtttctgagcaagaagtttttttgttt

SEQ ID NO: 93163 - DNA, 646 bp, Zea mays
  unsure (1)..(646): unsure at all n locations
  Clone ID: MRT4577_184952C.1
gccggccgggccgggnnnnaaaanntagtcccacacggcggcggacgcgggcgtgctagggttgagcggggctccgtgggcgtgctaaggtttcgcgaacgcagcggtggccggcaggcaggtgagtgctcccgcctctgattcactccccggctcctcgagcggccaagcgtccgtgcgtggccgtgtgggcgaacaacttgcgccagccaccatgcgccgctgggcaagcacgtgaggccagaggtgaagcacaggcacaagcaaccgagtgcgagactgcaggatagcaggcaagccgcgagcgcgtgtctgcagatgctagccaagcgagcgtgcgactacagaacaacaagcaacgacaacgacaagcaaggatcatgtctgggctcacactggggctcgttgctcggcctcgttgagctaaagatcctccaacgtagaggcaccgacaccaaggctcagaagtgtttgaaaaggaaagtagaacaaacaaaaaagggtatagtcaggaataaggaaaagcagagtggatgggattcattcttttctaaggttcacctcgttctggtgatatatgaaatgatacatcggacaagtgggaagaggaagtagaatggcatggataatcataaaaggctgggtt

SEQ ID NO: 93164 - DNA, 1205 bp, Zea mays
  Clone ID: MRT4577_184953C.1
cattcgaggcctcgaggcaggctcctcccaccccagtccccacgcacatatccatccacacatattttccatggccatggcaaccagttatggctccatggctaaccctccaattacctccagaactccctttctcagtaaacaagcctctaattggatacctgctacaatcagcaatggcaacggcactggtggcatgttcactgtcgcaagcagaaagtcgaggaatgggttccaattttgtgctgtcactggagacccaggctctcgcaatgtgtctgatgtaaacttcccaagtgattacacagaacttctgacgcaggctaaagaagctgctgaatcagctttcaaggatggaaaacagctactggaaatcgagttccctacagctggactacaaaccgtaccaggtgatggcgaagggggaaatgagatgactgggagcatgcttctcattagagaattttgtgatcgcttcgtacctgcagagaaagcaactcgaaccagagtattcttccctgaggcgaatgaggtttcttttgcaagacagtcagcctttgaaggatgttcgctgaagctagattatcttacgaaaccatccttgttcgaagattttggtttcacaacgaaagtgaaaatggcagatcgtgtgaaaccacaagacgagacattcctcgtggcttatccttacttcaatgtcaatgaaatgctcgtggtcgaagaactttacaaggaagcagtagttggcaccagcaggaaattgataatattcaatggagaactagaccgaatcagaagtggatattatccggcgttcttctacccaaaacttgcagagctttccagaacattcctcccgaagctggatacggtttactatatccacaatttcaagggagctaaagggggaacgcttttcaggtgttaccctgagccttggaaggtcctgaggaaggcgtcgtctgggagctacgtctgcctgcatcaacaagaggagatgccttcgttgaaggaagtggccctcgacatccttccttctgtatagctaggatctttcgggagttgttgcgttgcgtcaataagatcttcacctctttggttcatgctagaacaacaacgacgctttggcaaagtctgacacgtgctcatgctccggctgtccctgccacaaaggcgttcttgtacctgtgctccgggtagctgtt

SEQ ID NO: 93165 - DNA, 486 bp, Zea mays
  Clone ID: MRT4577_184954C.1
acaagctttttttttttttttttttttttttttttatttttttttatttttttttttttttttttttttttttttttttttttttttctttttcttttcctctctttgggctaattcccccccaccggcggcccccacccggggaaccgggcaagggaccaagccgggcggagggacggcccaagccggcccccggggcaaaacgggaccccctcacaattccacacaacaaacggagcccaaagcaaaaaagggaaaacccggggcgcccaaagagagagccagcccacaggaagggggcggcgcggcccgcccacttaccaaacggaaaacccggcccgcccgcggcctcaacgaatcccccaacgcacaggaagagggccaacgcccatagggaaccggtcccccgcccgggggacggaataggggctcttggccctcccccccccccgagcggaataacctaaaaaaaaggggggaatccgg

SEQ ID NO: 93166 - DNA, 281 bp, Zea mays
  Clone ID: MRT4577_184955C.1
cggacgcgtgggctccggcacgcagagccaaattcaccgctacatcgcgggcctgctggccctgtcatgccaagaacgccatttacacatgtacttatacatatatgtgctgattgtctcatttgattcaatgtgtaagcagtgagcaagatcagcactttcataatataaatatattacttgcatggaaatctagaagtagaggacgagtcagcagtaagcttaatgtcgatccgtcaaaaaattacaaatcatcttatgtcttgaaataaggagaagag

SEQ ID NO: 93167 - DNA, 230 bp, Zea mays
  Clone ID: MRT4577_184956C.1
gcgtaggctacctgcaataccagatccacttgcattcgacatggcagcaatcaggtaacatgggagggcgcatcaagcctacagtacacattacacgacacatgatcacgcataccgtataaacactcacaccttcgctcactgacatcactgtcaaaaatacgcacggtcattatgatacacacactggtcagactacacacttgatggactgcctcggatatatacat

SEQ ID NO: 93168 - DNA, 157 bp, Zea mays
  Clone ID: MRT4577_184957C.1
cccacagcgtccgcccacgcgtccggggactttaacgttacctaccctatatgggaggaggaggccgggctaacaatgtgcagaccaccgaccttacagctcaagtgcgacagtagccgaacgtacctgatcagatccgactaccaagcctaccaag

SEQ ID NO: 93169 - DNA, 802 bp, Zea mays
  Clone ID: MRT4577_184958C.1
ggccgcggacgacgcggatcgcgttccggacgaggtcggagatcgagatcctggacgacggctacaagtggaggaagtacggcaagaagtccgtcaagaacagccccaacccaaggaactactaccggtgctcgacggaagggtgcaacgtgaagaagcgggtggagcgggacaaggacgaccccagctacgtggtgacgacgtacgaggggatgcacaaccacgtcagccccagtacggtgtactacgccagccaggacgccgcctccggccgcttcttcgtcgccggcacgcagccaccgggctccctcaactgatccccggcggcccatcgcgacgtacggtccgctccaccctaccaccgcacctatctggtttcgactcccagatggcaggctggcagctagctagtcggcggtatacactagtaagtagtagtaggataggccggccgacacccccgataggtgatcggctggtgggtcggtttcccgaggtggatttctcgtttgggtttctagcacacccctccgctcctccctcttttccccgtccttttcctgctccgatcatggaaagggccggcggctggctggctggctggctgttgcgatcgaatagtatgtagtggtggtggtgctgctgttcatgctgggttccaagagaggtttaatttcccattgccttgagctcagctaaattattagtccgggacggaaatgtagcatatactgcattgaccgtgtaataagatgtacagaagctgtcccaacgttggacacaagatacttagattatatct

SEQ ID NO: 93170 - DNA, 397 bp, Zea mays
  unsure (1)..(397): unsure at all n locations
  Clone ID: MRT4577_184959C.1
attacccccctataattatcagcccgaacacaaaaaaancaacgggggggagaatggaaaaagaacccccggtttttcaaaagagaaagaaaaccgccaaccgggggaaaaaagacacggaaaaaaacaacgcaccncccaccccacccccaaaaaaagggcccaaacaggcaaaaaagaccgaggccaaaacggcagggcaccgaagggcgcaaaaaaaaccaaacanccaggagggaaacaacacgcacaaggccaaccaaaggagcgaaggaacaaaacgggcaggggccagacaaccacgggaaacacccgcaccgagggggaaaccgaagaaagaccggaagggccaacaagagaggacaaaaggcccccggccagggaaaaagcggcaagc

SEQ ID NO: 93171 - DNA, 373 bp, Zea mays
  unsure (1)..(373): unsure at all n locations
  Clone ID: MRT4577_18495C.1
cactaggtggagcgtgtctccgtggtcttcttcaccgaccacnaggctggtgagaccctaggggggcgtggggcctgnacatcatcgcagtgctccccaccgtcaggtgccatcgtcggtcgaggttacagaatgtctctcgagtgtgctagagatgctttgctgcaaaagaccatggacaacaaagaaaatacaagtgaattattttcccgatctcgtgataagctcagagttgatctcatgaatatttctatgactactcttagttgaaaaatactttcccaaaaacaaggagtactttactaaacttgtgattgatgttgtcttgaggcttaagggtagcacccacttggaatctattgaaattctgaag

SEQ ID NO: 93172 - DNA, 599 bp, Zea mays
  unsure (1)..(599): unsure at all n locations
  Clone ID: MRT4577_184960C.1
aggagcagagagagatgggaaaacaatggcgggagaaggagacatcaagctgctcggcatggtggtgagcccattcgtggtccgtgtgcgaatggcactgcacatgaagggcgtgagctatgagtacatcgagcaggacctcttcaacaagagcgagctcctcctcaggtccaacccggtgaacaagaaggtgccggtgctcatccacggcggcaagcccatctacgagtcgctcgtcatcatgcagtacgccgacgaggtgtggagcggcaagggcgcctccatcctccccgccgacccgcacgagcgcgcagtcgctcgcttttgggccgcctatgtcgacgacaagatgttccctgcttacatcgacatcatgaaagcggcgacggaggaagcaagagcggagaaggccaaggaggcgcttgtggggttagcgaacctggaagaggccttcgcccaatgctcaaaagggaagcctttcttcgccggcgactccgtcgggtacctcgacctcgccgtcggatgcaacctgttctggctcgaggcgatacgcaagatgtnttggggtggacgttctttgacgtgggcaagaccccgct

SEQ ID NO: 93173 - DNA, 131 bp, Zea mays
  Clone ID: MRT4577_184961C.1
aactaggccaatacaattgccgctcggttttatttgtaccttctgaaactctcggctaggcggaatacaagtcgttctgggaatgttaatgactttagcctacgagagctacgcttaaaaaaaaaaaaaca

SEQ ID NO: 93174 - DNA, 375 bp, Zea mays
  Clone ID: MRT4577_184962C.1
atattttttttttttttttttttttttttttttttttgtttttatgatactacggaaccaatccttaccggtgggggccgtcccctcgccggcctcattttgaatgatcaacacttgctcaataacaaagtgcaatcctttatttttccaaaagtttcactctacagaaacgctcgttccaggaaattccccgcgggaaggctgttatccccttccttcctctttaccgttaggggtgagggctttcgccccttacagatgcaatatttgttttagcggggcattgtctattcgcgtcacaccccccacacacagttggacttccctccttggttatatactcctgactcctcccacgtcccttttttttccccc

SEQ ID NO: 93175 - DNA, 377 bp, Zea mays
  Clone ID: MRT4577_184963C.1
gcaaaagccctaggtcataatggtcagtcaagagctggagttattgacggacattcaggcgattactgagatgttcaggagcggtaacctatggagcggacatcattcgaacactgctaaaggttaacactacgaagcttgaaatgcaggtgggcctgatcgacctcagaatccgcatcatctggctctacatcgggcggagtctggtctggtgggcccaggacatccagagacatttcaccacccttcagaatggccttgacctaagcaaccgccacattagtgattataaagccagcgaggtgcaacttgccaaaatctggtgtatttgcgacggctcgtgaaaagtacggtgctctaacactatgaggcttgtt

SEQ ID NO: 93176 - DNA, 477 bp, Zea mays
  Clone ID: MRT4577_184964C.1
ggcgaaccccgtgtcgtgggccatttaaggggtcgttgcgtctcagttcggcgagaaccaaggcgagctttcagttcccggtgggaagcccctggtggtgaaccagttctttaaggataatctcggcatccagcatgacttacttggctatgttgtgctcgtccatttcgcctacatcattgggttttttttcgttttcggttattccatcaagttcttcaacttccagaaacgttagctgcccctctactctctgctgtctcaaacggacggtcatttgtaatctactttctcgtccgtcgaagcaactgcttgtttgggaagcctgtttgcaagtagccaagtactagtatattctcctctagcatgttccttcaatggaaaatgttaaaaaaagatgacgaatacataaagtgacatctttgtttagatatcggtgtcgtatctgttgtaccgtaataaaaaaattgttgggac

SEQ ID NO: 93177 - DNA, 334 bp, Zea mays
  Clone ID: MRT4577_184965C.1
cttaagccgtcccattaacgatgaagggttctttttcttgtctatgggcaacactgattatgttcttcaccacgagcctactcaagcgtccaactttgcattccacgcctaccataacaggttgttcaacgtccacaaggacagggttgggtatcgcaagtggtttggtgggaaccccgcctatgggggggctgctggtgcttgctctttttgatggagttctccctggactacacgaagacatgggtggcttatgacacgaaggctatcatgccaggaggtgaaaggacaaacactggtcttgtctctgtctgccgctagacgctcaagtctg

SEQ ID NO: 93178 - DNA, 538 bp, Zea mays
  Clone ID: MRT4577_184966C.1
caaaacacacacacatacacagggtcgatcatctccctgctgcctctagctaggtcgcagcttctactactatggagccatccaacaagctcgtcgctgtcttgctcgtgtccttggccatggctgccgccaccgtcgtgcagccttcctacgctcagaactcgccccaaaactacctgactccccacaacaacgcccgtgccgccgtcggcgttggcccggtgacctggagcacgaagctgcagcagttcgcggagagctacgccgcgaagcgggccggcgactgccgcctgcagcactccggcgggccgtatggggagaacatcttctggggctccgccggcgccgactggaaggcggcggacgcggtgcggtcgtgggtggacgagaagcagtggtacagctacgccaccaacagctgcgccgccggcaaggtgtgcggccactacacgcaggtggtgtggcgcgccagcactagcatcggctgcgcgcgcgtcgtctgccgcgacaaccgcggcgtcttcatcatctgcaacta

SEQ ID NO: 93179 - DNA, 584 bp, Zea mays
  Clone ID: MRT4577_184967C.1
gattctcttaacgcaccgttcgtagtcataagccaagagattcctaaataagagtgttttagactgtctccggtgggtaataagagtgaactaaatacgacgattggttcctacgcccccggcgacgtcgacggcactgcagctgcagccaactgctgcagagagatggggccacagatgctggtggcgtcggagccgtccgacgaccaggaccaattggtcacgagagcgtcggcggcctccgtggggctgtagatgtcccaccacacgtggtgctccggcgcgccgcacaccatctccttgctgacgcagcccaccgtggctctcatgggcccaagcccgcagcacgcctccctcgtctcctcgaaccgtggtcgggttggagatgatctccatcatccccttgtacacgtcgcagaacacaacgtcggcgccggccagcgccagccgcagctcgtccagcctcgccgcgagcctgccgttgtacccttggatcagctcgttcgcctcctcgacgcatcctgcgccgccgtcgcggacgggggacgaccgctcccacacgacgcgcggcgcgcaccccagcg

SEQ ID NO: 93180 - DNA, 621 bp, Zea mays
  Clone ID: MRT4577_184968C.1
cctcgaggccggccggacatactactcagctgaatcctactccacgtaacctttttgagtcgcctgagcgtgacacgatataacacgactccgtcgccgcttgcacagccgatggatgcgatcatgtcagacgcccgcctgatcttctccatcttccgggcacgctacaccctaaatctgctctagcactgaacaaccctcatctcaccaatcgactgccatttcaccaggttccgctcgcatatccgcccacctttcacgagacatctaatttctggccaaagctcagagtcgcgacgcctctctgtgcatatgctagcctgctcacctcgcttcacttgacgaacgacaagtccccgaatgtgtcatcagcatcgtcgactcctactacgtggattgatgtggcataattatcccctcaccacaggagctgacgatttgagaaataggtcttacaagggctgataagatcagagataggaatgtaggtgagctcctgtatggcaggtgagaactcctacgctgtcaagtcgacttggtgacccatgcatagaagatgatgaagaactagtaccatactctctgcctggagaataactgcagaggctaagacgtgcgcaa

SEQ ID NO: 93181 - DNA, 521 bp, Zea mays
  Clone ID: MRT4577_184969C.1
gaccctccagacttctgacatgttatttagttgataaggatattaactcctcaagagtaactgcactgcgccgcctccagccatactagtgtccctctaatgcatgccgcgagcttaaactgggatttatccaacaaacacaacggctcacaagataattaaccggaccatctttcccaagtactggaagcattttgcagcttctttcaagcacaagttcctgtccttccgagtccagtgcttgctgagctcattcagcttctccctggcatcttttagtagaagttcagcatcagtatcccacttgtagaactccagctcccttccttccagaatcttttcgcagatcttattgcaggcgacatcggtggactcggccacgacccgctcgatggttccgaagacgagcctgctgtccaccaggtatcgcacgaacccctccatgctgggcatccattccccttcctcgagctcgccctcatcctcctcctcgtgttcctccttcacgccgccgccgtcgt

SEQ ID NO: 93182 - DNA, 1875 bp, Zea mays
  Clone ID: MRT4577_18496C.1
taccgaccacaaggctgctgagaccctaggcgggctcgacctggacgtcatcgcagtgctccccaccgtcaggtaccatcgtcggtcgaggtccgtgactgagtgtgacgtgtacctgggcgagttcgcgtacagggagcggctcaagcagttgtctctcttccagatcccccacctcctctttgttccctcggcttagccaccaccttggtcggtgctccttgcacatcgggataggaggatgccgaccaagttcgagatgaagagcaactgatttgcttcccttggatggattccactgttgagccattcaaaatttgagatgcagattaatttttacaattcatgttttcgagatttaccttccaattttcttagtaataataataatagtataggtagtgcaccatgttttgattctaatctatcttgggtcacctgttttataccgaggtaacacctgttttataccgagataattagtatgtattctgagcttcaatcattgttctttatggtgagattcaatgtctccagttaattcattttgtaaattttaggttacagaatgtctctcgagtgtgctagagatgctttgctgcaaaagaccatggacaacaaagaaaatacaagtgaattattttcccgatctcgtgataagctcagagttgatctcatgaatatttctatgactactcttagttgaaaaatactttcccaagacaaggagtactttactaaacttgtgattgatgttgtcttgaggcttaaggtgtacaaatggtttaatgaaagttggttatcatttacattgaactatgatatcttcatctataaaattttactcttcaaaaaggtagcacccacttggaatctattgaaattctgaagatacatggagaatctcttaaggactgggatgtgccaactgccgagacttgcacacgtcacaaattaaagctgtttgcattgccggctaaccaagctcaggtataaacttcataattagacattctagatcttagttggccgacttgatcataagccactatccaaagcaaaaaaaggaaaaaaattgaagatgcaactctcccctttatttgagagaaaatgaaggatatatcagtgtgtttggtaccctgtagctcctcctcgacctggctatttgatcaacgccactcgtttccgtttatttctggccaggctacaggcgtgggcgctctcagcgcactggtgcaacagcttaagctcaggcacgtatttcgagcgagctttttagttttttctgttttgctgtattttttgcattatatggttagtttattatccttaacaaagtgataaaaggatattatggtatgttccaacatgtcccctttcatatatattaagggtgctgatgattctcgcataaagtgcatgtctctaaccactctatctgctacataccatagtcgtggtgttgttacaatcttgttcccattgattttaagtttcctttgttaattacatgtttatttcagtgtgcctccctaatatgttgttaattttgatgtcttactcttattcacctagctaatgctagatgaaattcctttcaaggaatgatttgctgcattttgttggatgttgtcctaatcaacccaatttccttttctgcaatgaggcatcatatatttatatttatacggattgtctccatcctcttgatagcgatctatactggttatttccgaagaagaatcaagaagcaattcaacattcaggcaagtgtggtaccagattgagacatgtctgttagtttgtaacaatataaacttgttagttatgtgtcagagaaaacatagtaacaatgatttgtgctctatttctacc

SEQ ID NO: 93183 - DNA, 1227 bp, Zea mays
  Clone ID: MRT4577_184970C.1
gcgtacgtatgctcggaattcggttaaacccatgccgctaatcgacgccgccgcctcggcggtcgcgccgcccccaccccggcgagtggctcaactccgcttcttcagcactcgcagacccggaatcctatccctaactgccaccagctgctccccctcccctccgcccccggtcgctgcggaggtgcctgcggcgccacaggaagcgaagtcgaagccgaggccacggcggtacccgaagcagtaccccggcgagtcggtgggcgttgctgaggagatgcgctttgtcgccatgcgcctgcgtaaccccaagcgcaccaccataaaagacaagtcggggacggaggacgcggacgccggggcgggggtgtcggagggcgaggctgaggaggacgacggcggcggcgtgaaggaggaacacgaggaggaggatgagggcgagctcgaggaaggggaatggatgcccagcatggaggggttcgtgcgatacctggtggacagcaggctcgtcttcggaaccatcgagcgggtcgtggccgagtccaccgatgtcgcctatgtttacttcaggaaaagtggtttggagcgttcagctagcatttcaaaagatttggagtggttcagaaaacaagggattgcaatcccagagccgagtacttcgggatcaacttatgcagcttatctgactgaactgtctgagagcaacgctcctgcattcctctctcattattacaatatctattttgctcatataactggaggtgtcacaataggcaataagatctgcgaaaagattctggaaggaagggatctggagttctacaagtgggatactgatgctgaacttctactaaaagatgccagggagaagctgaatgagctcagcaagcactggactcggaaggacaggaacttgtgcttgaaagaagctgcaaaatgcttccagtacttgggaaagatggtccggttaattatcttgtgagccgttgtgtttgttggataaatcccagtttaagctcgcggcatgcattagagggacactagtatggctggaggcggcgcagtgcagttactcttgaggagttaatatccttatcaactaaataacatgtcagaagtctggagggtcctttttggtgtaatagatgaagagggtcagcgagcactatatgattgacgctgaaatggcagaacgcaattgcttctttttttaaaaaaaaaaaaaaa

SEQ ID NO: 93184 - DNA, 246 bp, Zea mays
  Clone ID: MRT4577_184971C.1
tcgggcttcttggggcccggctcccgcgtggcggggcccgcttctacggcaactggtactacatcatgcgcgtcgcattcacggccgacaaggtgtcctcgtcgtcccgcgccgacgtggtgaaagtcatcaaggagggaaagaaacggctgccgtccgagttcgcgcggtgggccgcgggggaagaggacgccgacccctaccagatcaccttcgactaccggacgctgctggtgtctgactgga

SEQ ID NO: 93185 - DNA, 384 bp, Zea mays
  Clone ID: MRT4577_184972C.1
gcctccgtccagctgttgctgccgagagcccgagaggcctagcctgccgatgaagtggccgataagcctgcgagtgaggccgtgcgccgtacgcgcactgcgcaggcggacagcgcttcggtagatccatgtctcagcatgcgcgcgtggtgtgccagtctcgtcacgcgcgctgtcgcctactgtagagtacaacagcagaacgcgacggatttctctccagtctctgcgtgtgtaacagtgtgtgcatcatatatatagcaaagcccggtgcggactgcgagatacatggtctcagtatagtgtgctgactactgtgatcctggtggatcgtattgcgcaggcccatatgtgtgcctcttgctcttgatgctctggagagct

SEQ ID NO: 93186 - DNA, 489 bp, Zea mays
  Clone ID: MRT4577_184973C.1
atggggctcaggtggacggttatccttatgtcggccttctgtatcaggatgatcaaaggtggctttcggtatagggccctgaggcttactggtatggggtgggagatagtagtgttgttgaggaaaattaggcatatgaatttttgcatgtgcgacaaacttatcaacaaactccctcatgagtttgaatgtgtcttcataataattcttaagagattggacgtcttctattttacttacattgggggcacgtgcggtaggttgaagagatgccaggttgcattccccttgccggatgatctcctggtgttggtccacattgaagtgcgccagtcgataggttctctagagttggcttcacgatgttgcttggggatacctcagagtgatcctcagaactggccacttagggtcggacggtccgtgatggtgcaagaccttctaattcctcgtaggaaactagagcttgcccctagggagagatcttag

SEQ ID NO: 93187 - DNA, 270 bp, Zea mays
  Clone ID: MRT4577_184974C.1
aggagattaaggatgcttcttaacaacaggaatgtggtccttggacaggatgggcagacaaatagcggcggtgatgttatcccaaatattggttcgccagggcaaagtggtggatcgcgtaatgatatagatatactaataaagtagaagaaatttgctcttctacagcagcagcagcagcagcaaagtcatagccagcagcagcagcttcagcaacctgcgctctctggacatcacttgcaagttcagaacagttctccatcagcatgg

SEQ ID NO: 93188 - DNA, 389 bp, Zea mays
  unsure (1)..(389): unsure at all n locations
  Clone ID: MRT4577_184975C.1
ccgccagtgtgctgngattcgctccttagcagtggtaacaacgcagagtactttttttttttttttttttttttttttgcttttttttttttttttttttttttttttttttttttttttttttggccccatataaaaaacacatacattaaaaaaaaaggggggtgggtgggcttctaacttatttaataatctagggggggggaaacaaacagggttttaagggctatcttcatcaaaaaatggaccgggggaaaaggggccctgtttaggcctcactaacagggaaattttgggggccctgggccgccccggggggcgggccgttttgtcttggagggggtttgggcgagggctcccgcccctggggtggancggcccccgggtcc

SEQ ID NO: 93189 - DNA, 134 bp, Zea mays
  Clone ID: MRT4577_184976C.1
gcgatctgaagcgactagtcgaaggcggcggcggctgcgatggggagcgacctggagacgtgatggaagaagaccccggtggctctgatgcccatcgcgaagtgtgttggtggaaagaagctctgcaagcggac

SEQ ID NO: 93190 - DNA, 281 bp, Zea mays
  unsure (1)..(281): unsure at all n locations
  Clone ID: MRT4577_184977C.1
tccccctctccacttttccccacctcaccccttctctgcttcgtctccactcctccccgccgccctcgccccagagtccccgccgcgcgattgggccctgcaccctcctcggatccgctgccgcacgtcgtcgccaatcgacattccccgtttccctccgccggttcccgttgctgcacctgcctgctttacctccttaccgtttcctgaccctggggggggtcgcgggtttcccgntttcgcgcgctcgtgcggtggcgggctcccgcctggggcgccgc

SEQ ID NO: 93191 - DNA, 428 bp, Zea mays
  unsure (1)..(428): unsure at all n locations
  Clone ID: MRT4577_184978C.1
nnnnnnnnnnctttttttttataacacccgaaancggccggnatggggaaagaaaactttatacccaaaaacacggggcgacccccccnaaaacaaaaaaaaccgggcagaagagaggcaccaaaacaggggcgccccaccaaaagaagaccgcgaaagcgcgcaacgcagacacgagaaaaaaaacaccaccagagagagggcacaccccacagggggcaaaaaaacacacaacccccgagaggcaaccnggggcgccccccggggccgacgcacaaagacacagggacggggagggggccccgaaacaccacacggacaccacacacagggacacccccgcacaagacaccgggacagcacaaaacaagaaaaccccccacggggaaaaagacgcccccgaaaaccncaaaaaagacacccccaac

SEQ ID NO: 93192 - DNA, 818 bp, Zea mays
  Clone ID: MRT4577_184979C.1
cctcgaggccggccgggaaattctttctcataaaacgaccccaccccgaaaatctccccgctcacaaagcagtcctcccaccgcacgcaacgcagcctcgacctcgacctcgccgtcgccatggcgagcaagcagacccgccgcctcttcgtccttgccgccgtcgccgtatgcttcctcctcctcctcctcccagcctcctctgtcgccaccgacgtcgattactgcagtaaaaaggagtacccggtgaaggtgagcggggtgcagatcgtgcccgatccggtcgagcccggcaagcccgccactttcaagatctccgcttctactgataaaaccatcgagaaggggaagctggtgatcgacgtcaagtacttcttcttctacgtgcactcggagacgcgcgacatctgcggagagatctcctgtccggcgaccggcgacttcgtgctgtcccacgagcagacgttgccagggttcactccaccggggtcgtacacgatctacatgaagatggtcggggacgacgacgaggagctgagctgcatctcgttcggcttcagcattgggttcgtcgcctccagctgaaacccgcctgagctcagcacgccagaagtcgcccagcatggatgccattatgtaaaccactagaacataaaatttcgagaaagaatgcattacgaaggagacgctcagatttcttcaacctaaagcgcagaagtttgtcgactctgaaatgaaatggcttgcgtgccgtcgttgttcgtcaaaaaaaaaaaaaaaaaaaaaaaaaaaaaaaaaactcgagaaggggcgccggt

SEQ ID NO: 93193 - DNA, 460 bp, Zea mays
  Clone ID: MRT4577_18497C.1
cggacgcgtgggtaacacttctgcatatctgttaaataagtttcttgtgatctaacataaaggagttaccctatttctggatgcatcataggtgatgtgaagcgtgttggctttccaacatttgcttagtgcttctgcatagtgcattgagtagtactaaatttagttttgtgtggtctaggccacaccttatgctttgtacaaacaagcaagctaccatgatttctattggtgtgttgcagctggtctatgcatcacagttgttgtccttccattgaacgccgttgaattaattatgtcgatcaaatcaaaccctactcatgttcctgctgtggagctctgccataacgttgtatgtccatgtgatatattgctttcaagtccagttttggactgtccaatctctatctgtgctcaactcaagccgtgtggtttcatgttaattgatagcagcaaaaca

SEQ ID NO: 93194 - DNA, 294 bp, Zea mays
  Clone ID: MRT4577_184980C.1
gtaagaaacatgagattaggggagtcatccagttggcgagggggatcacccagtttaatctgagacaagtgacatatgaaagtgaaagcacattactataaaatgcatcataagccaaggatgaattgccacggtcacacctgatctcgccagtgatgcgtaccagcacagcaccctcacagttgaggttgttcacctcaggacaggattctgatggcagacgccattgatggacatcttttcacctgcatacttcgcgtggaagtacatgctcccaaggaatttattaccaaa

SEQ ID NO: 93195 - DNA, 165 bp, Zea mays
  Clone ID: MRT4577_184981C.1
ggccattctacggcatcatcgcaatagataggggagagagcattagatggggctgggggaactatatagatgcgcaaccgtttttgtcaggaaaatcatatgcacaactttccagggaacacaaaatagtcctgaatttctccggcggatcaggagagatttgct

SEQ ID NO: 93196 - DNA, 345 bp, Zea mays
  Clone ID: MRT4577_184982C.1
atgttgatattggaagagcagcaatctgaaatagatcaatacaataatgatccattgttgagttggaaagaagtggcatctgaatctgcatttagtgctggaggaagagttgttcacaaatatcgtagccgtttggaccctcaacttgtcgaggcacttatttgcacaaaggattggataagggccaaaagaaaagatccatataatgtaacttcacttcttgatgatttatctaatattattgacaccgtgagtgatgataatgttgatcatgatggagatgcttctgatgttgttgaccacaatgtcgatgataatgacattgttcaagtggaggaagattag

SEQ ID NO: 93197 - DNA, 914 bp, Zea mays
  Clone ID: MRT4577_184983C.1
aaggtagtttcagttccttcattgtctgcatcccccttcccctaactccgccgccactgccgtccgcgctcgccgtcgccccgaacctatcgcccactgcatttttccggcggaggtatgcgatgaggctgctgcaagcggaggagctatttcggaaggttctggaggtcgggtcgaagaataaggcggctcggctgctggggctcgacgtcggcagcaagtacgtcggggtggccatctccgatgagaagaacagggtcgctatgcctctgagtgttttgtgtcggacaaaaacaaacatcaacttgatggcagatgatttcaaaacattggtttcgatgtattccatagctgggttcgttgtgggctatccattcaaaatctatggtcaaccttgtgcaagtgcaatccaagtaagtcttgctggggaactttgtaaaacagggaaacttgatgatctgccctacgcatattgggatgaaaatttcacctcaaagtgtgtagaagccctcttgcatcccctgaatctaaaagacttggacgatgccaaaacaatgacagacaaatttgctgcagtctgtatactccagggttatcttgacaacatgaacagaaaactgagatccacagataagtctgaagcataaaggtggcacctaagattccagtttgaactaaaccaaagagcaagggaaccttttttttgatagaacaggaggggagggcccctactgaaaattttatttaaaatttgaaaagaaaacaaagtttagaacaaacaagaagacaaattacagggggttagggagagtttgtactgccattgttttctactgccattgttgaagccaagtcgggatggcagaatcaaatctacccaaagctctgtgaatgacaaggagcaattcatttgc

SEQ ID NO: 93198 - DNA, 1143 bp, Zea mays
  Clone ID: MRT4577_184984C.1
atcttgcgcgccagggccagcgcgcgagcgacctcacttgatccgctcccttcgccgcgacgacgttcctacgcagctgcggtcgacgcgcgcacggcagctcgctcgctagctgatcacgacagctcgctcggctcgaccgaatggcgccgcggctgctggcgtgcttcgggcgcggcggcggcggagcgacggcgtcggcgccggacgacgcgacgggcgagggccagctggaggcgccccccgctggcccggtgctggtggagctgttcgggtcgcaggggtgcggggcgtcgcccgaggcggacgccgtggcggcgcggctggcgcaggactccggctccggggacggcgccgtcgtggtgctggcgttccacgtcgactactgggactaccgcgggtggaaggaccccttcgcgtccagcgcctggaccgtgcgccagaaggcctacgtggaggcgctccgcctcgacacgctcttcacgccgcaggtcgtcctgcagggccgcgcgcactgcgtcggcaccgaccaggacgcgctcgcgctggccgtccgcgacgccccgcgctaccccgcgcccgccatcaaggtcacgttccagcggccgagccccgcaacactgcaggcgtcgttcacgggcaccctgcgcagccgcgtggagggcccaggcggcgcgagcgtgctggtggcgctgtacgagagcgggctggtgaccgactgcgggcgcggcgagaacaagggcaagtcgctgctcaacgaccacgtggtgcgccgtctcgagaaggtggccgccgtgcgggagggcgcctcgccgaagaagaccgtgtcgggcaccgtccagttcccgctctgggacggctttcgcgccaccaagtgcggcctcgtgctcttcgtccagaacgccgcgctgcaggtgctcggcgtccagcacttcgacctgcctgacaacgtctgagctcgtgacgcggtggggcgcgcgcgcgttccgcgttggctgcctccctgcggcgggcgtcacattctttgtatcactgtatgtagtacatcactggatggtatttagatggaaaacctgagtattctttatctccacgtatgttcttgttctgcattatggcaatggatcttctgttttgcacacc

SEQ ID NO: 93199 - DNA, 705 bp, Zea mays
  Clone ID: MRT4577_184985C.1
gttgccgtcttgccgacggatctgacgaggaaacgcggcgcgccggtagcagtatgcacgcagactggcgtgccacgaccatgcagccaccgctggagctctcgccgccggcacccgcccctagagaagtggtcgtcgcagagtggccatctaagaaaatctgccactgcttggtctctacctcagcctcatctgaacaccgtgtttgggcagacctaccggacagtctgcttcacctaatcattgctctcttaagctcattccatgatctccttgcttttactggcacctgtcactcttggcgtgctgcggtcttttccttcccgtcatccatatatgccttcgtcttcccacctctccatctcaaagcaggtttgcgtaaggctaatcgggattacggcacatggtattatcttttatcaaactacaaatggcgtctttgtgatcctgtgaggacagacttatctcttcgccgctcagctccccgtaatgctccaaattacattgcgctatttgggctgctcatatgggcatcttattttctcctgtttggagcaccttctccttgtcgacgtttacacatgtactaaggtgaagctgcccaaactccaagccaacagcggttgtgcgatctattgtggcattcttatggctccactcagttcatccagctcgtgtctcctccttttctcgaaatcatccatg

SEQ ID NO: 93200 - DNA, 944 bp, Zea mays
  Clone ID: MRT4577_184986C.1
tagtcttggatatgatgggggtgatggccatccttggtattcagctcaatgcaatttctgttgtaaaccttgttatgtcgataggaattgctgtcgagttctgtgttcatatcacgcatgcctttatgattggcactggggacaaagaaactcgtgcaaggcaggctctatccacgatgggtgcgtctgtattcagtggaatcaccttgaccaaacttgtgggagttattgtcctacgttttgcgaaatctgaagttttcgtggtttattacttccaaatgtatttggcacttgtcatcattggattcctgcatgggcttatcttcctaccggtccttttgagtttatgtggccctcctacaaaatgggcgaagccaaaagaacaaagtcagccaccttcagcttcaagtgagcggacttgacaggattttatttgagttggacggttacatactaaaaaatcgaaataggctagtttggtcggtgtgcgtccatgtgctgtcccagtggagcagcagcagtgaggcgtacagcatttgctgaaggtgaaagcagtcttacagatctgtagaaaatgttgtgcatatccatgttagcagccgaactaggttatttggtgttacagtgctacacatggcggggaaggaaactaagaggcgaattggggctcggtgttaactagttgactgcagtccgctggttgtttaatttgtgtcacccaagccgagagtcgagactcgaatagttttgtactgctgttgttttggtatttgctgtgggcattgagcttgtgtctaagttccatatgcttgcgaggcttgtttttatgagaacatatctggtgtatatgggagtttggtgtacatattaaatcaatgtcatttattagatctaagatctccaaaaaaaaaataaattttaaaaaaaacatctttccccccttc

SEQ ID NO: 93201 - DNA, 813 bp, Zea mays
  Clone ID: MRT4577_184987C.1
gtgatggccatccttggtattcagcttaatgcaattgctgttgtaaaccttgttatgtcgataggaatcgctgtcgagttctgtgttcatatcacacatgcctttatgattggcgctggggacagagaaactcgtgcaaggcaggctctatccacgatgggtgcgtctgtattcagtggaatcaccttgaccaaacttgtgggagttattgtcctccgttttgcgaaatctgaagtttttgtggtctattacttccaaatgtatttggctcttgtcatcattggattcctgcatgggcttatcttcctaccggtcgttttgagtttatgcggccctcctccaaaatcggcgaagccaatagaacaaagccaaccaccttcagcttcaaccgagcggacttgacaggattttatttgagttcgacagttacattacatactcaaaaattgaaataggctggttggggagtgcttcctctgtgcgtccatgtacatgtatatccatctcaccatctgtgtcgcattggaggagcaacagtgaggtgtacagcatttgctgaaggtgaaagcagtcttacagatccgtagaaaaatattgtacatatccatgttagcataactaggttagttggtgctagtgctacacatggtggggaaggaaactaagaggcgaattggggttcgatgtaactctagttggttgcagtccgctcgttgttctgtgtcacccaagagtcgagactcgagagtagtgctgctgtcttcgtttgatctggattcattccgtatgcttgtaaagcttgtttttataggc

SEQ ID NO: 93202 - DNA, 161 bp, Zea mays
  Clone ID: MRT4577_184988C.1
acaattttccatgggattgattgaggtccagctttttagctggcaggtcttaaggtttcagagtttttcctttcaattcatcaaggactaggccaacaatacatcgcaatgaagtacatgaagctcgtttcaaaacctgatactttctataccgaagaagc

SEQ ID NO: 93203 - DNA, 266 bp, Zea mays
  Clone ID: MRT4577_184989C.1
ttgtttttaaaaagacttgccttgactgccccactctgaaaacgactactagaatacccttgcttagcatcttaaggcacaaacacagtttcagaacatctgcgaatcaacaggttggttcctcagtgaagagctgaaggtgacatacaacactctacattgccacagaccattcattaccctcaatcagatgcgcaggactggtcagcagaacaaggactaacttcctgtaccatgcctgtggatccacacgggttggccccggc

SEQ ID NO: 93204 - DNA, 577 bp, Zea mays
  Clone ID: MRT4577_18498C.1
gccagcaccgagttccggacctccgccgcctcgtctccgctccctcgcactcgcagctccggctgctattctgcagaagtcggtagattggttttcctcatgggtcgcaccatcaagaaggccaagaaggctcaatccaagaagtccaagaagaaaactgaatcgtcctcgtcgtccaaccctgcgattgcctctggtccggctaaggtctggcaaccgggtgtagatacactggaagatggggaggagctgcagtttgatcctcaggcttacaattatctccgaggttttggcattggctggtcttgcttgagttttgatgttgtgcgtgatcaacttggactcgtccgttcagagttccctcatacattctatggtgttgctggaacgcaggtcgtgttaatctttatgccttgaaaacctaagcattgacaaaagtagccattgttactatcaaatcttgaaatgcttttgatgtctatcacatagtgctcttttgttatctataaataaactataacttgtacaagaattaattttgtactgttgttcctgctaagatatttttgaattgaaa

SEQ ID NO: 93205 - DNA, 492 bp, Zea mays
  Clone ID: MRT4577_184990C.1
ctccaccgcggtggcggccgccctttttttttttttttttttagacagcgaacacaacaattcttacttgccaaatgaaccctggtacggtaagtaattaacatcatgatacaaactggaaccagagcccgctaacgtgcatccgaccacctaacaatcaccagcgatggtcggtggcaaaggacggtggcgcctcaaaacacattaattgccgtaaaccaaaatggaggtgtatgcccatacgttgatattgacggagtttttgaagtggtctccaaaggttcttgagcggacctgggtacatggagtagggtttagtagcacggcctgcatcaaaaacccgaaaaggataacatggaaaggcggtctatcttgagctacttcaccttgagctgcacgaaggactcggagatcatagagccattaccgacgatcagcttcggaaacacgcagcccaacgcgaacagcatggaccagcggaagtggatgacc

SEQ ID NO: 93206 - DNA, 444 bp, Zea mays
  Clone ID: MRT4577_184991C.1
aaaaaaaaacaaaaaaaaaaaaaaaaaaaaaaaaactttggccgtacccccacctgcttcctgcgccgtccaccgaggggtacccctcggctggcagaatgacagaagaaccatttctgccgcgtgaaagggttttcaggcagcaacattactcccaaaacttgcccaagcccacctacctgaaggggggctagcacaagaacacctccgacgcaagggggttggcactcgctgcctgcaccatgtccatgatggaacgcggagttgccaacatgtttaatgaagcggccaacacagagggagaggccactggctaactagtgcgcctgtcttgccacggaagtcactacactcgcatacggtcgaaccctcttctctggcaaacgaatacggccaactaacaggcggactaccttttcgcatcaaaatcctgtgagaactcgc

SEQ ID NO: 93207 - DNA, 675 bp, Zea mays
  Clone ID: MRT4577_184992C.1
ccggccgggaccaccatttctatggcctaccattgttccttcgactacctcagattgcgaagagcgagcaatgcatacgcacacaccgtcacccaccacaactctatcctactgaataacgattacgcatactatgccggagggctgggccgttgatcagccgggcgggtcggttcgtggtgccttcctcgtttaagcgacgagagacctgtaatgtgcgcgcatcatgcgcgcgagtttcatgcatgtcatttagactatttgatcagctgcaaggtactgtgcaactgccacaacaacctggggccctacgcctcccacccagggaaagccggcaacgactacacccgttcttgtgacccgatcaccgaatgtcgcggctgatcatatctctctgtacgatgcgcgcagacacatcgtcaatgtcggacacacgtgcacgtaccaagactcaacgcgtaacgccacccgtgtgtatatatatactcgcatgaattatacattgaccggcaatcgttactgtatgcatggacactgatgattcttgcctcgcatatctgaggagtatactgatgcatgcggctcgacttttgatgattaatgcataagtatgacaaccaccaagaaaaaaatgaaatttgcaggacctcaacctccacgttgtgttccctttag

SEQ ID NO: 93208 - DNA, 501 bp, Zea mays
  Clone ID: MRT4577_184993C.1
gggaaaaggtactctccatgcactgctagttcgcacgcaggaaatcaccaattcctccgaggttgagcgaccatgtgaagacccgccgagggcgataaggtccgggcaaatggggcgacaagtggcgccggaggctctccgcgaccacatccaaggcatcgcgaagacgaagatccggaggctggcgaggaggggcggcgtgaagcgcatctccaggctcatctacgaggagacccgcggcatgctcaagatcttcctcaagaacgtcatccgcgagaggggagcctacacggagcaacgcccgccgctagaccgtcaccgccatgtacatcggctaggccctcaggcggcagggtcggaccctctacggactgccgtgaagagatgcgctaccgacgctgctgggcgtggcagaagtcttgggtcgaggtcaagaaatcctgagtactctggaggacgcggttatattcgcagcatcattatcactagtgcttattgtta

SEQ ID NO: 93209 - DNA, 319 bp, Zea mays
  Clone ID: MRT4577_184994C.1
gacccacgaatcagaacaagcactacgtgattcaatgaatcctgaagagatctaccttcttttgcaccacaaggtcgaggatgtcttgcaactgcggatcaagctgcggatgcggctcaggcggcaagtgcggcaagaagtaccctgacctggaggagacgagcaccgccgcgcaggccaccgtcggccgcggcgtggccccggagaacaaggccgcgcccgagttcctcaacgatgcggccggcgtccggccaagccgccaacggccgcacctgcagtggcacctgcaagctgcgaaccctgcaactgctgatcacag

SEQ ID NO: 93210 - DNA, 407 bp, Zea mays
  Clone ID: MRT4577_184995C.1
ggccgggccaaagtttctccccccaaaaaaattaaatcggggcggtttaagggaaataccaaaaagaaccggatatccttaaatcggaaaagggggaacgggaaaaatacccccatttgggccgaaaccccccaaaatggcccaacatggggaacccaaaagcttccacgggccaaaccaaaaaaattttggtccttattaacccccaaaagaacagggggggtttccaaaattgattcaggggggggccctttgggaaccagaccggcgggaaaaacttgttcaaattgaacggcagggagaaaaactttgggccccccgggtttttttggaacctccggaactttcccaacagggggggcccttgtccttccgaaccgggctttcctttacttgggggggggggc

SEQ ID NO: 93211 - DNA, 438 bp, Zea mays
  Clone ID: MRT4577_184996C.1
agtgaaggggcttgatttttttcggaaagcaccatggaccagaaagtagctgactccaaaccaattgcggtgacagtcgacgctgagaagcctgagaaaaccgctgctgtaatgggcaccacagtgcacaggtctatcaggttctcatatcggaaggcaggccttgctttgtgatcaaatcctctccgcttgagatgcacgtggccttcctggttgctttgtgtgatggtcagaaaacatagaagaataacctgcaactggagtgacagaatttcttttccccgcagtagacaggtgtgcgttattggttggaattatctccagtccactatcaattttttttccttggattttgattcattttatgtttcgatttgttgccttatatactgtaaagtcattggaaagaataaataaaacacgaatgttttttttgtc

SEQ ID NO: 93212 - DNA, 1152 bp, Zea mays
  unsure (1)..(1152): unsure at all n locations
  Clone ID: MRT4577_184997C.1
atctagccgattcaatcccagcaacagccgccctatcctcctcgtcagccgtcaccgccgccccacagcctcgcctctaccatcgcccccgccggtgctagctgcatccgaccaggaggtcagtgcccggcactagccgcatctagcctggtgattagtgctccacctcgctccagcctccagcccacgcctataggggcccctggctagcagccagccactggcggctaggtgggcaatggccccggccggcggccatgcctcgaggccggccgggccggctggcttttctgaagctgatggacatccttgtcagtttgtagaactcaagttgtttgcttggtctggtctagttgggttaccgcagttgacctgacatgcctttaaatcataaatccattgaatttcgatcctgattttgttcatagagcatggttaccaccttggctagcggcacaatatgctcattatgtgacgtcatcatttgtaggaggttgtctcagatcactggagctaacatgggaaacctgctatgcagaatgtttttgtgcctttttcatactagtttcttttatttccaatttcaaaatgaattacacaaataaaatgaccatttatatgtctacgtatctaacatttcaggcatcagaaaaattagcacatgcaaagaaatgggttgaaactcatattgaggctactaagatgaaatggatttctgttaaggagaaattggttgtcctaaaaaatgtagaaccttatgtacaaaaggtatcaacaagatgttaatgggctgaacttcatattaagacttctaaaatgaaatggattcctgttaaagacaaaattggtggtcctcacgaaaaatgcagaaccttatgtacaaatcggttgtcttcaaaatgttgatcttgtagctgcaataaagagaagcaacaatggcgctgatgctacatggttagaagtagcaatgttggtctggtagctccaagatttggttgttattgaataatatctatgataatatgttgataagtatatgtgatgatcattgatagttggtcaattataatgggntgtgcttcttgtgctacattgacatcgatgatagntataaaataaaatgggctcgcttgggnncaaatgtttgtgatg

SEQ ID NO: 93213 - DNA, 2272 bp, Zea mays
  unsure (1)..(2272): unsure at all n locations
  Clone ID: MRT4577_184998C.1
attgggtacctcgaggccggccgaacctaggctttctactctctcagccgaaacctctggccggcggcttccttctctctcagccgcctgggagatgtggcactgccgaccgcacctccctctcccttttttttgttcctgccgctcactttcgttcggccgccaggaagcaccagcggctggctctggccgactgcgccctgcacagagccacacagccgcccactctctgtttgctttctgtcttttttattcgtttctacttgccgcatggacatttctgcatgcacttggctgcatggccatctctgtcatgattttctccctttttttattcgatccccacttcacgtgatgtatgcttgtaagaaatgaataatatgtaatgggaatcgagatttggagggttttgaagcatggatctaaaaaaaaaaaaaaaaaaaaaaaaaaaaaaaaaaaaaaaaaaaaaaactgccactccactcctaccccacacagaagcggcggcggcggagcaaacgcaggcgaaggcgagggtgtgaggaaaggagcaccagccatggtgcacgtcaacttctaccgcaactnatggtaagacgttcaagaaaccaaggcgtccttatgagaaggagcgtcttgatgctgaactgaagctggtcggtgagtatgggctgaggtgcaagcgtgagctttggagggtccagtatgcactgagcaggatccgtaatgcattggtacctcgaggccggccgggaggtcccggtacccttctcgctcggttgctcgggagctttccccttcctgttcctgaagcttccgacatccgaccgcctcctcctcctcgttctactcgccgccccttctagaatcatccagaggcgtgccggtgaagcgcgagagcggtgaggcatggcgatgcagacgggggtcgcgacctccaaggtcctcatcctcgtcggtgcagggatgacgggctcgatcctgctgcggaatggccgcttatctgatgtgttgggagaactccaggagattatgaagggtgtaaatcaaggaacttcttcgggtccctatgacattgcacttattcaagctcagattcggaatttagcccaagaagtcagagatttgacattgtcaaagcccattaccatactgaatggcaaatctgactcgggaggcagtttatcatcctacatactgccagcagcagcagttggagcaatgggttattgctacatgtggtggaaggggttgtctctctcagatgtcatgtttgtcacaaaacacaacatggcaaatgctgttcagagcatgtcaaagcagttggagcaagtttcatcagcactagctgcaacaaaaagacatctaactcaacggcttgagaatttggatggcaaaatggatgaacaagtagaggtctccaaagctattagaaatgaggtcaatgatgttaaagatgacctgtctcaaattggatttgatgtcgaatcaattcagaaaatggttgctggattggagggaaagatcgagttacttgagaacaaacaggacgtggctaatactggtatctggtatctctgccaagtagcaggcggtttaaaagatggaataaacaccaggtttttccaggaaaccagtgagaagctgaagctctcacattcagctcaacctgaaaacaagccagtgaaggggcttgaatttttttcggaaagcaccatggaacagaaagtagctgactccaaaccaattgcggtgacagtcgacgctgagaagcctgagaaaaccgctgctgtaatgggcaccacagtgcacaggtctatcaggttctcatatcggaaggcaggccttgctttgtgatcaaatcctctccgcttgagatgcacgtggccttcctggttgctttttcttttttggcaacaaccttcctggttgctttgtgtgatggtcagaaaacatagaagaataacctgcaactggagtgacagaatttcttttccccgcagtagacaggtgtgcgttatttggttggaattatctccagtccactatcaattttttttccttggattttgattcattttatgtttcgatttgttgccttatatactgtaaagtcattggaaagaataaataaaacacgaatgttttttgtcaaaaaaaaaaaaaaaaacgtccgcggacgcgtgggaaagaataagaataaaaaaagaagacctgcaaatggtatgcactgaaacatatgaaaagagaacatcaataagattttattttt

SEQ ID NO: 93214 - DNA, 358 bp, Zea mays
  Clone ID: MRT4577_184999C.1
gtaggacaatacaacactctaaagtgagtcgtaatatcaactcctgctccaccaggggcacgagctacttcatcattggttctgccaagtcgttttactaagactgcgccactgtttctgtaaagcaaatggacgagatgatgaccttgcctgtggcaccagctcaccttgacattcatgacactccaatcaaggttgccccaaggaaaggaggcttctccttcagaacatgtaccaccaccggggaacggcatcaaatcttcctcggaacgatgggcacgccttccacctacgcctacacccaaactgctaacgaggttgtacccactgtctaccagagatggaacatcttcatgcc

SEQ ID NO: 93215 - DNA, 297 bp, Zea mays
  unsure (1)..(297): unsure at all n locations
  Clone ID: MRT4577_18499C.1
ggcacgcttttttttttttttttttcttttttttttttttttttttacgaggatgctggtaggtagccgatgcacaaactttccagcgttctccaagagaaattttacttgaaacattcaaagcataatacacgttctcagaccacttatgggtgtgcatcatgtgccggggcnttcaaatctcccggggcgggagagacgaggctaacttgttctgccctggctggggacgtctcctcntgttggggccttccggaacaccttccttcttcttgggcctccccctctcctttgctt

SEQ ID NO: 93216 - DNA, 299 bp, Zea mays
  unsure (1)..(299): unsure at all n locations
  Clone ID: MRT4577_1849C.1
ccccgactngtttttttgggggggggggggggaacaggggggtaaatgtaaaccttttcggggggggggggacaccctaacccgcctttttttttttaaatacctggggggcaaggggggggatttaaaaacttttccaacatgggggggggaaaaccccaaatttttttagaacagcccccctttaccggttggggggggcattttttgggagatcacgggttagggggggaaccctggcctgttggtggggaataagaaaatttttttaggcctgggaccccttggggccccttggg

SEQ ID NO: 93217 - DNA, 344 bp, Zea mays
  Clone ID: MRT4577_184C.1
gatatcactaggagggagaccttcaaccatttcgctagatgcttagaagatgcaaggccgggtgcaggtgctaacatgactgcgacgctgattggaaacaagggagacctttctcatagacgggctgtcagctatgatgaatgtgaacaattatccaaagagcatgctctgctcttaatggaggcatttgccaaaactgcacaaaacattcaagaggcattcattaagaccgctggtacacatatacaaaaccattcaagatggcctatccgaagcatcaaatgactaccacggcatcaaaggactctacacaggtcccaacttatctggacgtggaactggct

SEQ ID NO: 93218 - DNA, 236 bp, Zea mays
  unsure (1)..(236): unsure at all n locations
  Clone ID: MRT4577_185000C.1
gggaaaaacccccctcacccccccggncaaaaaaaaccccaaaccttggccccccataaataacgggcccgtaaccccccactcttcaacggcccaaccggaaggtggcacgcacgaccaaacccggaagcgggtggggcacaaccaggggatttttttaaccaaaccataaattcccccccgagggggatcgaacccaacacctggaggtgctactcaaaagccttaaccattac

SEQ ID NO: 93219 - DNA, 291 bp, Zea mays
  Clone ID: MRT4577_185001C.1
cctcgtacgctgtccatggctgattacgggcgcgactccaatggctctcagttcttcatcaccaacgtagatgaaaaccgtgtgcgcaagtagcttgacgggcgccacgtagtgttcggtaatgtggagttaggtatagacgtcgtgcgtaagatcgatgccgagggccagctcaatggtgtgcacaatgctatggtcgtcatagacaacagtggccatctgccagtacacgacgccggcggcacatcgtgatctctgttcgatcacccggagaacgattcacgatccatc

SEQ ID NO: 93220 - DNA, 268 bp, Zea mays
  Clone ID: MRT4577_185002C.1
actcctctatcaagcttcatgctaatcggcgcgcgtctgcagttgcggccagccatatcatggcgatgatcagcacgttgcatgacgatagagccgcgatgcaattagaagcactgcaggacctgaggttaatcgaccagcaggttgaccacgaccacttagccatagacgatctgtatcgttcgctcacacacacggacaactggttgcccgatctggacgccgtacctgcacactgcctgtcgctcctgcgcaacgacgatccgtt

SEQ ID NO: 93221 - DNA, 2057 bp, Zea mays
  Clone ID: MRT4577_185003C.1
ggtaccctcgggtctcggccgggcaatgacagaaatcttcatgaacctggagtttctgctcctggaactactccttccggggttgattgtggtccaggtgccctcatgatgccatctgcccctgctatgggaacagtggcaggactaaatcgaggtatgcctggtgccaagccaggctttccaaggattagttcaccagtaatgttaaatgctgttccatctggaaatctgtttcccaacagtgggcaaggtgtgctcaacacagtaaatgtccatcctggagccatatctggtcctggcaattcaatcttgaggccacatgatcctatgcaaacatttcgtcctggtcagggtatggaagagcataggcagatgtcggagtttgacatgccggtttcacagggaagcggccaagccactatccagtttagcagcatgaattcatctttctcgagtccacctgttcagcaaccccaacggccacatcagatgtcacaatcgttacacatgtttgggaatccacaccattctcagatccagggaactagttcaagctcacaacagcaggcatatgctgtgcacttggctaaagaaagacaaatgcaacagcatatggcacctcaacagcatagtgatctttctggagcaagtgcagtacccaatgtgcagagtaatactcaaacattgcagcagggccaaacctcatctgccaattcagccccttgttcaaaatcacagcatcagcgacagcaagcggcacaaaatctgccggatagctcttcatctcccaaccaacctgccacttttacacaacagaagcagaagaaacaacaggaacaacagcagtctagacaaaatgagccacaaaggaaccgtggcagtcaacaagctaagcttatgaagagtttaggacgaggaaacatgatggcccagactcctccaattgactgcacaccaaccaatgctgcttctactccatcaaaaaaccatgtgtctgaaaaactggtgcaacatggccaaggacatttccctgccaatacaacaccagtaccgtcaatgcctcaacctaggctagtcacttcgttgcctcagtcaccaacgaaggtggcagacattggtaaccaaggtttaaaaaagggtggttctttgggtcaggccatgttagctttgcaacaacctccacatggttctaaatcgacattgaccactcagctgcagcagcggcaggtcaatccgccacagaacaacaatgggagagcagtggtgcaacagaaccgccaaatgaactctgactgtaggacagacttgcacgttcggtcaggtccgtcacaatcagatggttccaacatccatgccacagagtgcagatttcgtgtagccctgtactgtcatctgtaaaccagcagaagcgtgagccatcgctcaatcagacttcagttacctcgccgtctaacctgcttaggtctcctaaagatacttcttttgggtagccaagacatgctacaaaggcaagttttcaggtggcttccctatacaggctcatggtgttggtgaccagtggaaccaacatggcagagagcaattgcagtctcagcatcagcagagacaaccggttgttcaaggcagtgcatatgctccttcaaattctgggcctggctgatcattaattatttcaggtttgtaggtttgagatagcgagctttctttccattgtaaagttactgtgcaggtacgtgatttgcattatttcaggttttaatgtgagctagattaggtaatttaattgttcgtgtttaatcttacctgaagtggggataggttgcagtctagtagaatgtagaaacactgcttccacttctttagcgggcactgcacttgtgtctgtcgcttctgcgtgggacgagcacgctgccatctcttacgcgagtccaagaggtggtctctgcacacctgatatgttccttttgtatcctcgtagatcatagtatatgtgcttgttcaagttaaaacaactcccgcccattgaatgaattggtattctatctatccgtttggtt

SEQ ID NO: 93222 - DNA, 345 bp, Zea mays
  unsure (1)..(345): unsure at all n locations
  Clone ID: MRT4577_185004C.1
gatctaatatttgactgaataatttgtgctagtgtaccatataacaacaaaagggggcaaattcttattcatcgacgcgagaaattggtaaagaggagagggaggggggggaagctttaccaccgggaccctatggagaaaaagacaaattggcatctccacaaccaaaactctctccagatcagtcatcaatcccactcctcgtcgctaaccatgtcgtcctcgtccttgggcggccggaccacgatgaccacctcggccgccgcaacagctatgccctgctcaaccagcttntttccccttttcaccacaagccgggctttcctctcgaggacgtataccccc

SEQ ID NO: 93223 - DNA, 367 bp, Zea mays
  Clone ID: MRT4577_185005C.1
tcccggccaaagaggcccctagatggcggccaccctttttgttttttatctggtgcgagtagtgtatgtcattgcattaaaaaggcaaacgccgtacaaggttccaatacaatgcctgacccctcacagaggagaaaggacctcatggtaaggtatagtgatgtaaaaatacaacataacgccctgttatatctaataatattacagtgctctaaaccagctgggaaggcagacaaacgcccagatatatgtgtcgtctccaccattaatataattgcctgcatatatatatatatatatatatatatatatatatatataaataaatatatatatatatatggctggatatacctatatatattcg

SEQ ID NO: 93224 - DNA, 536 bp, Zea mays
  unsure (1)..(536): unsure at all n locations
  Clone ID: MRT4577_185006C.1
cgggnaccccgcatgctcctaattcccagctagtatcattggacacatatcgaaacagctctagctagcgcggggggcgtctaacctggcttccggcatggcttccaagcagatcggagtcttgacctgcttcattgccatcaccgttctcgccttccgtccctgcgcatccgccgtgcccatggacggtggttgacttacgggtactacctccggtggcgggggaggctcctgacatgaaccagcggtcctttaagtatgcttgcgtgctccacacgctcacagccgcgcgtgagaggtttatgaccatggctatggcttctgcgcaagatcaggaccaccaattatgactgcgcagccacttatgcatctggacaccggtactccatcgcgaacatccatagtgatgccttctagtcagagtgtgatgcccctatgattgactagaccactgtcggccatagaggctggtatctcgaaagatggccacaccaccaagcatgctctcctagagttcactctgagctggcttctga

SEQ ID NO: 93225 - DNA, 250 bp, Zea mays
  Clone ID: MRT4577_185007C.1
gccaagcaggtagcaaacaacccaagaaagctcgacaccatacccatgggtcgatgactagatgtcgccttcggcattgatactctcctcttcgtcgccatggtggaggcaccgatggccgagaaaaagtcctctgacgccccctagcgacgacgcccaccgcccccgctgagtgaggttgctggcgatgtgacatagacgaaccggcgtgtggacatggtccccaggagaatctagcaaatatcctgca

SEQ ID NO: 93226 - DNA, 312 bp, Zea mays
  Clone ID: MRT4577_185008C.1
gggggggaacccacttattaacatagcaaatacccagatgatactttggtggggatggaacacacgcaatcctccaataagggaagataattttggagatacaaagggcacatgaaaactttgaaaatttgcctacaaatgcaaaggggattggatttggtttacagcaacgccaacatttgctttacatgcaaattatggctccacagggggctttagggtaataaacctcctaactttgtctttctccggggtttaaagcaaaccctttcaaacatttttatcaagggccaagccgatccttccgttttt

SEQ ID NO: 93227 - DNA, 2091 bp, Zea mays
  Clone ID: MRT4577_185009C.1
agagcgttcccccgcggctcctccacggcaagagctcgcgtgcgtacggctccatctgggagtccaccgtcaggaacgtcaagttcgtgtcggacaagacggtgaagccggtgtacattatcacccccaccgaggccgcgcacatccaggccaccgtggcgtgcgggcgcaagcacgggctgcgggtccgcgtgcggagcggcgggcacgactacgagggcctgtcgtaccggtccgccaagccggagacgttcgccgtggtggacctgtccatgatgcggcaggtgcgcatcgacggcaaggccggccgggaaacacgtacacggtgcagtgcaatccactcacctgctatgcgacatcaaggccccttgccttggcgctcctcttctgcgccttgtcagcctgcagccacgccgccatttcctacccaccgtcggccttgtccacggcgtgggtggactccggcgcgcagctcggcgagctctactacgccgtggcgaagatgacccccagcctcgggttcccggcgggcgtgtgcgccacgatcggcgtcgggggccacttcagcgggggcggcttcggcatgctgctgcgcaagtacggcaccgccggggacaacgtcatcgacgccaaggtggtggacgccaacggcaccctgctggacaggaagtccatgggcgaggactacttctgggcgatcaggggtggcgggggcgagagcttcggcatcgtggtgtcgtggcaggtgcagctcgtgcccacgcgtccgcccacgcgtccgcccacgcgtccgaggggggtcaaggacggcgccatcgacctcatcaacaaatggcagcaggtggcgccgtccctccccgatgacctcatgatccggatcatggccatggagcaggatgccatgttcgaggccctgtacctgggcacgtgcaaggacctcctcccgctgatggccagccgcttcccggagctgggcgtcaaacaggaggactgcaacgagatgccgtggatccagtccgtggccttcatccccatgggcaagtcggccaccgtgatggacctcctcaaccggacgtccaacatcaaggccttcggcaagtacaagtctgactacgtgaaggaccccatcccgagggacgtgtgggagaagatctacacctggctcgccaagcccggggccggggtcatgatcatggacccctacggcgccaggatcagctccatcccgcaggatgcgacgccgtttccgcaccggcagggcgtgctgttcaacatccagtacgtcagctactggttcggcgagggcgacggggcggcgccgacgcagtggagcagggacatgtacgcgttcatggagccgtacgtcagcaagaaccctaggcaggcgtacgccaactacagggacctcgaccttggcgtcaacgaggtggtcggcgacgtctccacctacgacagcggcagggtctggggcgagaagtactacaatggcaacttcgagaggctcgccaggaccaaggccaaggtggacccctgcgactacttcaggaacgagcagagcatcccgccattgctcaagtgatcgatgatacccggtcccatccagatcctttcgaccgcgccaagcaaaaggacgacgagtcgtacatgattctgctgattatattaattagattgatcctgctttgcatgcgttgagccaggtgctttgcatggcgagttagctacgtagttggcatcagccacatgcatgacattaaaacacaagctgacagccggctacccaagtaaataaggatacgcgacatacactgtcgtgccaattagtatggctgcttcttcttttttaatattattagtcaacattttatttcattttccttgtactgatgctactccatgcatcttaattatattcatatatatatacacgtcgccatatgacatttttcttgcgaaaaaaaaaaaaaaaaaaaaaaaaaaaaaaaaaaaaaaaaaaaaaaaaaaaaaaaaaaaaaaaaaaaaaaaaaaaaaaaaaaaaaaaaaaaaaaaaaaaaaaaaaaaaaaaaaaaaaaaaaaaaaaaaaaaaaaaaa

SEQ ID NO: 93228 - DNA, 2120 bp, Zea mays
  Clone ID: MRT4577_18500C.1
tgggtacctcgaggccggccgggaaaacgagtggggtttggggtttgggtgcttctctacggccgccgccagcaccgagttccggacctccgccgcctcgtctccgctccctcgcactcgcactcgcagctccggctgctattctgcagaagtcggtagattggttttcctcatgggtcgcaccatcaagaaggccaagaaggctcaatccaagaagtccaagaagaaaactgaatcgtcctcgtcgtccaaccctgcgattgcctctggtccggctaaggtctggcaaccgggtgtagatacactggaagatggggaggagctgcagtttgatcctcaggcttacaattatctccgaggttttggcattggctggtcttgcttgagttttgatgttgtgcgtgatcaacttggactcgtccgttcagagttccctcatacattctatggtgttgctggaacgcaggctgagaaagcttcatggaactatattggcgttttcaagctttctaacataagtggcaagaagcgggaacctataccagcttcagcagttgaagctgacactgatgtggatagtgacagcagcagcgatgaagaagatgaagagattaatgaggatacaaaacccatcctacatctaaaaaaggtggctcatgcggggtgtgtaaatcggatacgctcaatgactcaaaaaccacatataagtgctacgtggggagatactggtcatgttcaggtgtgggacttgagctcattccttaattctttagctgagtcagggacagctgcacccaaagaagacgacataatccacaaacacttacccctgaaagtatttagtggtcataaagatgagggatatgccattgattggagtccacttgttactggaagacttgtttctggcgactgcaataagtgcattcacctatgggagccgacttcaaacaactggaacgtagatgcaaacccatttgttggacactctgcaagtgttgaagatctacagtggagtcccacggaagccgacatatttgcctcatgttctgtggatggtacgatatcaatatgggatatacgtacagggaagaaaccttgtatttctgtcaaagctcatgaagccgatgtgaatgttatctcatggaacaagcttgctagctgcatgatagcttctgggtgcgatgatggcagtttctcagttcgtgatcttagatcaattgaggaggactcgttggtggcacattttgagtaccacaagaaagcaattacatctatcgagtggagtccacatgaagcatcatcattagctgtaacatctgaagatcatcaactaacaatctgggacctttcactggaaagagatgcggaggaggaggctgagttcagagcaaagatgaaggagcaggcaaacgcacctgaagatttgcccccacaacttctctttgctcatcagggccagagagacttgaaagaactgcactggcacccacagataccgtcgatgatcatatcaacggcaattgatggcttcaacgtgttgatgcctagcaacattgatacaaccattcctggcagcactgatgcagcaatgccatctgctgagccacagcactagccaacattgatacaagcattcctggcagccctgatgcaatgccatctgctgagccatagcactgatgtaggcgtttcttgtagcatggctcccagcttagaattccaggtctacgcagtggtgtatccgagtgcggttggcatttgtgttgagagtgctatgatgctatgtttgtgtttgagcatgatgggaaaggtttggttggctggcattccatgatatatgataagatttattaatatgtgcattctatgatatatgataagatttattaatatgttggcattctattaaaaaaaaaaaaaaaaaacccccagccgggtctccttaatctttattccttaaaaacctaatcattcacaaaagtagccattgttactatcaaatcttgaaatgcttttgatgtctatcacatagtgctcttttgttatctataaataaactataacttgtacaagaattaattttgtactgttgttcctgctaagatatttttgaattg

SEQ ID NO: 93229 - DNA, 159 bp, Zea mays
  unsure (1)..(159): unsure at all n locations
  Clone ID: MRT4577_185010C.1
cncagatcctcaaccagcgtttgatcgtctaccgagaagcccgagcaggcgagcagcggtttcgatcaggtgagcagcgtctcggctgctgcctgcccacgcctgcctccgcggcttcgtcggccgtcgaccgagcagccgagcagcggcgcggcggct

SEQ ID NO: 93230 - DNA, 279 bp, Zea mays
  Clone ID: MRT4577_185011C.1
atgtttttgtggatttttacagagtatttatatctgcacagcgtgtattttgttatatcttcttacaagcattgatattggggggtacatttataatagtgagaatatctggcagaatgtgtgaatgccatatctgtagatgacgatgaatgtgaagggttaatgtagaaatgtttgtttattctgttacagctcaaaatggaggctgagaatctctaccaccattcccttctctatttgagaatctctaccaccattcccttctctatttgggaaaca

SEQ ID NO: 93231 - DNA, 871 bp, Zea mays
  Clone ID: MRT4577_185012C.1
aattcggcacgaggcacttcccctcggtgccccggatcatgagtcaacagcgctccagcctccaggctcgtcttgcggctacttcctttggcacttccctccgttcctactttcctaggcaaacggtcgaacacctcagcggcaaggcgcggcgccaccacccatgcgcgctctacttcacctccggcgctggcaatctctacctctgatcgcgaggacctcctccacaatcactttctcatcctcctcttccgagcctcacgaaatccccaccatctactccttcctccagccatctatcttcgcgccgcgccccaggtcccaaccgccacagccgccgccgccgccgccgccgcccccgcccggagcccatgatcccgcccgcaggaagacgctccccgtcgctgacgccgccgcggtggagtccgacctcctcgccgccgtctccgagggccgctcggacgacgcgtggctcgcgttcaagtccctggccgcggcatcctgctcgccctcgccccacgccgcggcggcgctcgtctcccacctcgccgcccccgctggacagcaccgtctcggcctcaagcgtgccttcgccgcggccgtcttcctgctggagaagagcccgcacgcggcgcccgttccggagccagcactcgaggcgctcttctccgcgttcgtcgcggcggggtccgccgccccggcggtggcgcttgcgcgcgcgatgctccgctgcgggcgccgcctcccggcgttctccgtctgggggcacccgcttatcgagctcacccgcaccgatccgggcgccttcgcggccttcctgacgttgttcgacgagggctgcaagctcgtggtggaggagaaatcccctgcc

SEQ ID NO: 93232 - DNA, 185 bp, Zea mays
  Clone ID: MRT4577_185013C.1
cgcactctagcctcagcgcgcgctgcctcgccagcgcgcccgctgtgcgcctgcacaaaccgcgccagtcgccgcgccccgtagcgtcgctcccggactcgcacaccaccgacgacacgttccgcggtgtccgcgtcaagtggacctccagcacgcgcagcgtcgaccgcagcggcagcggcggc

SEQ ID NO: 93233 - DNA, 800 bp, Zea mays
  unsure (1)..(800): unsure at all n locations
  Clone ID: MRT4577_185014C.1
attgggtacctcgaggccggccggggctgaccttccccctcctcgtcgtcctccactccgccctccaacgccacggacgcgggacgcgtcccaattaaacccttctccttctctctctctctctcctctctctctctctctatttccgcctgccactctacgcgcgcaggaaaaaatcaggacagaaataagcggaggcgagggagtggaggaagggaacaacagacaaattctctgcggtgaatggaggtttcggccgagtgcgcgggcggcgggagtgtgaagaaggaggcggacctcttccttgtggacgacctactcgacctgccgtgcgacgacgacgacgaggagacggtggtgggcgactgggaagggaacgggagtaagcaggctgcggtgttggaatggggttgtggcgccggcggggaggagggtgccgccggtaacgcgtcgaagaacgaatcgtcggcggtgacgactgcgctggacagctgcaacaattccatctcggtttccggcctcgccgacggggacttctccggcgggctgtgcgagccggtaaaactcccgccaaagcctctcgttgttttcttccatgaattccggcgaactgttcggttttttacgcgttttgtcggaagaattcacggttccgctgatccgtccgagctccaccggcacccattaaaaagttctcttccaatggnagggaaacgtcgcccctgaatagtaactcatgcgagtatgcgacccagaaatagcggcgtcatcctgaacgctcgccactgcagtctgcaggc

SEQ ID NO: 93234 - DNA, 125 bp, Zea mays
  Clone ID: MRT4577_185015C.1
gttgatatctcatctagcgagcccagctctagaagatctgggaattcggaagctgtgtatcaacgagctggtggtctgctgctcgagctggtctaggtgactgatcagctggatcactgcaaatg

SEQ ID NO: 93235 - DNA, 616 bp, Zea mays
  Clone ID: MRT4577_185016C.1
tttaaattttcaacccagtttaaaattcgaaatatgcacagtcaaagaaatttcagtacgatgcaactatatttattttatattaagtactttgttcatttatttaggcaaaaatatcaagacgtcaagacaatatggtatttttaatgtgtagccaaactaaatatattgaaagtttctatatttattacttcattattttaggagaacataatatttagtatagggtgtctattaggagacactttacttaattatacttgagacgatttctttcatacctaataagggaataattctattaactaaataattgacaatacttttgattcgatagtgggataactaacctcatacgggtaccttttaattaactctttattaggaggggtatttaatttaggggatatgacttcaaaagttttggaaaaaaaatattcttactcaaaatgtttggaaaattttacctaattctcaaaatgagattttgaggtgttacaaatcctaccccccttaacagaaatctcgtccccgagatttgtaagaaaaggatataggaagaggggtttgcaatttagctttcagtttctaattatttcaaaaatcaagagcctct

SEQ ID NO: 93236 - DNA, 315 bp, Zea mays
  Clone ID: MRT4577_185017C.1
aagacacgccagacatcccatttacaatgggccacatagccgcccaaagcttaaggtacagctggtgagggtatggccaggtttccaacgtttgggcgttcagggactacaattctgagtgagtcagaatacgaagggcgactaacggaggaggagtataccggctcctagtttaggaaaaaaaactgagttccccctgccctgaggaactttgagccgcagagctaactagcagagcacacattacagctgggggctcagcgcaactaaagaggcatttgagcgggctgccattcaggagaagttccagtgatt

SEQ ID NO: 93237 - DNA, 343 bp, Zea mays
  Clone ID: MRT4577_185018C.1
gtaaaccctatcgaccgaccatggggttgttcccatgcaccgtgcggctggacctcgggtgcaccccgcgggcgtactccgttgccgctgctgcggacgcctacacgacgtacggagtgacatacgggggcgctcacctaccggggatgtcctatacggccgaggacgcggtctctaaggaggacgacctggtgaactgcgcgcggaagggctagatctgggccaagacctctaatgtcgcctgctgcgccgagaacatgattcacgccggcgcgtcaagataccactgcaacggggtcggcgtaaatttgcgtgcggcatcaggccatgccgattgtatgat

SEQ ID NO: 93238 - DNA, 340 bp, Zea mays
  Clone ID: MRT4577_185019C.1
ggggaccaaaaaaatttattttttttttttcccaagactttattacccagggacattccgaacccggggggggggggggttggagccttatgggggggttatttaaaatgggggggcccttaaaatttgggggccaaaattaacgggggaaaagcttggggggggacttttttggcctttttgttaaatggggggggaaggggggggccttaaaaccgccaaaaatttttgttggccttttggaaaaacgggaacaaaacggggggcagaaaaggttgggggggtaacgggtccccccgggttggttttttggggccaaaaaaaaaaaaatttttttggg

SEQ ID NO: 93239 - DNA, 265 bp, Zea mays
  unsure (1)..(265): unsure at all n locations
  Clone ID: MRT4577_18501C.1
atagttagagcttgcttttttttttaggataaatatataggaacaaaacatatcctcggggccccataaatatatgggccccccaaaccccatcngnncaaccaatcgtgcattgagacccccctccctgagcccaaagaccggcccccaacctgccggggggggtagccaaccgaaaaactctgtttttttttttctcaccccccccccccacaatacctatttttggcagcccgctcggcctctcttattattggtcaacccc

SEQ ID NO: 93240 - DNA, 117 bp, Zea mays
  Clone ID: MRT4577_185020C.1
agggccttcaggctctttcccatcactcttgctgccctcgtgtgtgcagtgttgtctgtgaatgctaaatctgccatcccttccagcccactgccaataaacagctatttaaggggg

SEQ ID NO: 93241 - DNA, 796 bp, Zea mays
  unsure (1)..(796): unsure at all n locations
  Clone ID: MRT4577_185021C.1
ttcggccgcggtctcccccgccccgtggtcttcgtcggcgcgctcccctccgccgccgcgtcgatctctgagtccgatgatctcgccgccgatctcttcacgcgcttcgcctgcagtccggtgttcctggaccccagcctccacaatgacttctacaacnagcttctgcaagcctacctgtggccgattccccagctccagtacctcctgccgttcacgcgctcctctgacagtggctgcctgagcttcaacgaggacctataccgcgcctacctcaccgccaacacgcagtacgccgaccgcgtgttcgagcatctcaactccgacgaggacctcgttctcatccacgactatcatctcttcgcgctccccaccatcctccgccgcaagtcgccgcgcgcccgcataggcttcttcctccactcgcccttccccacctccgagctcttccgtgccatcccggttcgcgaggagctcctccgcgccctcctcaacgccgacctcgtgggcttccaaaactacgattacggctgccacttcatttccgcctgctctacgctcctcggcatcaccagccgcgcccatggcgactacatttgcatcgactacttcggccgcgctgttgtcgtgaatatcctctccgtcggtgtcgacatggtccgcctacgtgaggtgttgtcgtcgcccgagacggcagcaaaggccaaggaggttgccacgaagttcgccggtcgccaggtgttgatcggagtagacgatggtgatttgttcacaggattgacgtcaagctcttggc

SEQ ID NO: 93242 - DNA, 728 bp, Zea mays
  Clone ID: MRT4577_185022C.1
cattgggaccctcgaggccggccggggtactgcttcgcaccacacactgacgcacaaagaattggattatgccggcaagagcgcgtgctatttgcttcatacctcaggatgaaggctgtcaggcatcatgatcatgggtcaccccctcgacttcttcaaccaccacctcaaccgcctcttgccgccccacagggctgacttctactccattatccatgcgatgaccgccctcccggaggccatcaaactcctgtaccctcccctccacaaggaccttccacacgggaacatcctcgacgttgtcggcgacttctgcgccgacaccttcgccctccacgagaatgccctgcgcgcgaattgccccgcatttcagcacgcaggcccgatgcttggcttccgggcgctgacgcttggtacatcgtaccctgaattgtacgatatgcacagaccccaccatttttgaagctgctataacgatgaccaaccaggcagctcaagtgatcccagacatcatgtctcctcttgatggaacaccacagcaactggcgcatcaagtgactcttatccgccaagatgatgagaaagtgttcgactatgggactgcagactatcgggaacaaagtgggaacaatgattgagatccccaccgcagctctggagcctgatgatatagcggagcaagatgaattcttctccttcggaacgaacgacctcacgcagatgacctt

SEQ ID NO: 93243 - DNA, 832 bp, Zea mays
  unsure (1)..(832): unsure at all n locations
  Clone ID: MRT4577_185023C.1
tttctatgttatatcaatgcaagccactgtacagtcatatgatctatgatcattgaacttcagtgtaaaaactacaattcttgtacatttcttattgtatgtctacaagtcgttgtcgtagctttgttgttattgtgaagtaccaaatgctaatggcatattatccattgcaaaagaagaaaatattgctttctcaacttcttacagtagatgctataacaatctttcatcaacttattgctagtatgtttggtgcttagtggatacaaagtgttttcagacttcagagtattggatagatactatggtttttcagaatactttggtagtttcgtttaaaaaacaaggtttttgtttgtaacaaaccttgtggttttgagaaccatggtactgctaaggccctgttttggggcaaattatttttgttattttagtaaaaaatactatagttttgtgaaatactttggtttcgaagggccctgtttgaatacaatgtatttttggagttttagaaaaaaaatcatgggttgtgaaatactttggttttagagtgctatggagtgtttggatgcaacaaactttatggttttgaatactatgttattgctaaaactgtagtatttntggagttctaaaaactcactcttgagccttgacctcttttttctatgggngatgtttgattgcactagaactcatagttgctaaaattagctgagatatccaaacggtctagcttatagttcagctattagctacttttaagcaaatggctaatagttagcaaactatttgttagctagctaattctactagcaatctttagctaact

SEQ ID NO: 93244 - DNA, 143 bp, Zea mays
  Clone ID: MRT4577_185024C.1
atttttgagtccctttaatatattgccgtgtatatagggtattctgcacatcgccaaatgtggcgaggtcttatacagatttctagccatttaactgtggaaaattgcaagagcaaaactatgatattttttcccggacgcct

SEQ ID NO: 93245 - DNA, 372 bp, Zea mays
  Clone ID: MRT4577_185025C.1
gggggtatcggattcaacacgcagccgccgccatgtgctaagcgaggtaagggaggttcgggtgcgaacaagttacggatgtcactgggtctaccggtggaggccacggggaactgcgcggacaaccacgggcgccaagaacctctacatcatctccgtcaagggcatcaagggccggctcaaccgtctcccgtacgtctgtgtcggcgacatggtgatggccaccgtaaagactggaaagcccgatctcaggatgacagcgatgcccgccgtcatcgtccgccagcgcaagccgtcgtgtctcaaaggactgcggctacatgtactgaagaacataatgctgcaagcgattgaggatcccaagggccagat

SEQ ID NO: 93246 - DNA, 376 bp, Zea mays
  Clone ID: MRT4577_185026C.1
tgtttttccaattgaagaagtggaaggagctgctaaagcgggatggttgatcaggttttataattcagaggtcagctttcttcaatcgatcgcatatgatttcttgtgccaatattttttttttgattcagcctgtgctgccctttgtcctagcatgcagaagtttatcttaacgccatgattaacagcttttatgactccgtccgtagtaaccccgagtctgtgtttcatttcatcatttgtgatatgggaatgttcgttactgttctctctctctcttttggctcaccggctgaagcccgttcaactgcaaccctcatgtgagatttctcgcatcaaagctcctttgcctaactttcgttgttgaacagatgca

SEQ ID NO: 93247 - DNA, 2434 bp, Zea mays
  Clone ID: MRT4577_185027C.1
gccggccgggctgcggacacatcctccgcggccgcggcgtcgcccgaggcctgcaaaaccctaaccactcaggttctgccggccaccgccaccaccaccaccagtccaccaccatgctgacagccactcccctaccccatcagctcctggccaccttcctcctcgtcctggcgtcggcgacccaacctgcagtccctgcctccaccgaccgcgcagcgcttctcgccttccgcgcgtccctgtcgccgccctcccgcgccgctctatcctcgtggagcggcccgctctcgccatcctggctcggcgtgtcgctccaccccgccacggcgccagccccttcggtcaccactccctccgttgccgaactctcgctccggggcctcaacctcacgggcgtgatccccgcggcgccgctcgcgctcctccgacgtctccggacgctcgacctctccgccaacgcgctttcgggagagcttccctgctccctcccgcgctcgctcctcgcgctcgacctctcccgcaacgcgctctcgggggctgtccccacctgcctgccgtcctcgctccccgcgctccgcaccctcaacctctccgccaacttcctccgcctcccgctctccccgcgtctctccttccccgcgcgcctcgctgcccttgatctctcccgcaacgccatctccggcgccgtcccgccgcggatcgtcgccgaccccgacaactccgctctcctcctcctcgacctctcccacaaccgcttctccggcgagatccccgccagtatcgcagccgtacggagcctgcaggggctttttctcgcggacaaccagctttccggggacattcctccggggatagggaacctgacctatttgcaggtgctggatttgtcgaataaccgattgtccggttcagtgcctgccggacttgcaggctgcttccagcttctgtacctgcagcttgggggtaaccagctctctggggcactccgtccggagctcgacgcactagctagtctcaaggttctagatttgtcgaataacaagatatctggggagattcccctgccgctggctgggtgcaggtctttggaggtggtggacttgtcaggaaatgagatctccggtgagctcagcagtgctgtagcgaaatggctgagcttgaagttcttatcactggctggtaaccagctctccggccacctacctgactggatgttctcgttccccctgctccagtggcttgatttgtctagtaataagtttgtgggtttcatcccagatggggggttcaatgtcagtgaagtgcttaacggtggaggtggtcaggggactccatcagagagtgtgcttccaccccaattgtttgtgtcagcttctgtggacacggtgtcatggcagttggatttggggtatgatgttcaggcaactactggtatagacctgtctgggaatgagctctgtggggagataccagaagggttggttgacatgaaggggttggagtatttgaacctctcctgtaattacttggctgggcagatccctgcggggcttgggggcatggggaggttgcatacgcttgacttctcacataatgggctgtcaggggaggtgcctcctggaattgcagccatgacagtgcttgaggtgcttaacctctcctacaatagcctgtctgggcctttgccaacaacgaagttcccaggagcattagctggaaacccaggaatttgcagtgggaaagggtgctctgagaatgcaaggactccagaagggaaaatggaaggtagcaatcaccgcggttggcttggtggctggcatggagagaatggatgggtatctcttggtgcattttgtatcagcacaatgactagcttctatgtatcattagcaaccttactatgctcctctaatgcaagaaacttcgtgtttcggcctgtgagggttgaatattaacaagaggggaaattgcaaaatcaggttgttttgaagttcgagcgactctggtctgcagctgattaacaagaaatatgagcatatgagatggatatcttcagccaagaggaagtgctgtctcttttaatgatcaatcaagctctcttgattgtttcctaatattcttgatcttgggatgtgtagatctagttctaatattcctactgttatagaatgcaatcacctgctggtgcttggttgtagccctggcgtgtttggaggattggacaccaaggatgcacataatttgaagcgctggtactgtgaaccacttcagatgtaaatattttctttggtttttagttctgatctagtttaaaactggacatgtatttagtgttgttgagctacctttcgatgttatattatgtcaatttgctggaagatcatttgataacaattgtctaatccagtggattagtcgtgtagattgtgaagtt

SEQ ID NO: 93248 - DNA, 739 bp, Zea mays
  Clone ID: MRT4577_185028C.1
cattgggtctctcgaggccggccgggaaatcgcctttgcccgcacacacggctcccattccatttccgctgcctgcctctgacgcgcacccacaccacctcgcctccctcagccctccgcagctcggcctctgcttgcgttgcgttgcgtgtgtatgtagtggccgcaacacaaaaatcaagagacgtgtatgtatatgcgacccccaacagccaacgaccggcctccaagcggtgggggtggaggagcagcagctggtgcaggtgcagcagcaggggacgacgacttcgccttctactgctcctacctccaggacgccgacgctgccgccgcctcagcgacgtcgacgctcgccctcgccgtcgacgaccccaaccccaaccccagcgccgcagggatgacgaacggccggcgccggaagcagcgcggggcagaggacgccggagccgccggggaaggggaggaggaggccaagaaggacggcaagaagcggtccatagccaagctgctcacctcgctggcggcgctggaggcggaggagcacgccgaccgcgcgggcgccgcggacgcgtccaggcgggagctggcgctgctcgagtccaacgccgacacccgctcgcaggccaccatggactactacgccaagatggagagcagcttcgacgccaccgccgagtccgaggccgccgccaggtccaagcgctccaggctcgccgcgtcggccgccaccgcggccgtc

SEQ ID NO: 93249 - DNA, 416 bp, Zea mays
  Clone ID: MRT4577_185029C.1
cacccgccacaggcattggcccatttttgacttactggggggtaaaaaaacccggggggggagggctacaaaattttggggcctttaagctgccaacttcggtggtgcctttcgacggggagccgataaattttacagcgtctcagggagatcttaaattggtgcccattaccacctatgggtttgcagctgaaaacaaacagaattctaccccccaggtgggtgccttggtaacctattacgggacccaggttcccccccatatgattggggtaaagggcttgaaactttttctggaaacaaaatccccgaatcaatggggcccaagatcccagggggggtgttttgacaaatttgcacctgcggtaaaatatccctttgcgccacaataagtgggggcctgggttctaaaccga

SEQ ID NO: 93250 - DNA, 283 bp, Zea mays
  Clone ID: MRT4577_18502C.1
acccacgcgtgcgctcaaagccaagcaacagcagcagcttccctagcaacaccttgcccctgagctcattatatgcgctgggggccacagtgagcttgagcatcatatccaggccaggctgtcagcagccaccggagattgagaggaagaaggacagcggcgtcttcttcggtgggggctgcggctttcggatgccgctgcactacccgcgctacaagaaggctgactactatagcattcctgagtggcgcgtcgacttgctgcttcgcgagtacatccttcc

SEQ ID NO: 93251 - DNA, 730 bp, Zea mays
  Clone ID: MRT4577_185030C.1
tgggtacccctcgaggaccggcaccaggatcgcctttgcccgcacacacggctcccattccatttccgctgcctgcctctgacgcgcgcacccacgcctcgccttcagctctccgcacccacgcctcgcatcgccttcagctctccgcagctcggcctctgcttgcgttgcgtgtgtatgtagtggccgcaacacaaaatcaagagacgtgtatgtatatgcgacccccaacagccaacgaccggcctccaagcggtgggggtggaggagcagcagctggtgcagcagcaggggacgacgacttcgccttctactactcctacctccaggacgccgacgccgccgccgcctcagcgacgtcgacgctcgccctcaccgtcgacgaccccaaccccagcgccgcagggatgacgaacggccggcgccggaagcagcgcggggcagatggcgccggagccgccggggaaggggaggaggaggccacgaaggacggcaagaagcggtccatcgccaagcttctcacctcgctggcggcgctggaggcggaggagcacgccgaccgcgcgggcgccgcggacgcgtccaggcgggagctggcgctgctcgagtccaacgccgacacccggtcgcaggccaccatggactactacgccaagatggagagcagcttcgacgccaccgccgagtccgaagccgccgccaggtccaagcgctccaggctcgccgcgtc

SEQ ID NO: 93252 - DNA, 313 bp, Zea mays
  Clone ID: MRT4577_185031C.1
ggagaaattccctttttccccggtggggtttttcccaaaggggcccccccggttcccctttccaaaattttgcccaccttgattggcaatgggaccccccctttttggggccttttaggcgggggggttggggggtttccccccagggggccctttccttttgccgggcccttagccccgtttcttttggttttttcccttttttttttggcccttttggcggttttcccccggaaggttttaattgggggcttccttttggggtccctttttggggttttagggccctttgccccaaaaaatttttttgggg

SEQ ID NO: 93253 - DNA, 158 bp, Zea mays
  unsure (1)..(158): unsure at all n locations
  Clone ID: MRT4577_185032C.1
tcgcaggttcttaaatttcaaggaaccccaaaagtttgtcctgggcctttgcctcctgtttaatgctgttttttttgttaagtgatctttggaatgttaggtccatggacatttctactatgaaatntgaaagactatggcattggccttttttggtg

SEQ ID NO: 93254 - DNA, 143 bp, Zea mays
  Clone ID: MRT4577_185033C.1
cattcgtcacgcatgcgtgacgcgcacgcgtcaacttgagccccgacttccaaaagctgctaagcgtagcactcaatatcatcatcgaagcgttctgcaccatgttcacatgcataacgctgacagcgctgaacgcatgatct

SEQ ID NO: 93255 - DNA, 597 bp, Zea mays
  unsure (1)..(597): unsure at all n locations
  Clone ID: MRT4577_185034C.1
aggataagaaacagcgcggcggcaggcagctcctcctgcgactgcgagcgcccgtccatggcgtccatctccccttccctccatcacccttggtacgctatgcgcctatgctccctcttcctgcacatcgcctctgcttcttctcaatagtcaatagccttccctcgcgcggcctcgggcacgggatctcttggacacataaatcgctgaaattttcttctctgccgacctttgctgagggctgaggcgcaccaagtgcggactgcgtcgtgttttttttctttcaaaaagccggcgaaaaaagggaatccgtcaaatgcagccatcaatcttatcgcatttactattaaccgcaggaagtcgcaggcacatttgttcacaccaaatctagcttgggatggcattggcaatactatatatctcaagtagtcaattggggtaccgattcggatgggtttagttctcagtcttagctatcttcaacaggttaaccatactcatccctatatttagacttcattctacanaacagggtgaaacgtgttttgaatgaccatatgagtaaagtactggacacgatcttaacttttagccctg

SEQ ID NO: 93256 - DNA, 632 bp, Zea mays
  Clone ID: MRT4577_185035C.1
gatttccataacggagacctacagagatgatgccacgagcagcgacccaaaggacacggagacatggtcggctcgccggcgctcgccggcgtccactccttctaggcgtccgcgtataaaaacatcctcgttccctcggctccagtccccgcggcggcacgtcgcgcgccgctgcccgtcgtcgtcaagaacaagggggccacgccccaaaacgagcgcatcgatccgccacgagcgactgcacaagaaggtaagacgcaccacggttaggccgaggtctcagtgttttccgctcaaacaagcatctgtacactcaagtcatccacctatcaaagcaatgtactctgccttcatcttcgagcatgcacaaatctcactccaaggaaatagaatactcgagtgggtcaacgatcgaaataacacaaaagattcgcgaggtgattgacaagacttgcttgtagaaactgatcaccaagggtgtcttcgagctaggggatttccactaccatgaccgcatagaggctctcggtgaatatgccctagagcacgggctggaattctgagacgaacagccgaatgttcatatctccaggagcacctggagactacttcttctgttggtctctccatat

SEQ ID NO: 93257 - DNA, 195 bp, Zea mays
  Clone ID: MRT4577_185036C.1
gggaaaaaacaaagttatataagctacattttttaaattttagggaaagaaatcgcatttttacacacaattttaacctgggattataaaaacttccgaataaaaagctgggaaaagctggaggggtacttttaactctcccttttgaatttaccagggtgggaaacactatccaccaaaaaacctttgcttgtt

SEQ ID NO: 93258 - DNA, 306 bp, Zea mays
  Clone ID: MRT4577_185037C.1
ggacgacgcggtagtcctcgcagcaaggccgaggcctgatgcagcagcagcggtcgtcgtcgtcaccttgcgccgcatgaacagcagcggcgacggcaggatgagctacgccgacaactccggcttccagcgggccatcgcttccgtcaccaagaatgccaggcaggaactggcggcggcgctctaccgcgcccgctgccgaccgagctccatggtcatcgccgatctgggctgcgccacggggcccaacgcgctgctcatggtgttggacgctgtcgatgccgtgctggcggtggcggatgagag

SEQ ID NO: 93259 - DNA, 416 bp, Zea mays
  Clone ID: MRT4577_185038C.1
ccaaattagcgagcaggcagttacagacgcggccacgacggcacatcgccgccgtagtccttgaccttgctccacaaccccggcccgactcggcgtcctccgccaccctcctcctgggcagcgccggcggggggatatggcatcggagtacgtggtgggcaagagcaggggcgacacggccgtcaccaccatcgtcaacctggcggaggaggccaagctcgcgcacgagggggtcaaggcgcccggccaccagatcctcaccatctgcaagtcgctcgtcgccggcggcgtagcaggcggagtacaatggccacttctccccaagcgaaaaaaatctgctagaagacctttagagggctttaacattgggatggatatttgggcccttaccttgctttaagtggagattcagtttt

SEQ ID NO: 93260 - DNA, 1495 bp, Zea mays
  Clone ID: MRT4577_185039C.1
ccggccgggacaccgcacacgcacgcacgaacgcgctcccaccccctcccgccgccaccgtcgccaaaaccccggcccgactcggcgtcctccgccaacctcctcctgggcagcgccggcggggggatatggcatcggaggacgtggtgggcaagagcaggggcgacacggccgtcaccaccatcgtcaacctggcggaggaggccaagctcgcgcgcgagggggtcaaggcgcccggccaccagatcctcaccatctgcaagtcgctcgtcgccggcggcgtagcaggcggagtgtctcgtactgctgttgctccacttgaacgattgaaaatattgcttcaggttcaaaatccgcacagcatcaagtacaatggtactgttcagggtctcaagtatatctggagaacagagggcctccgtggacttttcaagggcaatggtaccaattgtgcaaggattgttccaaattctgccgtgaagttttttagctacgagcaggcgtcaaaaggatgctcagcttactccgctcttgcgccttggagctggagcatgtgctggtatcatagctatgtctgctacttacccgatggatatggttaggggaaggatcactgttcagacagacaaatctccctaccagtaccgtggtatgtttcatgcactgggtacagtctaccgtgaagaaggctttcgtgctctatacaaagggtggcttccatctgtaatcggagttgttccatatgttggtctcaacttcgctgtatatgagtccctcaaagactggctactccagacaaattcatttggccttgcaaatgacaacgagctgcacgtagttacaaggcttgggtgtggagctgtggcgggaaccattggccagactgttgcatacccgcttgatgtcatcaggagaagaatgcagatggttggttggagccatgctgactctattgttactgggcaaggcaaagaagcactccagtacaatggcatgatcgatgcattcaggaagactgttcgtcatgaaggcgttggtgctctctacaagggtcttgtgccgaactcagtcaaggtggtgccctcaattgccattgcatttgtgacttacgaggttgtgaaggatgtgctaggagtagagatgaggatatcagactgaggatggccgttttcaactgctatttttgtaggctttgggaagttgtgtttttttttgtaggcagggcgggtagaaggatatgaccgcggctccattcagcatcaggccctctctggcttcaggtcctagaattgtttgctgggtcgtgcaaaaagtaataagtcggctgtaaagcttattaagcatctgcctaactcatcaaaagaaatctattccttattgatgatgtaccgagatttttgaacttaaagcggtactacgtgctgctaacagttgattaatgatttttctttgcctctaaaaaaaaaaaaaaaaaagcggccgctggtgatttttg

SEQ ID NO: 93261 - DNA, 512 bp, Zea mays
  Clone ID: MRT4577_18503C.1
ggccaaggccagcggcggcacggcggccgtcggcggccagcagccggagcgcggcacgttcagctgcggcttccggatgccgctgcactacccgcggtacaggaaggcggactacgaggcgatgccggagtggcgcgtcgactgcctgctccgagagtacggcctccccgtcgccggcgacgtcgaggacgagaggaggttcgccatgggcgccttcctctggcccagccagtattgactctccttcttacatctcgccactcggagcagaggccggtcagcgagccagcgcctggcagagactgatcagcagtggcagcagcatcaacatcacgtccccatgtatgaagaagacgagatctcgtgacaatattacatattcttatcgtatcatctaatcgtatctccaatcccccatagagaatatatatcatgtttcttggagtatatgtaagcagtggaagaaggggttgtttctgatattcatacgtgaaatgtagggcttcgtatgg

SEQ ID NO: 93262 - DNA, 375 bp, Zea mays
  Clone ID: MRT4577_185040C.1
agaaggcactgcttgaagagacagctccatgcctgatgtttgcaccggcggacagaccgtaggatcgcttgtcttaggctgtgaagacggcataatgactgtgaaaaccctgcgtgcacaggggaaacctctggttcatgatggcagctgcactcaagaccatacggaggactttggaggctcgaactggctccttgaggcataatggcatgaagaccatgacgacctcttggtaacatgtgccaccctggcgtcatgactaaatcggcctcaaaggtgacctcatcataacggtctaccattccgcggaggcaatggagctatataagcaaggtttgttgctcttacaagccatggaaaaggcgacttacgtga

SEQ ID NO: 93263 - DNA, 932 bp, Zea mays
  Clone ID: MRT4577_185041C.1
aaacgtccgccccagcagttgctttttattcacccgcctcccccttgtcgctcctccacaccgcacacgcacgcacgaacgcgctcccaccccctcccgccgccaccgccgccaaaaccccggcccgactcggcgtcctccgccaacctcctcctgggcagcgccggcggggggatatggcatcggaggacgtggtgggcaagagcaggggcgacacggccgtcaccaccatcgtcaacctggcggaggaggccaagctcgcgcgcgagggggtcaaggcgcccggccaccagatggttggttggagccatgctgactctattgttactgggcaaggcaaagaagcactccagtacaatggcatgatcgatgcattcaggaagacttttcgtcatgaaggagttggtgctctctacaagggtcttgtgccgaactcagtcaaggtggtgccctcaattgccattgcatttgtgacttacgaggttgtgaaggatgtgctaggagtagagatgaggatatcagactgaggatggtcgttttcaactgctatttttgtaggctttgggaagttgtgtttttttgtaggcagggcgggtagaaggatatgaccgcggctccattcagcatcaggccctcttgccactggcttcaggtcctagaattgtttgctgggtcgtgcaaaaagtaataagtcggctgtaaagcttattaagcatctgcctaactcatcaaaagaaatctattccttattgatgatgtaccgagatttttgaacttaaagcggtactacgtgctgctaacagttgattaatgatttttctttgcctctatcaaaaaaaaatcattaatcaactgttagcggtactacgtgctgctaacagttgattaatgatttttctttgcctctatcaaaaaaaaaaaaatagaaaaat

SEQ ID NO: 93264 - DNA, 825 bp, Zea mays
  Clone ID: MRT4577_185042C.1
cctcgaggccggccgggaagcaatctctgccaacttcaacctcacaacatgcccaactccgcctctgcggccatcctggtcaccggaatgcttatcacaggctgctccaacagcctgtggtcgaaatttcaagaccaacaatgtgtggagaattgtgacaaccccgatccaacgactcatcggaacttcgagcaaccagtatggcaaacgctgaacatgtttgtgggcgaagcgtgctgtttagtggcgtaccatctgatccagagggtatcaagacgtcgggggattcgcacgcagtcggactacacggcgctgccgcaagaagccagagacgaagaagagttgcaggaggaggaggagcagcagcaagaatccacccgcgggaacctccagtcggccgcctcactttctgactccctcatccagcccgcccatctcaaacctcacatccgccccattcctacccctctcgccgtacatggcccctcccccgctcccctcgctacctccctcgaaccccaactgctcgtcaatcgacacgaaccatccgtcccacagctcgtcggcctccagaaattcatcttttggtggcccgccttgttcgacatttgcggaacaactctcatgaatgcagggctattatttgtgcccgtatcggtgttccagatgatccgaggagcgctgccgatctgggtgggactgttttcgatcgtgtttctgaaccgccacctttcggtggagaagtggattagtttggccatcatcacctcgggcgtggcgcttgtgggctatgctggctccttacaaacctgcccatcatcctat

SEQ ID NO: 93265 - DNA, 678 bp, Zea mays
  Clone ID: MRT4577_185043C.1
tatttgggcccttaccttgctttaagtggagattcagttttctgttttcacttaatatgacaactgaagagcgaaagactttgaagggcacagagtcttcagctccttctgttcctcctgatggaggagtcagcaaggaacctaaaaaagggggagattacccaatgggaggacaactggtccaacacgtcgctcatccaagggcaactggactctagaagaggagttggtgaacacccatgatctgtagatgtcgcagttggaagggtccaggaagatttatgcacagggagggtacaactattgattgggggaaatcaggcagaggagggcatgttgacggaccaagtggcgaggcaaaattttctaatgattttgaagttcattatattggcagtagctgatgatcccttctgtgatggaccgagtaaaccaagcaattcgggatattcaactccactttgatgactgccataattactgaaatcaatgaaaagattggtgctgctggtgtagtcagccaggagtgcaagactgttgtttctcaatatggacagcagatcctagatcttttgctagctgagacacaaccagcgaagatctgttctcaggttggtgctgtgcactttgatggcactcatggtgtcagtgctggaattcggagcgtagtggatgatg

SEQ ID NO: 93266 - DNA, 314 bp, Zea mays
  Clone ID: MRT4577_185044C.1
gggtgggctggttctgttttctaaaaatgttttgttgcgtaacccccggggggcgcccttaaatgggggggggcgcctgtgtgttggcggaaaaaaggctgcggggggtcgcaaggcacgggggtcttaggggggggccccccgccggtgttagccgggggggggggggtgccgcttctggcgggctggcggccccgggggcgtcgtgtctgggggataaggagggtcggggggctcgccccccacggggaggttgcctccgccgcttggattggccccagggggaagcggggccgtttggtcttttgggggaa

SEQ ID NO: 93267 - DNA, 1792 bp, Zea mays
  Clone ID: MRT4577_185045C.1
cattgggtacctcgaggccggccgggaaaacccccgccccagcagttgctttttattcacccgcctcccccttgtcgctccgccacaccgcacacgcacgcacgaacgcgctcccaccccctcccgccgccaccgccgccaaaaccccggcccgacttggcgtcctccgccaacctcctcctgggcagcgcgggcggggggatatggcatcggaggacgtggtgggcaagagcaggggcgacacggccgtcaccaccatcgtcaacctggcggaggaggccaagctcgcgcgcgagggcgtcaaggcgcccggccaccagatcctcaccatctgcaagtcgctcgtcgccggcggcgtagcaggcggagtgtctcgtactgctgttgctccacttgaacgattgaaaatattgcttcaggttcaaaatccgcacagcatcaagtacaatggtactgttcagggtctcaagtatatctggagaacagagggcctccgtggacttttcaagggcaatggtaccaattgtgcaaggattgttccaaattctgccgtgaagttttttagctacgagcaggcgtcaaagggaattctgtgggcctaccgtcaacagactggtgaagaggatgctcagcttactccgctcttgcgccttggagctggagcatgtgctggtatcatagctatgtctgctacttacccgatggatatggttaggggaaggatcactgttcagacagacaaatctccctaccagtaccgtggtatgtttcatgcactgggtacagtctaccgtgaagaaggctttcgtgctctatacaaagggtggcttccatctgtaatcggagttgttccatatgttggtctcaacttcgctgtatatgagtccctcaaagactggctactccagacaaattcatttggccttgcaaatgacaacgagctgcacgtagttacaaggcttgggtgtggagctgtggcgggaaccattggccagactgttgcatacccgcttgatgtcatcaggagaagaatgcagatggttggttggagccatgctgactctattgttactgggcaaggcaaagaagcactccagtacaatggcatgatcgatgcattcaggaagactgttcgtcatgaaggagttggtgctctgtacaagggtcttgtgccgaactcagtcaaggtggtgccctcaattgccattgcatttgtgacttacgaggttgtgaaggatgtgctaggagtagagatgaggatatcagactgaggatggtcgttttcaactgctatttttgtaggctttgggaagttgtgtttttttttttgtaggcagggcgggtagaagggtatgaccgcggctccattcagcatcaggccctctcagcccatgttggatatatatcatatatcctgccactggcttcagtcaggtcctagaattgtttgctgggtcgtgcaaaaagtaataagtcggctgtaaagcttattaagcatctgcctaactcatcaaaagaaatctattccttattgatgatgtaccgagatttttgaacttaaagcggtactacgtgctgctaacagttgattaatgatttttctttgttgctggtgatttttcaaaaaaaaaaaaaaaaaaaaaaaaaaaaaaaaaaaaaaaaaaactcgtgttttttttaaaaatactttattatattttgttatatggctattgtgattatttttttttatattttaatatttttaaattatttttaccccccccccccccccccgggggttgtttagagg

SEQ ID NO: 93268 - DNA, 417 bp, Zea mays
  Clone ID: MRT4577_185046C.1
cgacgacgatctccacgccgacagcgggcagcggtggctcgcggcgtccaagcatcgtgacgtttttagtgcagcggacacggttgcagtgtcacagcagtcgccggcaagtggtcatcgtctggttgtcattcatgacgaaacgaccatcatggctccacctgttcaggtcgtggttgtgcaggtggaggacaagtgcagtgttgttcgtcacggggagacgagcggttcttcttcttcttctatttcgtcatcggcgagcgaggaagaggacgtgtcctttttggagtcgaaccgagaaatgctggaagatgatgctgatcgtagtacgtcctctgatgggagctggagagtggagaaagtgaagagactgatcaacatggtcaccctggtgtctctgctcattcttttgtacac

SEQ ID NO: 93269 - DNA, 1980 bp, Zea mays
  Clone ID: MRT4577_185047C.1
ccaaattcggcacgaggcgagcaggcagttacagacgcggccacgacggcacatcgccgccgtagtccttgaccttgctccacaaccccggcccgactcggcgtcctccgccaccctcctcctgggcagcgccggcggggggatatggcatcggagtacgtggtgggcaagagcaggggcgacacggccgtcaccaccatcgtcaacctggcggaggaggccaagctcgcgcacgagggggtcaaggcgcccggccaccagatcctcaccatctgcaagtcgctcgtcgccggcggcgtagcaggcggagtggctacggtgcttctggcggtgatcaccaagcgttggggaccggggggagccccttcggtgaaatttcttggctgagtcaaactgaaacaaaacaatggccacttctccccaagcgaaaaaaatctgctagaagaccttagagggctttaacattgggatggatatttgggcccttaccttgctttaagtggagattcagttttctgttttcacttaatatgacaactgaagagcgaaagactttgaagggcacagagtcttcagctccttctgttcctcctgatggaggagtcagcaaggaacctaaaaaagggggagattacccaatgggaggacaactggtccagcacgccgttcatccaagggcaactggactctagaagaggaatgcgatggtagcggctcgagttcttccttaccaagaggaacacaaacagagctcaggtgtaggagttggtgaacacccatgatctgtagatgtcgcagttggaagggtccaggaagatttatgcacagggagatgattatcacgagtacttcaagcgctcatttgaggaagacatcgctgcgcaagtgcctcaaggagtggaatggggttacaactattgattgggggaaatcaggcagaggagggcatgttgacggaccaagtggcgaggcaaaattttctaatgattttgaagttcattatattggcagtagctgatgatcccttctgtgatggaccgagtaaaccaagcaattcgggatattcaactccactttgatgactgccataattactgaaatcaatgaaaagattggtgctgctggtgtagtcagccaggagtgcaagactgttgtttctcaatatggacagcagatcctagatcttttgctagctgagacacaaccagcgaagatctgttctcaggttggtctgtgcacttttgatggcactcatggtgtcagtgctggaattcggagcgtagtggatgatgaagctgggaaatcaaatggtggtctcaagagtgatccaatgtgcaatgcctgtgagatggctgtggtatggatgcagaaccaacttgcccagaacaagacgcaggagctcatcctgaactacattaatcagctttgcgagcgtcttccgagtccgatgggagaatcagccgtggactgtggcagtcttgcgtccatgcctgacattgcgttcaccattggaggcaagaagttcaagctgaaaccagagcagtacattctgaaggttggtgaaggacaggctgcccagtgcatcagcggattcacagctatggatatcccaccaccccgtggccctctctggatcttgggtgatgttttcatgggagtctaccataccgtcttcgattatggcaagctgagggttggcttcgcagagtcggcctagggatatggtctggcagctacccgtccagaggcaaacgcgtaatttgtgtgtttatgcggccggcgatgtgtgtatatatgctactacatgtttagtgatgcattccgagacctgagacaacgcccgtctgttttaacgtggcgcaagaataattctggttctgcatgtattctccgtacacaaaggcgtgtctgatgcaatggtgaccatcttgcggttgcgtgtttgaaatagccttttggccaaaaaaaaaaaacaaaggg

SEQ ID NO: 93270 - DNA, 598 bp, Zea mays
  Clone ID: MRT4577_185048C.1
ttcctccccctcccccgaacctgatgtgtgatgtgtgtggggctttgcttcgcctttctgcaggtactaaaccaacttttattcatgttgctttctaaatatattgtgtctatgtatctacatataaattatgtttactaagcatgtactgttttcgagtaccaggttatatacttatagagtgtggatacatgtttgcaatagctccagatcatatagggcagagcttagttgagtctgccgtctgccctggttccacagacatgaaagagaactccatcaatttgtgaagataattttgtgaatcacttgaagttttgactgcttgtatcgtacttgactgcctggtttcagtttatttattatcatctttgcgtcaccagtgctttacccatactactcttgaattggcataccttgattctaatgtaatttattttagcctaatttgtgtgaatcattgaatttatagaccactgctataggctgatccattatagctgagaactcattactcctaattgaagttaaaattgagttttgtagttttgaagttagtttcactgttgcagactgataatgtgtaacatcttatgag

SEQ ID NO: 93271 - DNA, 422 bp, Zea mays
  Clone ID: MRT4577_185049C.1
cgaataaaagcatttcatcaacttcacccagccggccctttgatcctcatgccgtgctaatccaacagcacatcaaccatgcgcgagtttatacatgtaaaatgtggtatctttatgtctggctaacatcttgagcgagtcagtagttagctggcacccatggtggtctgctggcagcggatggtctgggggtagaggaacttcttcccgccgacggcctccaggatcttcttactcagcgcggcgccgccgtcctggccgccggacttgctgcagacgtagaaggcccgggagaaccagtcgagcagctccggcgcggcgcacatgaccatgtggaagggccagtaccagccgggccacgtcccgtagtagtccccgcgccgcacgctcgccaccaccggacgcgtgggcggacgcgtggg

SEQ ID NO: 93272 - DNA, 320 bp, Zea mays
  Clone ID: MRT4577_18504C.1
gtctgctcatctcacatcgagtccggtgcgttctccataagggacctatgctccatcttttatggtcagatccacacgaccgctgtggttgatgcatcttccctcgtcttgctggctacactttcctgcaccacatatcacaactgcttaaacacacacacaatctcatactggtagctccgtctcatcaattacatatctaagcataagactcagctcatcagcaaaatgttctcaccatattctatgctccaaaatactattctcgatcgccatatatggcatacattttagaagttgacaagtgcgacaatcacaca

SEQ ID NO: 93273 - DNA, 449 bp, Zea mays
  Clone ID: MRT4577_185050C.1
atagaacagatactttcattggcgtaggttatgtacctaatacagatacttccattcccatagttgcatttcttcatccaaaaactaaaaagtagattacaaaacaggtcatgcctgcttgctgtccaccataaattgaacattaattaatacaaataagagaaccatgaccatcaatccatgatgtccattcaggttcacccattaccaatttaccatgatgtccattcaggtccaggccatttaggttcaaccatgtatactccatccaacaatccattacaaaaagcatcagttctactccaagtctccaactacaaagataatctagttgctcttcaccaaactttttggaaaaaaaatgttttttacatcaaagaactcttgttacgtcccatggtatatttccaacattgtctaatcatccctcttatcaactttgatgcaaa

SEQ ID NO: 93274 - DNA, 465 bp, Zea mays
  Clone ID: MRT4577_185051C.1
ggcaaaagcaagggcccccacaaattaacgtttgggaaggacaagcccccccttttggtggggggcccacaaggcttattacaaggtggaaaaaagcaaaccctagttcggactttaagggggggcccgggtgaaaccaaaaaaaaacccgccccgggggaaaaccacattgggccaagggcaacatcaaaaaggtctcaagctcaggcttgccccgttttaggggggcccccccccttgaagttctcaagggaggccctaggcccaaaaaaaggggctggggggtccccaaccacaaaatcccatccagggttttcgggaaacccctttggggactctgcccgggaaaacgtaagtcctgcttccccgccttttgcataggggcccccagaaaagggcccccccatcaacgggttcccccacttttggggggacaaaaaattatttttccccccccccactttg

SEQ ID NO: 93275 - DNA, 273 bp, Zea mays
  Clone ID: MRT4577_185052C.1
cgatgatgtccttgatgtgcagctggcattccttagacttctctgcagtcgagcttactagaacatcacatatcactgcaaaaatagcattgcatacatggatcaggcgagtggaaatgtaaagaaggccctgaagctgatggcgtcaaatgaaggtgaattcaaggctgaaggaaatagcaaattcacctacacagttctggaggatggttgcacgaaacacactagggaatggagcaaaacagtctttgaatatcgtacacgcaaggctgt

SEQ ID NO: 93276 - DNA, 196 bp, Zea mays
  Clone ID: MRT4577_185053C.1
agcaaaatcccaaatttgttgtttttgggggatacgcccggtttccccttaaaagagaaactaatcagattttcaaaactctgcgttatggtctgaacttgttttctcacacaaaacattcggttccgtacgagctcacctccagtattatgatttaaaaagaaacttgatacctgatatcttcatccaggaaatc

SEQ ID NO: 93277 - DNA, 384 bp, Zea mays
  Clone ID: MRT4577_185054C.1
tttggtgcattgtccacatctgagcggcctatatgaacgcggctgtaccgtagacgagacggcttaccttggctagctgactgaccgctggtataaactgctgcaactgccgttgctgctggcatgcagctacgttcgccagaccaagtgggttggatgcacgcacctgctggtgccagtaagcgacagggttcaccactgctacgcggctcacggccggcagaaaatgctgcccctgatgccccgctacggtttgtttgtttcgttgctttctcgaccgttgtggcgcctgtccccgtggttctctaaatgggcggctccctttcgctttctgtttccttgcttttcgggaccttgaccccccggaacccctttaaggtgctg

SEQ ID NO: 93278 - DNA, 297 bp, Zea mays
  Clone ID: MRT4577_185055C.1
gcgcagacacgtgggcaagctcctacttcccctttaccaagtgctacacggaatatggggccggaggacattgtggaggggggagggcttcaatcttatgtggagtaccgtcgcttcagcggcgggcttgcctgggccaccagcaacgagtcgcaggagaaagccttcgcctcctacggtgagatcctcgactccaagggtatcacctgaccggtagacggggaggtcccgcggcttacggcttcggtaccttaccctccgagaactacatgctcgacgctaataagaacatgaacg

SEQ ID NO: 93279 - DNA, 1073 bp, Zea mays
  Clone ID: MRT4577_185056C.1
ggctccgtctcgcggaggggccccaccgaattggcctccacgctccacgccgccgcggtgctgctccgggagttcgacggctggagctggttcatcaatcttagcgcctccgattacccgctcatgccccaagatgacatccttcatatcttctcatacatgccaagagacctcaatttcattgagcacacaagcaatattggttggaaagagtatcaaagagcccgaccaatcattgtagacccagcattgcaggtcccaaataaaactgaggttgtaacaacaaaggagaaaaggagtatgccctcagctttcaaaatttttgtaggttcgtcttgggtgatgcttagtagatcattcctggagttttgcttactgggatgggataaccttcctcgcacactactcatgtatttcaccaacttcctctcgtcctcagaaggctacttccacacagtgatctgcaactcagagtactaccagaacaccactgtgaacagtgatctgcgcttcatggcatgggataacccacctcggacgcaccctgctaacctcacaacagagcattttgatgcaatggcagacagcggggcgccgtttgcacactcatttgccaatgataactcagtcctggatatgatcgacgccaagttgttggggcgagcacctgaccgcttcacgccgggtggatggtgcctgggtagctcagtaggcgggaaagatccgtgtaccttcttgggaaggtcctttattctcaggccgaccaaaggctcggccaagctagagaagttgctgttgaaacttttggaacctgataacttcaggcctaaacagtgtaaataacactcattttacatggtagccagttcttttcttttttttggtagcgttcagaggccgaagtttgatgacatgtttcttgttgttgtggcagtaggcattacatacagatgttttatacttgcaaccggaaagctcaaatcactatacactatacaaaaaaaaaaaaaaaaaaaaaaaaaaaaaaaaaaaaaaaaaaaaaaaaaaaatcgagggggaaaacccggtaccca

SEQ ID NO: 93280 - DNA, 495 bp, Zea mays
  Clone ID: MRT4577_185057C.1
gaggaatggatccataatgcaccacctcattttagacggagtgattcctcaaaccaaacacctcctaaatgttcattactgtttctgctaaattgctgctcctagtaggactgctctagtattgattatcatgtccttgttatacataggaatttgagaatatctttagtagacaaatattattctctacatcttttaaaaagaaatgtccttattgttacatgtacctatccttttagaattgcttgcccgtcgcggcagatgcactggaacgaaacgtcaacgaatctgcactccccgccgcgctccttgcactcgtcgcaatctgccgtcgatctcggcggccattccaaaaggaacccttccctgaccaattggttataatttaaacgacctggctccatttcgcgctcgatccatcgcaccggcacgctcacgctgctgcagttcgtcgaaccgagggacggctcggcgtcgtcggaggtgtacgctccc

SEQ ID NO: 93281 - DNA, 432 bp, Zea mays
  unsure (1)..(432): unsure at all n locations
  Clone ID: MRT4577_185058C.1
cgcgcgcgtgcccaacatcgcgcacgcaaagtgagagngtgtggccccttacgagacatgtgggcccaccgataggagccgagcacctagcgggtgacgaccttcatgcccactgggacagtcacaccgaggacgacgacccgggaagggcggaagcgactccagggctgcctgactctgctgccagagggcaagggctcggcggccgagcaagggggggtggcgaggaagaacctgaagaggcgggcgcccgaatcaggttgggactcttagttatctgttgtagtctgactctctccttgggtgacaaggacgccgttctagggcacggggcgaggcccgatggtcaacgccaaagcaacctttccatgacccaaggaggcccaaagctttttggtttgagcttcctgccctgccttagccgggtcactt

SEQ ID NO: 93282 - DNA, 386 bp, Zea mays
  Clone ID: MRT4577_185059C.1
agagttataccatccacaaattgaagttactacaagacattaatttgaaaagcccccgtacgtacaacgtttaataagtaacaacaacatacacatccacgaggattgaaaaaggaaaaaataacatcacatcacatccaatccaatccatacagattacagacttgacacccacgggcatgctccaagttattactgtccgatcatagatcatatccatccatgagcagttagtacccaagctgggcgatcttgacgtggaggtgggtctgcgcgaaagcgaagaggcgggccacctcgtcctccccgatgagctgcacgccgccgtcgcggtcggcgtctgcggcgcgcacggggccccgcgcctttcaccacgcgaaccacac

SEQ ID NO: 93283 - DNA, 216 bp, Zea mays
  Clone ID: MRT4577_18505C.1
gggaaaaaaaaggtgggtttggaaaatttttttagggtttaaaaaccaaaaaaatttttttaaggggaggccttttttaaaagttctttttaaagtttaaaaatttaaataaaagtttgtctcattgaaaatttgcaacatcttcaatgcgctaatgctaagaagtttaattggatggcctagagatgctcgtacaaatatttttactgaaaattt

SEQ ID NO: 93284 - DNA, 402 bp, Zea mays
  Clone ID: MRT4577_185060C.1
cccacgcgtccgcccacgcgtccgcggacgcgtgggagccgctgcaccggtaccaggcgacatacggtgtggtcctgcagtccttcctgcaacaacagccgcatggcgagctcgcggcgctgatggcggaccacgtagcgcatcatctgacagcaatgtgcggtctgcatctacatgaaccatatgcctgaccttgcaacgcacttacaactggagcatactactgaagaaactatattctgttggacaaacgtaacagagccgtagcatcaatacataattggctaggccatttattaaacggcgtataagtactaggtgaataatataaccatgtgtatgatggttggggcggaccagaaataacaatggacatggctaggaataatatataaggaaaaa

SEQ ID NO: 93285 - DNA, 2023 bp, Zea mays
  Clone ID: MRT4577_185061C.1
attgggtacctcgaggccggccggggacaatggagtctcactcttagcagacgtacgtggactggcttctccagttcttgtatacaacgcatctttcgcccgccatacttgggtacttgccatcttcttccgcgactccaaacagtgttatgcggcccacctgcacctgcaatgcaacgatcggtccctctcgagcagtagacgcccggttccttgtactttggcacccccatcacgtcgtctggtcaatctaaagcttggacttgcagcctcctcatcggtcgatcgatcggagtgacgtgctggggattgtaggtgcaagcgcgcgcgacattgcagctaccgagaagaaagcagaggggcaatcgagcagttgacgggcgtgcagcaatggcgggacttcacttcttgctcgtgccgctggtagcgcaaggccacatcatcccgatggtggacctggcccgcctcctcgccggcaggggagcgcgagtcaccgtggttaccacgcccgtcaacgccgcgcgcaaccgggccgttgtagaaagcgcccggcgggcggggctccgacgtcgaggtcgcggagatcgcgttccccggcccggggcacgggctgcccggagggtctggagaacatggacctgctcacgaggagggagcacttcttgcccttcttccaggcggcgtggaagatggacgcgccgctggaggagtacgtgcggtcgctgccccggcgcccggactgcctcatagcagactcgtgcaacccgtggaacggcggaggtgtgcgcccgccacggcatcccgcgcctggtgctgcactgccccgtccacctatttcctcctcgccatgcacagcctgtccaaacacggcgtccacgaccgcgtcgccgacgagctggagacgttcgaggtgccggacttcccggtgcccgcgctcgcgaacagggccacgttccgcggtttcttccagtggcccggagccgagggcttccagcgcgacgtcgccgaggccgaggccaccgccgacggcctgctgctcaacaccttccgcgacatcgagggcgtcttcgtcgaccgctacgcggcggcgctcggacggaagacgtgggccatcgggcccatgtgcgcctccggcggcctggacgcggacgccagggccagcaggggcaaccgccccgacgtcgacgccggccttttcgtgtcgtggctagacgcccggccgccctcgtccgtgctgtacatcagcttcggcagcctcgcgcacctgccggcgaagcaggtcatcgagctcggccgcggcctcgaggtgtccgggcggccgttcgtctgggccatcaaggaggccaattcgaatactgacgtgcaggcgtggctcgccgaggggttcgaggagcgcgtcagggacagggggctcctggtccgcgggtgggcgccgcaggtgaccatcctttcgcaccccgcagtgggcggcttcttgacccactgcgggtggaacgccgcgctggaagccatcgcctacggcgtgccggtgctgacgtggcccagcttctccgaccaattcagcagcgaacggctgctcgtcgacgtcctcaacatcggcgtcaggtccggcgtcaaggtgcccgccatgttcttacccaaggaggcggagggcgtgcaggtgtcgagcgccgacgtggaaaaggcggtgggcgagctcatggacgagggtcccaaggggacggcaaggagaggaagggccaaggacctcgccgcgaaggcgaaggtaaccatgatggaaggtgggtcgtcgtacgccgacttgaccgacatgatccaccacgtcgcggtgctcggcagtcggcagtaagaaaagccatgatcacacagactagatcactagaatctactagtgtaccaatgctagtgcacatactagaatcttgttctactagtgtacctggagctattcaaaattgcttattgtacctttctctttctatatgttttgaaacaccgtatccacacggaccatttgatctcc

SEQ ID NO: 93286 - DNA, 202 bp, Zea mays
  Clone ID: MRT4577_185062C.1
ctggtgaaacccttttttatttatatctaaatcaatcaatgctatcgcaacacctttctctgttgtccgcggggggggcaagccaattttttctggtgcaccctctcgttacaaacatcccggaacccaggccccgggtttttaacggccccttttaaacccccccgctggtctagaataaaaaatccccccatcaaacccc

SEQ ID NO: 93287 - DNA, 287 bp, Zea mays
  Clone ID: MRT4577_185063C.1
tcgtgcggtggccgttggtggtcgttattcttatcacgccgccgtcggtcgacgaggacgggcgtctgcggtacccgtacgcgcacgacttcttcggtctgtcggaacgcacgaacgctgtggttgtagggtactcgcggtcgtgcgtggaggtggcgcggtatttgcgggctcaaggccattgacatctggttcaagatgcaaagggtccccgtctgagagaagtcgttcctgtgggacgggctttatctgacgccgcgcgggatccggttgctgttctaggaggt

SEQ ID NO: 93288 - DNA, 654 bp, Zea mays
  Clone ID: MRT4577_185064C.1
tttttatttcctttttttttttttttttttttttttttttttttttttttttttttttttttttttttttttttttttttaaagaaaacgggttggaaaaaattgggggggaaacaactaaaaggcttccgattatttttggaccccaagaaactttgcggttttaagttttttgcccaaattggcctaggggccaaaccccctttggtccatagaaaatcctaaaagggccattgggcaggccttttatttccccaggggcctttggaaaattcaggtttttgtcccttggcaggaatcataacaggggcttgcaaaaaacccaaaatttggggctttaacgcccaatcctgggtttttaaggttttcaaaccataaggattgtttccaaggttgcctccaactccaagcttggacataacccctccaccggaaacctttccttaaggccccaaaagcccacagttttggttccggttccttccgtcgccctggccgttgcctgttaaaccacacaaaggagcgtccttaagggaaccagggacaagcccctgacggggttttaggagcctgccggccttttgtttttttttcgacaagtgaacccattttgaccatgccccttggccggataacaaaagggcatgacccatg

SEQ ID NO: 93289 - DNA, 276 bp, Zea mays
  Clone ID: MRT4577_185065C.1
aagatccactcccagttataaagaggggttttttgtggtctgcacaattcacttgacatccgcgggttataacccctagggttgcggggtaagttaatattttaggaccaaaaggactgttgcctaacccaaaagcgggcactgttttttaaaatattactcaggctataaaagagttcaagaaggggaaggtggaatacagggtggataaacaaggaattgttcatattccatttggcaagggggactttccataggaagatctcattgcaaact

SEQ ID NO: 93290 - DNA, 760 bp, Zea mays
  Clone ID: MRT4577_185066C.1
tccttaccttacccctcacatccacaaatatgttacaattaatcaattctcgtaatggctttgacttgggaaactgtctgcttgtatttatattatgcttccagttcagcaagttgtcttatcatgaagtgtcaagtttacttgcttgatgcacatgactagttctcttgcatatccattatgattcacctcctatgtactgagttggaagttacatgggtgaacatttgatattacatttagaaatatattcttgtgaaataatgcggtagttaaagtctttcttgccttctgcttaattgacagaacgctggaactagtttaactgcccaaaattgaagggatcttgtgggccttgaagcataggacaacgattccaaattaatctggtttgttttttgtggccatacaagggatgagtctggaacgatgatattacttgataggctaggggtaacattagttaaagaaaaggttatgcaacatcggttgagatggtttggacatatctgatgaagaactctaaagacaccagtgtatagtgggatcctatggcgtgatagtaatggaagagatgtaggagaatgtgaagttgacatgaaaagaggcagtaaaatgagacttaaatgatggaatgtagccaaagatttagccttgaatatgagcgcatggaaaaccgttgtctacgtgactgaaacttgatttgtggcttctcttgggtttcaactgtactactccaacttgtttgtgactatacaac

SEQ ID NO: 93291 - DNA, 736 bp, Zea mays
  unsure (1)..(736): unsure at all n locations
  Clone ID: MRT4577_185067C.1
ggacatgatcaaggagatactggaaaaatgttggatgaagtcagtgatgtagaaaacaattcggcacgagggggaagcgatgctatggggaattctgaatcatatatgagtacatactgtgtagagccattgccaaccaactctaggttgacagcatattcaagaataaatgagctatcatttacatggaagcactcacaacatgccagttcccttgagaaagttttacttgacattcaaagagataacttcgtgaacaccattgcacgcatccagaaaatcgtccgggatgatccttcagatgtgcttagtgcagatgtaattgaagccactgtacagatagaaattcttaaatggggtttatgccttcaggacaagtgcgcccacaagatagtaaatacaatgttggattatgctaaaaaggtcaaggggagacacaatttcaatactgagatgaggaaggaagagttctctgcaaagctgcaggatctcctgaagtggcagcttaaagaactagaatttaaatacacttccttggaatcagattacaagaaagcaatggctgatgctagcaattttttctcgacatttgaagagcacaggaaaaagttgcatgccattaagggacggtatcaaggacctgcagcaggcctgtatgactaaggacgatgaaatgcaaaaattggcaccttcaagtcgctgagcatgcgaccgcatatncagaagtctataatgg

SEQ ID NO: 93292 - DNA, 1767 bp, Zea mays
  Clone ID: MRT4577_185068C.1
cctgccgggagaaaaccgccgggagctggaaagggcgaggcgagcggtgccggcggaggtcgacaggggggctacaggtagaaaggcgactccgccgctccagctgaaaatggcgaaatgatttgccttccccagaacccagctcagacagacgccgccctccgctgctctgctctgttcctcttcctccttgccccctgagcaggcgatttgtcagcccggaaaccattcgaacaggccgagcccgcccgcctccattgctcgcgtgcgtcagagaaggaaggaaaagaagaactaggagcagagttgaataggtcattatgcgccggtggctttgctgcagtcattttgacacgccgtatgtcgaaaacgaaaatggatttatgagcagtcctgatagaacaagtggtaatggaaacggtttaaatgcaaacagtgatcctgcaaaaccgccttccattgaaatacctgcattgtcatttgatgaattgagggaaaagacggatgattttgggtccaaggctttggttggtgaggggtcatatggaagagtatattatgctgttctggaaaacgaacaacatgtggctgtcaagaagcttgatacttcagcagatcctgagcctgataatgaatttctagcacaggtgtccgctgtttcaagattgaagcatgaacactttgtggacatgcttggttattgtatccaaggagatcaacgtctactggcttatgaattcgctacgatgggctctctacatgatattttgcatggaagaaaaggtgttgcaggtgcacaacctggacctgctcttgattggatgcaaagagtcaaaattgctgttgatgctgcaaaaggtcttgaatatcttcatgagaaggttcaaccttccatagtccatcgagatatacggtccagcaatattcttttatttgaggattacaaggccaaaattgcagacttcaatctttcaagccaatctccagatatggctgctcgtctacattctactcgtgtccttggaaccttcggatatcatgctccagagtatgctatgactggccaactgactcaaaaaagtgatgtatatagttttggggttgtccttttagagcttcttactggaaggaaacctgtagatcatacaatgccaaggggccagcagagtcttgttacttgggcaacaccaaggcttggtgaggacaaggtgaaacaatgtgttgatccaagattgaatggagagtaccctccaaagggagtagcaaagctagcggcagtggcggctctctgtgtccaatacgaatctgagttcagaccaagcatgagcattgtagtcaaggcgttgtctcctcttcttgtgaatgcaccgtatcagccggctgctgctcctgatgtatcttcagatgcctgacagcatgagcaactgaaaacccatgtaaagaaacaccatttactgtcggtatgccattttttccatgaattattcatctttcgtaaaatcagaattgtgtgtgtgtgtttattggagaggaagggaagaggaaagagtaacgcatttgttttgaacccatgtacttcgtgcttgagagctgctgcagttgaaattaattacttaatctacacacttgtgcatctgttgctcttcccctgtttcagtttctttttttcttttgaaatggccatccttgtaatctacccctgctttgctggtggcctcagaaccaaacttttgaatcggagtaattgggtttgaattgtccagtcca

SEQ ID NO: 93293 - DNA, 430 bp, Zea mays
  unsure (1)..(430): unsure at all n locations
  Clone ID: MRT4577_185069C.1
tgttttgcaggaattgggcacgaggtttcttgaggggttttagtcgggtgtccaagcttggttgcggagtcaaatgcgatgcggtagctgaatttgtggctctcattggagtgaggtagtattgttcctttggcggtgatagcggacgtgagctacgctcggaggggggtttttttttttttttgtgggggccggtatttgggcaaatcttcccccgacagacccccgggccagggtccgtagggtgggccccccaagtggaacggtttgtcgtgagatacatttcctggagcgaacgaaacaacgnnacgcgacccgacttcgtcccggcgacgaaggcggagaggcgcggaccagcgcgcaggagggtgaaagcgctacgtgccaggagatccgcctgcagcgggcggtgccggtgaaggaggaggcg

SEQ ID NO: 93294 - DNA, 282 bp, Zea mays
  Clone ID: MRT4577_18506C.1
ggctcggtttactttaggagtttaagtccgtctccgaaacaagctaatcttttttttgccccctccttcacgtcccacccgccgtcgtcgctactcgcatagagatccgcggcgtgttgctgcgcctgcccttcttcttgtggcagcgcccaatcttgtcgcgggctggccagattggggggctcgaggcgagccggccagtttggttgaccaagggcgggaggaagggagaaacccgacccatggactgcggtggcgcggatcggggtcgcgtcgcacacc

SEQ ID NO: 93295 - DNA, 1597 bp, Zea mays
  Clone ID: MRT4577_185070C.1
cgacaggggggctacaggtagaaaggcgactccgccgctccagctgaaaatggcgaaatgatttgccttccccagaacccagctcagacagacgccgccctccgctgctctgctctgttcctcttcctccttgccccctgagcaggcgatttgtcagcccggaaaccattcgaacaggcgcgagcccgcccgcctccattgctcgcgtgcgtcaggaaacggtttaaatgcaaacagtgatcctgcaaaaccgccttccattgaaatacctgcattgtcatttgatgaattgagggaaaagacggatgattttgggtccaaggctttggttggtgaggggtcatatggaagagtatattatgctgttctggaaaacgaacaacatgtggctgtcaagaagcttgatacttcagcagatcctgagcctgataatgaatttctagcacatgtatccgttgtttcaagattgaagcatgaaaactttgtggacatgcttggttattgtatccaaggagatcaacgtctattggcttacgaattcgctacgatgggctctctacatgatattttgcacggaagaaaaggtgttgcaggtgcacaacctggacctgctcttgattggatgcaaagagtcaaaattgctgttgatgctgcaaaaggtcttgaatatcttcatgagaaggttcaaccttccatagtccatcgagatatacggtctagcaatgttcttttatttgaggattacaaggccaaaattgcagacttcaatctttcaagccaatctccagatatggctgctcgtctacattctactcgtgtccttggaacctttggatatcatgctccagagtatgctatgactggccaactgactcaaaaaagtgatgtatatagttttggggttgtccttttagagcttcttactggaaggaaacctgtagatcatacaatgccaaggggccagcagagtcttgttacttgggcaacaccaaggcttggtgaggacaaggtgaaacaatgtgttgatccaagattgaatggagagtaccctccaaagggagtagcaaaggtacatcccgttctctcgctctatgtgttatttatttgtgagacaaaaatccacatttttcaaatcgcctactgaaatctgaagtcattagtataaacaaaatcagcactggctgcaacacatttgtgaaataccaagccatcagcaattattatttcctttttttgttgttgctgcagctagcggcagtggcggctctctgtgtccaatatgaatctgagttcagaccaagcatgagcatagtagtcaaggcgttgtctcctcttcttgtgaatgcaccgtatcagccggctggtgctcctgatgtatcttcagatgcctgacagcatgcgcaactgaaaacccatgtaaagaaacaccatttactttcggtatgccattttttcacgaattattcatctttcgtaaaatcagaattgtgtgtgtgtttattggagaggaagggaagaggaaagagtaacgcatttgttttgaacccatgtacttcgtgcttgagagctgctgcagttgaaattaattacttaatct

SEQ ID NO: 93296 - DNA, 1077 bp, Zea mays
  Clone ID: MRT4577_185071C.1
aacaacgactccgctcccgcagaacttttcccggtcttcgccttcccaccacaagtgtcgtccggccacggaatcgtcccgcgagacgtcacacacacatcgccaccagcccagcggagtccacaataaaacccaaaagatctctccatccttctctcccactcccacccccacccgtgtgccgctccctcgtctcgtcttctcgaccaagtttctccctttctcctctctctttctctccgcgttgtggctgtggcctgcggggcgcgggcaggcggcggttgctcgttctgcttggcgtatggtcggccggatggagcggcagacggtgtcgacgtcctccgcgtcctgctccccctccggcgcctcgtcctcatcctcctcctcctgcggcggacggaagcggcccgacatactcaacatgatccggagtgcagcatgtcttaattcatcatctactgatactggcaaggggcggagtaagcaatcaagcaccaaggtgacgcatggattccacttggttgaagggaaatctggccatgacatggaggactaccatgtagcagagtacaagtgtgataagaatcatgagcttggcctcttcgccatattcgacggccatctgggtgatcgtgtgcccagttacttgagagctaaccttttctccaacatactcaaagagcctctcttctggaccgaccctcaagaagcgattaaaaatgcatatggctctacaaacaaatatattctggaaaatgccaagcaacttggaccaggcggctcaacagcagttactgctattgtggttgatggcaaggatatgtggatagcaaacgtaggcgactcgagggccgttttatgtgaacggggtgctgctaatcagatcaccgtggaccatgaaccccatatatccaatgaaaggcagaggattgaacagcagggtggctttgtcacaacatttcctggcgatgtccctcgcgtaaatggccaactcgctgtcgcaagggcgttcggtgaccatagcctcaagacgcacttgagttcggaacctgacattaggcatgcacccataaactc

SEQ ID NO: 93297 - DNA, 823 bp, Zea mays
  Clone ID: MRT4577_185072C.1
tgacagggaaggagctcgacgttagctgaaaagagagatgagccaagggtgagctttgatcgggtcctcgggcaaggtcgacaaacgaacaagccagtgaagggcgtatgcatggagactgaacagagatgttgttgtatagagctgtaggtctcacgagatgatgcaagtggcgaaaactttatcggcgatatgatatccgataaacccgattttcctttctatcggtgagctccgatattttttctctatcaaccaaaattttcaatttttttttgaattggcagtatcaaatgttttcattgttaaatgtctaaatataatctacatgacaattaaacaaactgagtcattttttaaatttgtaccgaaaattttacctatcaccgataaatccgataatcttgtttatcgccaaccttcgatattttttcccattccataaaatggacaagcccgtagcgacgcacgacggtgaggtatggcaagaaagtggcgtctttgagctggagcagaaccacaacagggaggcgttggtcgacgtcgtgcacaaggatgagacggaaataaggaggcaggcctgcgtgacgatggagctgggcgacgtcgatttaagcacgaggagcgaggtgatgtaggggcgagcgatcttgcgcgtcgtcgaggaggtcgcaggacagcggcatacagctcggcgacgggataagcagaagggcgaggttgatgaccggaaattgcagaggtggcggcttgggcgattgacactggagaaggggctcggctgctagaaaggtccaagcactgatgtgcgaaccaatcctct

SEQ ID NO: 93298 - DNA, 254 bp, Zea mays
  Clone ID: MRT4577_185073C.1
gtgcactgcacggatattatatgtgttcgttgtgagaactgggaaattcgaggagagaagaagagcttgattttttacagtccttttaacgcccatagtttcatttcatttctttcgtcacattaggcaggtcaagcctccgagggaaagggtttgtcagttcgaaagttttactgcggtcgtcggttatcacggagaatatccagacagttgttggttcgagaacattcgtttgtgaattttggtgttcggaa

SEQ ID NO: 93299 - DNA, 517 bp, Zea mays
  unsure (1)..(517): unsure at all n locations
  Clone ID: MRT4577_185074C.1
ccccccttttttttttgggggttttaaaaaaatttttttttttttttttttttttttttttttttttttttttttttaaataaatanataaataaataaataaatattcccaaaaaaatttaggacccattttacatcttatatattaacttaaaaggtggggggggggaacaataaaaaaccacaccaaatgggcccctaaaaaaaaaaccataatcggctaattttcttactttggggcctcctcctttacaaaaatacaaattaaaaaactccaactcatcataatttgaaaatttaattttccccttaaaaaaaaattacacagaactttattaccaataaccactttatctctttaacaaaaaaaaattaaaaaaccgacttttattttaaggtaatatcaaaaattactccttaaaaaatcccgaagggttttttttttccattaactttttaaaaaaacattccatttttttaaagttccttgaatactaaggcatccataaatttaatt

SEQ ID NO: 93300 - DNA, 364 bp, Zea mays
  Clone ID: MRT4577_185075C.1
acagcgataacaccgtcaattattatgctgctcaaggaatcaaacacgaggggtccacaggcaaagatagaagggtttataagggccccactccagaagatattacaaagcatagcaaactaccataggccatatccacaacaacagggtaattggtgggaggcacattaccaaacccaccaaaagctaatgtagattgtccaacctttgcaacatactccacaagaaacctcagtctccgggtcaagacacaaagctgatccaacctatgagctctccaccgcttagagagctcgattgccaccttgccaccattgataagaccgtagctcattggctcgatgaggcattcctgaaacacata

SEQ ID NO: 93301 - DNA, 266 bp, Zea mays
  Clone ID: MRT4577_185076C.1
gttattgatttttttttttgaacgaaagggccccttattaatccacttattccaaagaacaaagttacatctcggtactcggactaacacagatatgaaagcggaccgtctgtgatcaatgctggtaagccagctttttgagaacattgccgaggtcagccttggccttgatgttctagacccattgggcattgaacccaaccctttcgatgctttgcctaacagaccttgagatgtttgcctaggtttttgttttgaaaaactct

SEQ ID NO: 93302 - DNA, 576 bp, Zea mays
  Clone ID: MRT4577_185077C.1
ttcctctctttccccggcacctgtcacgggaggaggatggacaagagcggcggcgaggcggcggcggcggcagcagcagcagacgacgtcgagcggcgggggggcgactacgagcaagacgagcacgagcggagagggacggtgtggacggcgacggcgcacattgtgacggcggtgatcggctccggcgcctaccgcgcgccgcaccccgtcaccggccacaggaaccgcacctacatggacgccgtcagatcgtacctcagtcccagggaggtgttcatgtgcggggtcgcgcagtacgtgaacctgtggggcaccatggtcgggtacaccatcacggcgaccataagcatggccgcgatcaggcaggccgactgcctccgccgggacggcgccggcgccggcgcgcgctgcgacgcgccagggaccgtgctgatgctggcgttcagcgtggtccaggtggtgctgtcccagttcccgggcctggagcacatcacctggctgtccgtcgtcgcggcggccatgtcgttcgcctactccttcgccggcctgggcctctccgtagggcactgggtg

SEQ ID NO: 93303 - DNA, 780 bp, Zea mays
  Clone ID: MRT4577_185078C.1
attgggtacctcgaggccggccgggctcctcctcctcccaccactccgcatccattgaaggaccaattcatctccaactcagctccactccgaccgtcaacaccatcaccatggttgccattgctcgctccttcggcgccgcccgtgtggccgcccgcggcttctccaacgctgcccgccagccccagcagagcactctggttgctgcccgcagcgccttccgcaacaacgccgcccgcaacatcatccaaaagcgtggcatcgtcgccgagtccaccgctgccgccatggtcgctgccgctaagatccagggtgccggtctcgctaccatcggtcttgccggtgctggtgttggtatcggaacggttttcggtggcctcatccagggtgttgcccgcaacccttccctcaggggtcaactcttccagtacgccgttctgggtttcgctttcgctgaggccactggtctcttcgcgctcatgatgtctttcttgctcctctacgttgcatagatgggtgcattgattgcatcgactgccggacatattggggtcaacggtatgggggtgccgcaaggtggaaaagttttcttgcggatgggtgtgtgcatagggacgactactacctcttttcctactctagtggccggtcagattgtgtaaaacatgtactttagagagcaatctgaagagcaagctaccactctggctcgctttccttgtctacgcatgcgtgcgggagctctagctacggtaatgagacgtgcggatgaatcatgtt

SEQ ID NO: 93304 - DNA, 345 bp, Zea mays
  Clone ID: MRT4577_18507C.1
aacacgcgttatggcaaagaccgccgcaatgccggcagcggtggcggtgatcgctctcctgcttattacgactctacccgtcgggcgcggcgaggagaaggcccaccgcggcgcacccgcacgggctccccttcgagagcccgctcgcgctgtctccggccgcttacgacttcttccaccccagcgcgcgcgcccgtcgagctcgcggcgtcgcgccggcgccggcgccggcgctcgcgcctcgcgggcagcagcagcagcagctgagagagtccggtccgaggaggaacatcgtcggcaagcgtggccaaggccgaccgggaagaagggggcgtggtttttttt

SEQ ID NO: 93305 - DNA, 430 bp, Zea mays
  Clone ID: MRT4577_185081C.1
ggtcactcggcacgcatgttagcagcacaggatcaggcagagccatcccctgtgctcgctacgcttcgctgcctcggaggcgtattcctgctcctactcctacaccctcgtccgtgccctttcggcgcacagagctcgcccgagatggctaacgccagatcggatgtcactgtgaacgatgagtgcatgctaaattctggccgagctgaactccaagagggtgaaccggttgataactttcaagagggacaacatgttcaacgagatagttgtggaccatgtcgagaatcgagctaccagctactatgactgcacacacagcactgcctgtagaatgactggccatacgcgatctatgatctcaactatactactgcagaggatgtccagagaagcatgatgttatatatactatggctctcattctccg

SEQ ID NO: 93306 - DNA, 382 bp, Zea mays
  Clone ID: MRT4577_185082C.1
gctccgcgcccccgacgccggtgtataggagcaggaccaagacggattccgaatggacaagtctaggaaccacacggtgtcataaccagtcgttcaaggcgcacaagaacggcatcaagaaccccaagcgccaccgccagacctccaccgacggcgatggaccccaagtttctgaagaacttgaggcactcaaggaaggtcaatacgacgagttgtgaggatgagtcagaggagcgagatgatgcctgagtgtgtggcgacaaatgcatctcttgaatcggtagggacctagttgcgaacttaattttcacatctgtaagattaaaagagattcctcaacttgtaactgaagtgctgtattgtacaaccaaaaagtaaagag

SEQ ID NO: 93307 - DNA, 811 bp, Zea mays
  unsure (1)..(811): unsure at all n locations
  Clone ID: MRT4577_185083C.1
cggggtggnaaaaatctcgccgccgcctccattctcctttttctcgcagcgccgcggcttccctccccctgagctccctcagccatgacgcgtcttcctccctgcacacgtccttctgctcgatcccaagcttcctgtgcgcgcgctactcttccttcccatgttactgcgcgctctaccttccctcccatggcgtccacctccctatgcttgccccgtgccctgcttctcctccgtggagctccatctccttgcgcggcactccctccagctccttcctctccctctcggttctctgttggccggtgctctactcctcccatccacgacgtgggttctgctccctctgctcggagtctcctacgcgcagctcgccaggctctccctctctcatggcgagcgcctgtgctccctccaccctgctcgcatggccgcgccggctccctccagtcggccgcgcgcccagccaaagtcccctgcgcgcagctcgcgccctgctcgcccctcttctcgccgagtactttccccataaaatttgctcgaccacggtctcgtcaaaccgtgaagcttcctcgccgtgtgccctggcatcggctgtcgccaattttgccataaagttcacgagcactccttgctcagtttgtttcgcagtgggctatttctccacgtttcaattccgtgctgcttgccccgtgtgcgctcgctccagactcgatctcgtcgtcattccgtgtgtcatcaagaaatcccaagaatcggggcggattcgtgtcagttgttggaaacggtacgtgaattaaccacgtgatgc

SEQ ID NO: 93308 - DNA, 243 bp, Zea mays
  Clone ID: MRT4577_185085C.1
cccacgcgtccgcagagctggatggactggggctggagcccatggaagagggtggaggcgagcagggcagcagcggtggcggcagtggtgagggagagggctgcgaggaggcccaaggcggggccaaggcttcaagctctcaggacttggctatggaggaggaggaagaaggccggagctcatccagtccagccttacctacagcaggaaactgcaccagctagactccattctgggaccatc

SEQ ID NO: 93309 - DNA, 348 bp, Zea mays
  Clone ID: MRT4577_185086C.1
atgtctggagataacaccaagagggagatcgtgaccgtcgacaagcccacgggctcggggaagactctctcaagggagtccggcaacaaatacaaggaggaatcctcttcctccatcaagtcacataggaggggtgacaagaagaaaaagaagatgaataaggtggtctactgcgagaccaactcttcaacaccctccacatccggcattgagtcgtccacaacttctaagcgccatgagcgcaagaagtatagtaagatgcccctacgctatccccgtatttccaagcacgctcctctactttccgttcccttaggcaaaccaccatattttgatggtgaagattaa

SEQ ID NO: 93310 - DNA, 789 bp, Zea mays
  Clone ID: MRT4577_185087C.1
tgcatgagaagcgagcgcacaagggcaagcagcacgaattgaaacgtggagaaattgcccactacgaaacaaactgagcaaggagcgctcgtgaactctatggtggaatcggcggtagccgatgccagagcgcacggcaaggaagcttcacaatttgacgagaccgtggccgagcgaattttatggcgcggactagagaaggactcggcgagcagaggggcgagcaggacgcgagctacgcgcaggcacgcgcgcaggggacatcggctgggcgcgcggccgactagagggagccggcgcggccatgcgagcagggtggagggagcagaggcgctcgcatgggagagggagagcctggcgagctgcgcgcaggagactccgagcagagggagcagcgacaccgtggatgggaagagcagagcaccggccaacagagaaccgagagggagaggaaggagctggagggagtgccgcgtagggagatggagctcgaagccgagctcgaggacgcggctgccatgggcgggtgctccatggaggagaagcaggggaaggggcgagcatagggagatggacgccatgggagggaaggtagagcgtgcagtaacatgggaaggaagagtagcgcgcgcacaaggagcttgggaccgagcagaaggacatgcgcagggaggaagacgcgtcatggctgagggagctcagggggagggaagccgcggcgctgcagagaaaaaggagactggaggcgacggcgagatttttacacgagcaggccaggcacgcaccccg

SEQ ID NO: 93311 - DNA, 439 bp, Zea mays
  Clone ID: MRT4577_185088C.1
ggccggaaataactggtcgagccaacccacgcgtccccccacgcgtccggccacgcgaccaacattaggcgtgattgaggtcatctaagctaaatcatttcttctgtctcacacttactggggggctacacagttctccggacaattactaacattgcaccaccaggtgccccgatataaaaaaagcaccactctctggacggcggcgatgcccggcaccgcgagaactacattaatgagctcatcaaaaggatgaattaagttcacgatcaaactcatttatagaaccctgcgctctaagtgacttcttgtgctggccctattttatattaaaaagatggatcgtcggtgaatatgcatgcagggatgaaggttctaactcgatgtgtatggaagaaatatgatcttttttgcggcgggttgggattattattttaag

SEQ ID NO: 93312 - DNA, 316 bp, Zea mays
  Clone ID: MRT4577_185089C.1
acgtcagaacgccgacgataggagggagctcgtacgggccaacgcacacacaacacaagctcgtcgtctgatgtgctcggtgggctgtggtgctggcgctggccgcggtcacgggcattgccgaggcgtccgtggcgggcggcgacatgaacgcggacatgactgaatgggcggaccaggttgtgggcctggcgccgtgcctgcagtacgtgcagggtcaggcccgcgcgccggcagctgactgctacggcgtcctgctccatgtgctagggaagagtcccaagtgcctgtgcgtgctcgtcaaggacaaggacta

SEQ ID NO: 93313 - DNA, 332 bp, Zea mays
  Clone ID: MRT4577_18508C.1
actgcagctgataccaactatcagtcgcgtagacgcagcgaacgcttgctgctgatctgcagcatcggcagtcgtcttagcattgcatcgactggctgcagtgaacagctgctgtctacttgcaggcacaacatctactaccatgtaatgatcacgctggaagccatgatggcttcttactgcgtcaacatcttctgccattacatctggaagctgtggaaaacgtagatcattccatgcgacaacgtcaatgggtgccactttaccgacagctagtgcgatacatatacgcctgtttgcaacagcaccatttgctagcattctacccacat

SEQ ID NO: 93314 - DNA, 128 bp, Zea mays
  Clone ID: MRT4577_185090C.1
tgccattgttgcaacaaccactcttattttattagagcaaaaaagcttatgtacacgattcctattcttcttaagaagtccattgtggtacctttattgtcctcggagtcgaatttgctagaaattag

SEQ ID NO: 93315 - DNA, 399 bp, Zea mays
  Clone ID: MRT4577_185091C.1
ttctttcagaaggcactatcactcttgcgccctattacacaaacgaatcttgcgaatctatcagtggcaatagcgctcttccgaccgctcccgcgagtcgatcctcccgagcttcctttacacctcctcggcgcgctctttcactgacacaggaccctgcgcgcgcttacctgtctcctacccaacgcctgccactgttggagcacgaagcggcgcacccatctctatccatgcgcccaatgagaagatcgatatgtactctccggtcttctatcccgcctgcactgacggatgaatcgtcagattaagtatcactcacatgtccgtcacccctttagacctcctcaagtgcattatgcatatcgacccatctaaatacacaagtatttcatctctatt

SEQ ID NO: 93316 - DNA, 375 bp, Zea mays
  Clone ID: MRT4577_185092C.1
gcaaatcacaacaccatatttctggttctaccgggtcccttcctgtcaaacaacaacggggcgactactaaactagatttccaaaaaaaaaacgaggaaacaaacaactcaacaaccaaaaccaaagaatcgcatgcagcaggcggcccatcagccaaccgccgccttctcctcggagaacctagggagctggacgagcgagttcacccgcgtcaccccgttaaggcccgaccagctctggtcgtgggcgcaagctgcgccgccgccgacggccgcgtctgccgaccccgacagcgccttctcgtgggcactttcgggcaccgtccggaccgtgaagtgcggggtcagggccggcttctgcaggttctgggcttt

SEQ ID NO: 93317 - DNA, 613 bp, Zea mays
  unsure (1)..(613): unsure at all n locations
  Clone ID: MRT4577_185093C.1
cggatctccggtctgaggtcgcgacacggcttgcagattttccacgctgtgttataacgctagctcgtaccgcccaaggccctgaagagtccagatccccgaagccaaacccctctacccgctctatactgaggagaccaacgacccacgtcacaacggtcccaaccctcgtcacagtagacataggaccactatcaaaggaactaacaggttgaactcgacataaggaaagttggttgtcgtctnnntatgaaacaaaggnntttcgatcacgnnatcgtcgtaaacgccgagtactagtagtacttcgtggtatgtaccactacaacagtagaggtactcctgtgttgtttatttctaacggaagagttattaacaatgctcgaggagtccctaacaaacacaatcgtaaggtaaggcttgctcgaggaaggtaccgttcgtactaaagtcgtgctgcaactgacttcgacgccttcttcctagaaggtccaagatactgaggacaccgtgaccaaacagactttctagaacgaggtaattctataggtcttgtttattctgcttaaggtcatccagatgtatttggtcacgaaggacaatgaagataatg

SEQ ID NO: 93318 - DNA, 502 bp, Zea mays
  Clone ID: MRT4577_185094C.1
ctcttccgccgctctgcctaaaccccaccgccgaaatgctccttcgctcgctcctccgccgcgcgcccggacccgcccgcttccctagcttccctcctcctggtctcccgctcctacgcgaaggccaagggtgggggcaagccggcggcgtccactagtaaccgtggcaaggtccgtgtcaaggatcccaaaggcgtggcgtccgaggacgcatccgcttcaggggaatccgccgcatccgctggcggggcagacgagatcgacgccgagttcgagatgcccaccgatccgctgcccccgacctacgacccggcggtcgacgtcgggcccggcggtcggccgctcttcgccttcaccgacacctttgcgtccttctcccaccgcggcgccaatgcctacgtcgatttcactttggatgaatggaaagccatgctaccagagggattgccagcagggatgatgaaggagtttcaagacacgaggcggtgcgctgtgatggtga

SEQ ID NO: 93319 - DNA, 558 bp, Zea mays
  Clone ID: MRT4577_185095C.1
ttttttttttttttttttttttttttttttttttttttttttttttttttttttttttttttttttttttttaaacaacaccaacaacggggggccctttaaactacacaaaaaaaggtttttggccaagctttcaaaatgtcccccaccaaaccccggcctgggaagcgatttcagtttttacaggagcagcggtgggctttacaaactttgaaagaccccctccccacttgatggaggggggggcccaagcaatcccggggggacgtttttaacttttggctcggcctgactgggaaggttttttaggctccaaagcaaccgatgagctttttaggagcggggccgggggcccggtacttggaaaccatttcctgggccttaaggacctcctaaccgggtttggcctccaccatcgttcgctttttttgggcttccttgggtataatggaaaccttgttcttaatcttctctgaaaattaagccttttttttttccagtggtccctaaatctttttaagttaagcttttatgttggctttcttggggtttccccat

SEQ ID NO: 93320 - DNA, 110 bp, Zea mays
  Clone ID: MRT4577_185096C.1
ctttcatgacgagattcataaacacggttctcttggggccgacctttctggacgaccggcgatgtccgtgttgatgacacgatcattgactacattgacttgacaaatct

SEQ ID NO: 93321 - DNA, 654 bp, Zea mays
  Clone ID: MRT4577_185097C.1
gtcgccttgcgggcttccctcaccgccgtcactctccgcgcgccgtcctccacccagaccccaccccctcctccaccaccaccacctcccacctcccccgtcgcgccggcgatcccggcctcccctcctccgcgatgtatcctttggaaatggaaggcaactcgaacccaaagacgaccaacaagcccaagtattccaagtttacgcagcaggagcttccagcatgcaagccactactcacacctgaaatcgtcattgccgcctttgcgctcattggcgccctgtttgttcccatcgggcttgcgtcgctgcatgcatcacgacaggttgtcgaactggtgcatagatatgatgcaagttgtgtgcccgtggatgacaaggttgggttcatccagaactccaggactgacaaaacatgcacaataacgatgactgtgccaaaatacatgaagagcccaatccatgtccattacctgatcgacggcttctatcaaaaccatcgaaggtatgtgagaagtcgaagtgacaaacaactgcgttataagagtgctgcacatttgacatcggattgtgtgcctgaaggtgataccgctgatcatgctccaattgttccatgtggccttgttgcttggagtttgttcaacgacacatata

SEQ ID NO: 93322 - DNA, 386 bp, Zea mays
  Clone ID: MRT4577_185098C.1
tgggtacccctccgaggtctcggccggggctccctgccaacacgacgcgaactaaattctcccaccctactataaatcctcatatggcgtggcggagcagtccatcgtattctatcctcctagcgagtcactctcatctgatcggcggagccggagcaccagtccaccatgtgggcgggatcgagcctggcgtcgtgctgtacggcgtacgcgtgcaaggcgtgccgagacggcggtcggcagcatcggccgccgctccgcccgcatcggctactgcgagactgttagctctctacctattggcatgctgggcgctccgcgagggcggcggggccgtcctccagacgatcccatggattaaccactaacactagacccctcgccgc

SEQ ID NO: 93323 - DNA, 141 bp, Zea mays
  Clone ID: MRT4577_185099C.1
aggctctaatggccaattgattcaggccaactgctggaaagggcctccgaacctgaatagggatttcaagaaccgaagtggcgccaaaggacgacgcatatcatacatgcaaccggtctggtcaagccgatgcctttttta

SEQ ID NO: 93324 - DNA, 274 bp, Zea mays
  Clone ID: MRT4577_18509C.1
gttgtccgtacaaagaaagaccagtgccacatctagacacagaaccctaaccacgcacgagcgcgccgccgtgctcactgtggccgacttcgccggcgtcgcgtgggggggggacggcgccagagcaggcgcgagcgcggcggagctgttcttccccttggccctgttgggcgccggcgggggcggaggcggtgccgtcggcttgttgccctcgcagtgcacctggatgccgttcttcttcgtcgtgcgcccgcccacctcgtcgccggcgctg

SEQ ID NO: 93325 - DNA, 450 bp, Zea mays
  unsure (1)..(450): unsure at all n locations
  Clone ID: MRT4577_1850C.1
ggaccggaangaccgacgcgaccgacccgaacaacatttactttgtcatggagtatttaaaatttagacagctctacaacaagatgtgcaagggtggcaagctcacagaggccgttgcacacaaatacttgcagcagctcattgatgctgcggattactgtcacaccccaggtgtgtatcacctgaacttgaagcctgagaaccttctgtttgatgacaatgaaaacctgaaggtctcaaattttatactgactgcactttcataattcaactcgcatcatggcttactccacaccacctttggcactccagcatatgtcgctcccaaagcgatcaagaaaaaaggctataatcgatcaaagtcaaacataattgcctgccctcttattctatttctactacttggtggatatcttccttttctgacccaaaacataatggaaatgtatt

SEQ ID NO: 93326 - DNA, 129 bp, Zea mays
  Clone ID: MRT4577_185100C.1
acgctgacgcgagtactgacacgtacaccggctttgatcccgcggccaaccgctggcgcacgcttctgcctagctgtgaccgcaacaccgacactgacagagaccggacagatttctgggcccataggc

SEQ ID NO: 93327 - DNA, 617 bp, Zea mays
  Clone ID: MRT4577_185101C.1
aatgcaatgcgtaccacacgatcgcagtcgaacaacattgtaaaaaccctgaatgaaggacaggttcccccttcggatgttggcgaggtctccgccttccctccttatgtcttccttcctgcggacgacagccctgtgcaccgagactgctctgtgtgctgctcacaactgctgcaggcacaacgaatgcgctttcagtgctgaatacagtgatgagattctcgtcaaccttgatgttcactgggcacattcttggacactatgacaggatagctctgctggcagaatcccatgactttcgtgcagactaggatgctgatgacctgactcgcgcactaaacgtcattgcactgatgacgactacacctcttgagcagaaataggctgggtctaccatgcatgttgattctgcacaaacatgaccaaatgatctacaaatactggactgacagcaacggaattgatacctatgaacacagctaagctattggaactggaaaagttgccaccccaactcacgttcatggagtacacgcctccctgatggattgtatagagaccaatgccagacctgatgttgctgaatctactaccatcatctacgcacgatctgtaac

SEQ ID NO: 93328 - DNA, 221 bp, Zea mays
  Clone ID: MRT4577_185102C.1
agagaattcgcaaagtggacttctggttgtaattctctcacaccatacatacacgcgctgaagagttttacgagatggcccggagagccctgggtgcgtgtatgtatggtgtgagagaattcgcaaagtggacttctggttgtaattcttagtcgtctctctctctttttgggttggtcaaggttctatgatccagcaatccactgaactgtttggtactg

SEQ ID NO: 93329 - DNA, 2144 bp, Zea mays
  Clone ID: MRT4577_185103C.1
cattgggacctcgagccggcggggactggtctccatagtgtaccaaacccacgaggccacaagcacgggactggcatatattatccatgtaaataaaataaagtatataaataaccccataaaaagctaggacgggactacctcccaaactcgcgagcgagtcgaggctccaaccccggcacatcacaggaggaggaggacgacgcgcccaccatggccatggcgacggccctccgcaagctctccgccaacgctctgcgccgccagccgctctcccgcatcacgccgctctactacatggcgtcccttccggcgacggaggagagatccggaatcacctggactaagcagttgaacgcgccgctggaagaggtcgaccccgagattgctgacatcatcgagcacgagaaggcccgccaatggaagggtctggagctcatcccgtcggagaatttcacgtcggtgtcagtgatgcaggcagtgggttccgtcatgaccaacaagtacagcgaggggtaccctggcgcaagatactacgggggaaatgagtttattgatatggcagagtccttgtgtcagaaacgtgctttggaggctttccgtttggacccggcgaaatggggagtgaatgtgcaacctctatccggttcgcccgccaacttccatgtatacactgcactcttgaagccacatgaaaggatcatggctttggatcttcctcacggtggacatctttctcatggttaccagactgacactaagaagatatctgcaacttcaatattttttgagacaatgccttacagattggatgaaagcactggattgattgattacgatcagttggagaaaagcgctgttctttttaggccaaagttgatcattgctggtgcaagtgcatatgctcggctatatgattatgaccgtatgcggaagatatgcaacaagcagaaggcaatacttctagcagacatggcacatattagtgggcttgttgcagctggtgttgttccatctccttttgattatgcagatgtagtgactaccactactcacaaatcactccgtgggccacgtggagccatgatcttttacaggaagggagtcaaagaaataaataaacaaggaaaagaggttatgtatgattttgaggacaaaatcaatgctgctgtctttcctggtctgcaaggtgggcctcataaccataccattactggcttggctgttgcgctcaaacaggcaactactccagaatacagagcttaccaagagcaagttatcagtaattgtgctaaatttgcgcagagcctgatttcaaaaggatatgaactcgtctctggtgggactgacaaccatttagttctggtgaatctcaagaataaggggatagatggttcaagggtggagaaggttttagaaagtgtgcatattgcagcaaacaagaacacagttcctggtgatgtttcagctatggtgccaggaggcatcaggatgggaaccccagcccttacgtcgagaggatttgttgaagaagatttcgctaaagttgctgacttcttcgatgcagcagtgaatctggccttgaagattaaggctgcaacgacaggtggaacaaagctgaaggactttgttgccactttgcaatctgatagcatccaagttgagattgcaaagcttcgccatgatgtagaggaatttgcaaaacaattcccaacaattggatttgagaaagagaccatgaaatacaagaactaatatctggatgacaagaagagaatgaggtcactcttcttgcagtaagcattcgaagcaagatgccacgatgattattgggagtttaaccatggtgtaatggcatcttatgttaaagagatgttggcaatttacagcatgtggaactttcgtcaatcatattgtagacacataccgcgagatgctatattgaccggacaattgcatttccatatgtgtaaaaaaaaagcgttcaaaaaaaaaacgtacatcctgacacacactccacccccatccccactcacaagcacacgtcaccctgcccgcaaggctatctactcatctctataatcaaactatactatgtgaaagttatagtctacggtgcaaaatagtgcaaaatagtgttttag

SEQ ID NO: 93330 - DNA, 634 bp, Zea mays
  Clone ID: MRT4577_185104C.1
cattgggtacctcgaggccggccgggatataggtgcaagattctaaaattagacttgcatgctttggaggctacattcccgagtctctgtactgaactgcttgctcggatgatacgtcgccctaaaatgcatcatttgctgatgaaattcgctcgtaaaatactcaaggtatctgatgtactacactcaagtgcatcgcattactaactctcacttggagcgcgttgttacgagaacgcaccacagataatactacaactccacaacggacaagaatgtctctagatatgtggatacgcacccgatgagtgccaacctattcatcccttactggccggattcggccaaaatatctgaactccactgaagcccgaacgggataagggtgcgatctctcgaaccttcgcccttctgctgttaacgaatcttcaaccccctgtccaaaggactaccaatcaaggtctccctacaactctgactcgtgacttgcctgctagccgacttgaatcattactgtagctagcccgtgggcggtaaatatcatgaatattccctatcgatgagcgattggaggatctccttggggtcgcaccatagtgattcgtcaagtcctgcatatgatcgtgcatacccg

SEQ ID NO: 93331 - DNA, 190 bp, Zea mays
  Clone ID: MRT4577_185105C.1
tagtgagtcgtattaaagcgtggccatgatgggggaggctccaagacgtaaccttacgattgggaattgcagtgatacgttgtgtgtacatgtgtcgcgtcagtgaatcttttatgatcccgaggaggggtctcagcgtttccatgctcacagggtccgcagccaggagggggtatgccatctgcgtagc

SEQ ID NO: 93332 - DNA, 402 bp, Zea mays
  Clone ID: MRT4577_185106C.1
gatttgacccatctcccaacccctacactcccggcggcggcgcaggagcagcagcaccagcacccgaggatggtgaagttcctcaaacccggcaaggccgtgatcctcctgcagggccggttcgccggcaggaaaggggtgatcgtgggcgtggtcgaagagggcaaccgcggacggccctaacggcactggcttgtcggcgggcttggccagtaaccccaaaaagggggcccgcagggaatccggccaaaaaaacgggaaaaaagccgggggtcaggggtttcattcaagttcgccaatttaacccacctcttgcccacccgctaaaccctcgaggtcgatttcaaggagggggccaccggggggcccgacgccttctccacccgcgacaaaaaggtcgcc

SEQ ID NO: 93333 - DNA, 371 bp, Zea mays
  Clone ID: MRT4577_185107C.1
gtcgtgcctccacgtgcccctgcgcgacgaccggatgaactgcatccccgagtggccccaccagcgcacgcacgaggagtgcatcgccttcgagcaccgcccgccggtgcactgcggcgccaacggctgcattgttcatcacccgctgtgaagctccggcatacgcatacgcatgcatgcatggccatacatgcatgtgggttctatcgaaacggtgacggtctttctgcgactaaaaaatggtatttgctataggcaaagttgttttggatcataaattcgcgtgattttgatttgtgtcgtcggtgccaaaaacgtgtatttggtagcgaggactgggagtgggtgtattagttttttcgcctttgttc

SEQ ID NO: 93334 - DNA, 566 bp, Zea mays
  Clone ID: MRT4577_185108C.1
gcgatgtgcggtctgcagcagcagccaggtccctgcccttgcagcgcagctgccggcggtgtctattactgaggaaactatgggtactgtaataatgtaatggagccgctggctagctacctagctcgctagtttactcatttagcggcgatgagtaacatagtgtcacccatcaccatgggtggcagtgtgagcaatgacctgaatgaaccattgaaatggaaaggaataatatataaggaaaaaagatgattggaaaaaaaaaaaaaaaaaaaaaaaaaaaaaaaaaaaaaaaaaaaaaaaaaaaaaaattaaaaaaaaaaaaaaaaaaaaaaaaaaaaaaaaaaaaaaggaaaaaaaaaaaaaaaaaaaaaaaaaaggtttgttccttgggccggaacccccctaaggggaaattttgaaaatttccataaaactggggggcgtttaaactttgctttaaagggcccaattcccccttaagggggggctttaaaaattaaagggcccgggttttaaaaacttttatcttggaaaaaccttggttttccccacataatgccctt

SEQ ID NO: 93335 - DNA, 259 bp, Zea mays
  Clone ID: MRT4577_185109C.1
tcccggcatcgtacccacacatatcgcccacgcgtccggaaccccataacgacgtcaataatgttagggagcttacatccgagcgcgcctagacgagagctagcaggggaagccgccgatatcttgatgatccggctccataaagagtacccaagccccagcctaaatgccgcagatggaggggtccactgaacaaaacgacaacggctggaacgctaaggagccagatataaaagcagaccgtgggcttgccgaggac

SEQ ID NO: 93336 - DNA, 160 bp, Zea mays
  Clone ID: MRT4577_18510C.1
ctgggtacatagattgtatagaatatattgacgttgtcatagtggtcgtacgtgccgttgaacggatgaggatgaggaggtgttaaaaaagtatatacacagttaagtatatacatggtaaaaagaaaataaaaaaaataaaagagggtgtttttttttt

SEQ ID NO: 93337 - DNA, 1138 bp, Zea mays
  Clone ID: MRT4577_185110C.1
accaccaccactggacgtcagcctagcaattagctcatcgactccagattggagaactcgacaccatgaaggtgctgatcgttgcccttgctctcctggcgctcgctgcgagcgccgcctccagtacaagcggcggctgtggctgccagacaccaccgtttcatctaccgcctccgttctatatgccgcctccgttctatctgccgccgcagcagcagccgcagccatggcaataccccactcaaccaccgcagctaagcccgtgccagcagttcggatcctgcggcgtcggcagcgtcggcagcccgttcctgggccagtgcgtcgagttcctgaggcaccagtgcagcccggcggcgacgccctacggctcgccacagtgccaggcgctgcagcagcagtgctgccaccagatcaggcaggtggagccgctgcaccggtaccaggcgacatacggtgtggtcctgcagtccttcctgcagcagcagccgcagggcgagctcgcggcgctgatggcggcccaggtagcgcagcagctgacggcgatgtgcggcctgcagctgcagcagccaggtccctgcccttgcaacgcagctgccggcggtgtctactactgaggaaactatgtactgtagtaataatgtaatggagccgctgactagctacctagctcgctagtttactcatttagcggcgatgagtaacgtagtgtcacccatcaccatgggtggcagtgtgagcaatgacctgaatgaaccattgaaatggaaaggaataatatataaggaaaaaagagattggaaaaaaaaaaaaaaaaaaaaaaaaaaaaaaaaaaaaaaaaaaaaaaaaaaaaaaaaaaaaaaaaaagaaaaaaaaaaaaaaaaaaaaaaaaaaaaaaaaaaaaaaaaaaaaaaaaaaaaaaaggggggggcgggttttaaaagaaccaaattttacttccccgggcttgcaaagtaatattttttttttggggcccccaaaattaatttcatgggccgtgttttaaaaacgtggggatgggaaaaacccggggtttcccaaatttaatcgcttggaaaaaaatccccttttccccagtggggttaaaagcaaaaaggccccacccattcccctttcc

SEQ ID NO: 93338 - DNA, 317 bp, Zea mays
  Clone ID: MRT4577_185111C.1
atcttacaatagagaaggctacctttctagttatagtcgaccaactacaggaattattgcaggatatttgtgcacgcgattctaccatggatgaaagagcaggttaattacatgagactgcataagctgctgatgcaggtggtgttgcgatacataaaaatgtttaagagaggagatattgtactttagaactggtgcggctgctgcaagaccacatgatgcagggtgctgcatttgcgcttaggttagagggaattgccggagaaagcggagctgcttgactaagtgtgcgatcgatagttgacagagagagatta

SEQ ID NO: 93339 - DNA, 791 bp, Zea mays
  Clone ID: MRT4577_185112C.1
ggtggagccgctggaaccggtacccagtccgaccttccggtgtgggtccctggaagtcccttcgtgcaagccaacaaccgcaaggccgaagcctcgccggcgcttattgccgcccaagtagcgcaacaactgacggcgatgtgcggtctggaactgcagcaaccaagtccctggccttgcaacgcaactgccggcggtgtctactactgaagaaactatgtactgtagtaataatgtaatggagccgctgactagctacctatagctagttcactcgtttagcggcgatgagtaacggagtgtcacccatcaccatgggtggcagtgtgagcaatgacctgaatgaaccattgaaatggaaaggaataatatatagggaaaaaggatgtttggaaactgataaaaaaaaaaaaaaaaaaaaaaaaaaaaaaaaaataaaaaataaaaaaatcggacaaataaaaagggcaaattctaaaagatatacatcaaactgacaggcctcatcaaaacatgcatccttgaggccccaatttgcaactataaaagagtcgtcttacaatccactggccgctgttaaacaacctttttacttataaaaccccgctgggaccccccttaatttccttacagaaaatccccttttccccatttggggttataacgaagaagcccgccccgattgcccttcccaaaagttgctgaaaaataatgggtaacgaaccttccctgtaggggcccattaatccctgggcatttgggggttaagggaagggggaccgatacacttt

SEQ ID NO: 93340 - DNA, 1684 bp, Zea mays
  Clone ID: MRT4577_185113C.1
ccaaacatcctttttccctatatatgattcctttccatttcaatggttcattcaggacattgctcacactgccacccatggtgatgggtgacactacgttactcatcgccgcttaacgagtgaactagctgtaggtaactagtaaggggttcccttacattattactacaggacatagttttctcagtagtagacaccgtctgaagctgcgtttcaagggcagggacctggctgctgcagctgcagaccggacattgacgtcagctgctgggctacctgggccgccatcagcgccgcgagctcgccctgcggctagtgctgcaggaaggactgcaggaccacaccgtatgtcgcctggtaccggtgcagcggctccacctgcctgatctggtggcagcactgctgctgcagcgcctggcactgtggcgagccgtagggcgtcgccgccgggctgcactggtgcctcaggaactcgacgcactggcccaggaacgggctgccgacgctgccgacgccgcaggatccgaactgctggcacgggcttagctgcggtggttgagtggggtattgccatggctgcggctgctgctgcggcggcaattagctcatcgactccagattggagaactcgacaccatgaaggtgctgatcgttgcccttgctctcctggcgctcgctgcgagcgccgcctccagtacaagcggcggctgtggctgccagacaccaccgtttcatctaccgcctccgttctatatgccgcctccgttctatctgccgccgcagcagcagccgcagccatggcaataccccactcaaccaccgcagctaagcccgtgccagcagttcggatcctgcggcgtcggcagcgtcggcagcccgttcctgggccagtgcgtcgagttcctgaggcaccagtgcagcccggcggcgacgccctacggctcgccacagtgccaggcgctgcagcagcagtgctgccaccagatcaggcaggtggagccgctgcaccggtaccaggcgacatacggtgtggtcctgcagtccttcctgcagcagcagccgcagggcgagctcgcggcgctgatggcggcccaggtagcgcagcagctgacggcgatgtgcggtctgcagctgcagcagccaggtccctgcccttgcaacgcagctgccggcggtgtctactactgaggaaactatgtactgtagtaataatgtaatggagccgctgactagctacctatagggctatagctagttcactcgtttagcggcgatgagtaacggagtgtcacccatcaccatgggtggcagtgtgagcaatgacctgaatgaaccattgaaatggaaaggaataatatatagggaaaaaggatgtttggaaaaaaaaaaaaaaaaaaaaaaaaaaaaaaaaaaaaaaaaaaaagggggggggaataaaaaacaaattacaaaacaactgctatttccaaattagaggatccctagctctcgaccaatacttggaccttatcatggtcatagactttaacctgaaaaaaaattgtctttctttcctacttccacaccttataccatccctattcctaactggttacccttctggtgcctaatgcgttagctatctgctttttattgagttgcgctaattgccttcttttgcttccggaaacttctcctttccctt

SEQ ID NO: 93341 - DNA, 301 bp, Zea mays
  Clone ID: MRT4577_185114C.1
aacacaagacaagagggccaatgttgctttgggactctttgttttaaagaagagacaacgcatgaggtccctgagcacggcaacagtttgtgggctccaaaaacactgtcactactaaggggatgcacgaacgtttctcagaggttgggtaggctctcttaataagaaagggcctcttgcttcaggcgcagctacttcatgtgcggttcatacacccctgactgatgaacctgggaccactgatcgaagacagtggtcattcgcaaaatgcgggataattaaatgctacgcatgtaaatgc

SEQ ID NO: 93342 - DNA, 208 bp, Zea mays
  Clone ID: MRT4577_185115C.1
cattcggggccggaccagcggcgtccagcgtaccattagtgagtggtaatagaggacaagcttgttaatgatttgactgttaaagaatgggaaggcaatgtaaaaacaatgtttgatgttgataaaggacttcaaaaactattttttgtggggggggaggatgctgtacttattgttcttgggcaaaatgatggtattaataggtgct

SEQ ID NO: 93343 - DNA, 276 bp, Zea mays
  Clone ID: MRT4577_185116C.1
gcgcttcttccttcctttctattatttctctttcatctcctttctctctcctgtagaacctaggcggtcatgacatggtgccatggcaggcgtgtggcatggctgcagtcggactcgagcatgcagcgcggctgtggttatcacgatcgcatgagatgcgaggcataggggtacacatggacaatttctgaggtgcgcagtgtgccggcgaggaagtagtgctctggagtcgacgaggagaggccacaactggattgagcatgtgtgcctagattt

SEQ ID NO: 93344 - DNA, 177 bp, Zea mays
  Clone ID: MRT4577_185117C.1
cataggtgggcttggctgtctcctccgcctcctggttctggttcgtgttcctcaggttctccggggttcgtgttcgtgggtgttcgttatcgacatggcggcgtcggatctggattatctcgtcctctgtcggcagctcgtcttgtccacggactactactcgctccataactcctt

SEQ ID NO: 93345 - DNA, 446 bp, Zea mays
  Clone ID: MRT4577_185118C.1
gcctcattttttttttttttttttttttttttttttacgacatgcacgtatttccataaataattcttaaaatgttctattctaaccttaagtactagtttgatgacaagaaaaattgaatggatctatggacggatcgatgggcgatgtcgatggagagcccaaagagccgggcatgtatcttctccatcgccgagttaataacacaacatgagtctcgaccgatcgacccgcaagccgttgtgcacacgcgcgcgcgcgtgccgaccgatccagcccaactagacaccggcagcgggcaccatgcacacgcgcagcgtgaacgcgacgaccacggacgccacggccaccaccatcccccacttctgcgcgctgctggccaccgccgccgctttctcgccgccgggcctcgccacgatggagaacatggacaggccgaggctgga

SEQ ID NO: 93346 - DNA, 865 bp, Zea mays
  unsure (1)..(865): unsure at all n locations
  Clone ID: MRT4577_185119C.1
aaggggccaaggagggtatcaaggagccgcagccctagaaagtaacatatatgtatttgttttgtaatactcccctccgtcccaagatatatttctttctggcacttttttttccatccacattcatccgaatgataatgaacgtagacataaacacaaactacattcgtagattaattaattaatgtttgtttagtcaaacgaanttatattttgggatggagggagtgttttttctggtgtttttgcatataccaagagtattccatccataactgaaaatatctcccgtttgcaggcctcctagaggaagaagcgtctccagtgacagccgcagcagcagttcaccttcccctagacgcggcaggtagaaagaacccgtggcattgtgtatgcggcaggtaaagccttttatcccttgactctatctgtatcgtttgcctgtgcttgtgacttgctgtgagttcaagtattggttcgaggagaagatgagagaacgctacagcaatgctccaaacggatctgctcaacatgcctggtcgaccgccctagtttgtgtggtctaccctagacagaattatctgctgtgttggcttgtgtactttgattgtaccccaagtattttgaagttctgaacttatttctgctaattggtgtctgaagtggatatgttgaatgtattttgttttgttggatagagttcctcagcattgccaccgtatgaaagatgaatctattgatcaaccaatttgtgaaaaaaaaaaaaaaaaaaaaaaaaaaaaaaaaaaaaaaaaaaaaaaaagaaaaaaaaaaaaaaaaaaaaaaaaaaaagattggannttgggccgaaaccaccctaagggga

SEQ ID NO: 93347 - DNA, 701 bp, Zea mays
  unsure (1)..(701): unsure at all n locations
  Clone ID: MRT4577_18511C.1
ccggccgggatattatccnttctttatcatcatgctcaacctcaagaacaaagtagctctcgtcatcggcctcggtcaaacaaacaccgaaggttggggtatcggtgcagcaagcgccgtaacccttgcacgacaaggagccatcatctttggcggcaacagaacaatcgcttcaactacaaagacaaaagaaaccatccaacaacaaggcggccaatgtgatgtcgtcgccacagacgctacagactctgcatccgtcaaggctgtcgtcgacgcttgcatggaaaaacatggaaggattgatatcctgttaacaagcgttggtcaatctcaaccaggggatcctgcatccatgacagaagacgtatgggattcgcagatggatattaatctcaaaagtgtgtatcttgcatgtcaccatgttcttcccattatggagtcccaaggaagtggttcaattatttgcatctccagcatcgccggtcttcggtacattggcaagccgcagatagcgtacaacacgagtaaagcggcgatactccagttcgtcaagctacggcagttatatacgcgccaaagggtatacggctcaacactgttgttccgggactcatggatacgccttacacaaagagtctnggcgcggagatttgctacgccaggggngttatgatgagttttgtagcatgagggagggacag

SEQ ID NO: 93348 - DNA, 573 bp, Zea mays
  unsure (1)..(573): unsure at all n locations
  Clone ID: MRT4577_185120C.1
tcttgtacagggtgggggggtggggggggggtcatactttcccctctgaagcagcacaaccttttgttccaatgagattcatcaagacttctccttcacctggctctggggaggactagagttttaggaaagcaattctttataatctgctacttaagtnnttcatgtgggggggggggttttgtttttattggtctcaatttgagctgctggttngaatattattaacaatgtgtccttttaccaagtttattacttcatctggtgtggaaagggnntgtggatcatactatgggccagtttgttttaattctagtttttcctttcttgggggtgagccctcaatgtgngataagggtcatgggtgagggggaattaagttcactgggctntggctgcattattaggtgaaatttacagaagagagatttgtattgctgtcctcggctttaatctcctgtgggggtttctgctgggtgacctttctgtcgttcgaattcatttcggctccactgggatatcgtggggggggggcccctgggagccccgtcccaaacattaaaaccccaaaaa

SEQ ID NO: 93349 - DNA, 313 bp, Zea mays
  Clone ID: MRT4577_185121C.1
ggttgcggaaaaaaaatccttccttatccccccaaatgataaattccgggcccgttgcaacactaagggggggccacaaattatttttggttaacaagttttgaaacaatgccttaaatatacagttacatgtcggcactggaacggtaacaaaaactagcttcgggggaaaacccaacgttttaacctgccgggggacagttcaatcgccccctggttgaaaatggagtctttcccccagataaagggctgttgaatccgttcgaagccctgccttctggtaacctcaacctggtgccattttttcaacttt

SEQ ID NO: 93350 - DNA, 1863 bp, Zea mays
  Clone ID: MRT4577_185122C.1
ctcgaggaaggccggggttgtcctggacgtgcccttatcctcttatgccagcacgcggcgcccgccgcgcgctcgccaactgccgcgaactctcccggcctcacactccttgcgcccgccgcggcagatgccgctcgccggcattgccctcacgcccctcctcgtctcacctctcgcgccttccccgcgccgtagccgtgtagccacttccgccgcgagaaggccaagggctctccagcgagctcggtgctcggctacagccgcttccggtgaagccggtgagctgtcgcacgcgacactgctatggagggcggcgaagctacccatctactccgtagcgctaataccactcacagtagggagcgcttctgcttattatcatgcaggcttattctttaccaagcgctattttgttctcctgacagcagcagtcctcgtgatcacttggctcaatctcagcaatgatgtttatgactcggatacaggggctgatagggacaagaaagaatctgttgtcagcattactggcagccgagcaatgacacaaaatgcggcgaacttttcccttttcctcggctttgcagggctactttgggcctttgcagaagccaaggatatcagattcattttattggtgatctctgcaatcttctgtggttatgtttaccagtgtcctccattccgattaagctaccaaggactaggcgagccgttgtgtttcgctgcatttggtcctttggcaaccacagccttttacttctcaaacagcagcttaaatacttcgagcggaggagcggctcttctccctctcactaaaacagttatagcttcatctgttctcgtcgggctgacaactactctgatactcttctgcagccatttccatcagatcgatggagatctcgccgttggaaagatgtctcctctggtaagaatcggcactaaagcaggatcgcggatagtgtcgattgggattgtcatgctttacattctcttggctacgtttgggacatgcggatctctcccgccatcttgcattgtcctctgtgcccttactctgcccatgggcaaaacggtcgtggactacgtgctgaaacatcacgaggacaacgcgaagatattcatggcgaagtactactgcgtgcgcctgcacgcgctgtttgggatggcactggcctctggtttggtcttggcccgaaatggtatattagcctgacagacaggctcataggcggcgctgaaatccaggagagggtccagagcaccctggagtttcagaatcagcgagcaccctgttcctcaatttatgttctgaatctgaactacttctgattcgactatcgaacaggccgatgagaatggggcgcagtactgagcagctgcagttttgccaagaaacggtggagggaatgggccctaggagaagtagaactactacagcgtcagaactcagatgcacaccggcccgtatcggacggcaagttcggtgctcgagttcatttggttcagcgtccttgtacgctttggtccgctctcgggggcttgcttgctcgtgcacggtcagactgccgttgcgccggggtccgggggatgccagtgtatgtatgcatatggattgaatcccaagcaaggacgagtcatgcactcatgtacaagcattacttctgtgcacagacgaccatacagattatatgagatctcactcacaccttttttttttgcatttggtttagccagcgaccggtaattgcttgtcactgcagcgtcctgtttcgacatgtctgtcgtggcaagctagagtattaggctgtccgcagccgttccccctaaaaaaaaaaaaaaaaaaaaaaagggcggccgctc

SEQ ID NO: 93351 - DNA, 323 bp, Zea mays
  Clone ID: MRT4577_185123C.1
gaagcggacccacagagcgaaggcatcaacgcctctagaacgaaaccctaaaaaccgggtttttaccggcgaaccggcgcgcgagtacaccacgaaccagacagcaccgctgcggctgccgcctgaccccgaagagtacgagacacgacaaccggcgtaaacaaaggcccctaaagggccaacgattctatgcggaggacgcaaacacgaaagacgaaaagatcgccccactccggcgaagggtgaacaacagaaccgggaagacagcacagacggggacgaaagaagacccggcgatcagagaggaacaacagaaagaggag

SEQ ID NO: 93352 - DNA, 376 bp, Zea mays
  Clone ID: MRT4577_185124C.1
catcgctagttaatgatattgagatggagagctgcagctgctcgtcagagattagcccctgccaagattactgctcagctgaagaatatcaaccaactgataaaaacttacttcagcaccagagaattccggtgctcaagatccattatcccatttaatgacaggctattgcaagatagaagctctcgttcaggaagataggctggcccatataaaatcattatcgcagaagcagtcaagtctatcccagagccaatacctgatgctcttgcaaaactgtctcatgaaatactggatgcagcaccaccaccatgagctgagctgatgatgccttttgcacagttgatggcaccaatcactaatggcaatgggccat

SEQ ID NO: 93353 - DNA, 725 bp, Zea mays
  Clone ID: MRT4577_185125C.1
tacgtaagctcggaattcggctcgtggtcatgctttacattctcttggctacgtttgggacatgcggatctctcccgccatcttgcattgtcctctgtgcccttactctgcccatgggcaaaacggtcgtggactacgtgctgaaacatcacgaggacaacgcgaagatattcatggcgaagtactactgcgtgcggctgcacgcgctgtttgggatggcactggcctctggtttggtcttggcccgaaatggtatattagcctgacagacaggctcataggcggcgctgaaatccaggagagggtccagagcaccctggagtttcagaatcagcgagcaccctgttcaatttacgttctgaatctgaactacttgggggcgcagcactgagcagcagcagttttgccaagaaacggtggagggaatggccctaggagaagtagaactactacagcgtcagaactcagatgcacaccggcccgtatcggacggcaagttcggcgctcgagttcatttggttcagcgtccttgtacgctttggtccgctctcggggggcttgcttgctcgtgcacggtcagactgccgttgcgccggggtccgggggatgccagtgtatgtatgcatatggattgaatcccaagcaaggacgagtcatgcactcatgtacaagcattacttctgtgcacagacgaccatacagattttatgacgtttttttttttt

SEQ ID NO: 93354 - DNA, 1288 bp, Zea mays
  Clone ID: MRT4577_185126C.1
aactctcccggcctcacactccttgcgcccgccgcggcagatgccgctcgccggcattgccctcacgcctctcctcgtctcacctctcgcgccttccccgcgccgtagccgtgtagccacttccgccgcgagaaggccaagggctctccagcgagctcggtgctcggctacagccgcttccggtgaagccggtgagctgtcgcacgcgacactgctatggagggcggcgaagctacccatctactccgtagcgctaataccactcacaaactggatacctagaagttgtttcgggattgggattgctatgactatacacacgcgtttgtgtatggttgcaggtagggagcgcttctgcttattatcatgcaggcttattctttaccaagcgctattttgttctcctgacagcagcagtcctcgtgatcacttggctcaatctcaggtaaaaatgatttttttttaaaaaaaatgggaagtcatttttaacgcaatgtcagttcattgaacagaggcttatggtgtggattattagttgaaagcctagaacagagattgtagaagtcaaatcctttgtttgacttgactgcagcaatgatgtttatgactcggatacaggggctgatagggacaagaaagaatctgttgtcagcattactggcagccgcccaatgacacaaaatgcggcgaacttttcccttttcctcggctttgcagggctactttgggcctttgcagaagccaaggatatcagattcattttattggtgatctctgcaatcttctgtggttatgtttaccaggtaatattatcttgaatccctttttcaatgaactagtgtagtatatcttacagtctgtatcactggttagacttagaccatatgtacttggctgtttgtattgactttgaattcttgtacacacataacagtatttaagccattattcaagtggctagagtagcatttctcgttctttactttgattcttttgactttgtgcatttcctcagtgtcctccattccgattaagctaccaaggactaggcgagccgttgtgtttcgctgcatttggtcctttggcaaccacagccttttacttctcaaacagcagcttaaatacttcgagcggaggagcggctcttctccctctcactaaaacagttatagcttcatctgttctcgtcgggctgacaactactctgatactcttctgcagccatttccatcagatcgatggagatctcgccgttggaaagatgtctcctctggtaagatcggcacta

SEQ ID NO: 93355 - DNA, 454 bp, Zea mays
  unsure (1)..(454): unsure at all n locations
  Clone ID: MRT4577_185127C.1
cattgggaccctcgaggccggccgagaactaccctatccccaagcacgacgcatcgaacttacctgcctttgtctggcctatgcgggctgcttgaccacgccggcttctactgccaggacggggaaagaagggaacccccgcgagactgcnccggcctactccgaccatctctaacgctccggccagaggaagatacctgactgcatttacattgtgtagactgctacgcccaaggagatccctccttatagaccctggctgttctacatcacgactgcatcgtgaggacgaacactacttgagacaaggaattggtgctatctgactaccaaaagattatatggtggccgccagaagaatgtatcccgcccacctcacttctgaaacatgagtagagccatttcacgctacatcactccaacagctgcaggagatgggcatcattgctgtcga

SEQ ID NO: 93356 - DNA, 389 bp, Zea mays
  unsure (1)..(389): unsure at all n locations
  Clone ID: MRT4577_185128C.1
cctccttccgctacactcacgctcccactctacccaaaacgaccgctctcggcnccctccgcccttctttccaccaccggcagcacctcatactaccatcaccacacctatcggcatctaagcatctccctcctccagcacctctagcggtgattgcaattgactctttcttgtccttgaatagcatgtttttcagttccttatcgaccgttgtcaccttggctgtctttcattctcccgtagtcttctactaactgcttctatctgctgtcccgtttccagtgcatctgtttttactgcggcagttccaatgtccttaagtctaactaccatgacttccatctttatcttttcaattagcttttagatagttctatatactcttttta

SEQ ID NO: 93357 - DNA, 2789 bp, Zea mays
  Clone ID: MRT4577_185129C.1
tggcttctcctccccctccggttcgggttcgggttcgtgaggttctccggggttcggtttcgtgggtgggccgcacgacccgcgttcctacgatctccccggctgggaggggcctcacaagcggatgcgcctgggcgaggcgccaccgttcgatccgtacgactttgtgcctccaccgccgccaggaagggcttctgtggagggcgatcggctgctcggcctgatccgggaccatggccgcaatccacttcccggttgtctacctgacggcggctttggttaggatgtaggtagattatatccccggcaaggatgtgattttgcggatttcgaccaaaagttgccacctcccatgctgaatgataatggcttcggacaaggttttgtgccagacgaaggccctcaccgaaagtattttgacggtgccaatcaccatttccatcagttccacccagagccattgcctggtgcgccgctgcacccttcactgcctcgctatcctgatccccatggttcacatgcttggcatgttgaggcaggtgctgtgccacggccagcagagcctccattcccctctaaccatgattaccgtgctgcaccgccacggctgactgcaaattcatcattgtttcctgtcctttctggttcgccaacaacggaaaattttccatcaacggccggtaccttgcctccagcccatcccatgccaaacaaaaaccgtcatgacggacacatcaacgatgaggggccaggtttcatttatcgaccacaatcagagcataacttgatagatggaaggctgaccagtgcacattattctctggaaaattccaatgtcacggtcatcaatgcttgtgatttgttcaagcagccgcttcgtggttcacgccctgaccatattgttgtcatcctcagagggcttccaggtagtggaaagagttatctggcaaaggcattgcgcgatcttgaagttgagaatggtgcaaatgcgcctaggatacactccatggatgattatttcatgattgaagttgagaagaaagtggaagacactgaaggccctaaatcttctagtgcatcaaaagggaggaggcagttgactaagaaagtaattgagtattgttatgagccagaaatggaggagactttacagtcaagcatgttgaaggcattttcaaagacccttgatgaaggaaattttacatttgtgattgtggatgaccgcaatctgcgggtagctgattttgctcaattttgggcaactgcgaagaaatcaggctatgaggtgtacttgctggaggcaccatacaaggatccaacgggctgtgctgcaaggaatgtgcatggatttacattggatgagataaaaaagatggcagcggactgggaggaggctccaccattatatctgcagctagatatacattcattattccatgatgataaccttcgtggccattctatacaagaggtagatatggacactgaggatgttgatgatgctaatgacgcaactagcatcattgctgagagctcgcagaaggctgtacaggatccaccaaacgaaggcttctcaaagccaggggaggagtggaactcagaagtagaagatggcctggatagtttaaaagaactaggacagagtaaatggtcaaaagattttgaggatgaaaccacaaagtccgagaatacagaggaaaacacacatgctctttctggcctggcccggacatatagcacaggacgcaaaagtgtcagttggggtgatcggcttgaaaagggtgggttttccatttatgcaactaaaagaaaacttacttcgtcactaatcatagggcctggatcagggtacaatttggtatccaaccccttggctgaagatagttccacaggtacaaaagggaagacgaataacgagaccaaaaaacggttcagtgaacaacttcgtgacgaaggtgaatccttcagggcagtttttgacaagacaaagcagcacattggagtttttgagaatggagatgaggaataatccttgactagaggttcttttagttgtttgcccttaagcgttttggatgctcaggatgatacttcacacttacggaggggactagtgcagacagcttggagtcactttttcccccttccgcttgtcatcctgcagcaagtcacaatattgagccattcagtgaatcgtgggatcaatattctttagtccaatcgccttcatcaagcgcaatgagcaatagttccaatgtgccgttcaatgaaagcaatgcggatttttttggttcatgggcttgttgtccttgtaaaggcaactcacacatgccacaaagatgtactgtacctatgtatcaggcacgcacactgaatagtggccatcagtttttacatgtttctgttatatatgtgttgttgttaccacgagaaactaaaaagggcggcctatttaaggttcaatttactcccttccacgaaagtattgtttttttttgttctctaatcaattaattgtcggtttttaccaagtttgtgaaactggtttccaattatcttttaaaatatcttggcctcggtttgattaaagggggcatttctttttattttcaatttatgttttgcccccttttcgttttaatgcgtggggaatttgggcctttttatttttcccctttttttttttttttaaaaatttttttttgattaagggctcttttttctttatttttccctcccactttgttaatatattttttttccgtgtatattttctaaacttttttttt

SEQ ID NO: 93358 - DNA, 557 bp, Zea mays
  Clone ID: MRT4577_18512C.1
agcacagcagcaggacgagagcgtagccagaggaaggagagcggatcgagctgaggggagtacgcaagatgcagggggaaggcatctcctagttgtgtggcggccggcctctgtggggggcgcatgcctgctcggtgactcgggaaggcacgggccgtgcatcagcgagggcggatcacgtgtgcgtgaacgagaacgttccaaacgggacggcgaccgcgcaagtgggacacggcaggtcggcggcgcgcgctgcactcgaagaggctgcggcaacagttgttttttttttgtcccacctcggccacccgccgcacacacatccccgcgcaagtcgcggcagtctcccgtcggattccccatcagaatgtgcgcaccgactgcaacaagatcagctaagctacgacgaccaagctaataagcctaccgaacgtacacgtacgtcccgcacgctgcccgagtgatgaagccagggaagaaataaaataaaggagctgtattgccaggagcaggatgcagtatcggacctatatatatactgaaccggaagactctat

SEQ ID NO: 93359 - DNA, 296 bp, Zea mays
  Clone ID: MRT4577_185130C.1
aaaaaacatacgaatacagcacccaacaaaataggattatccttctcatagactacttctcggacttggtcaaacttttagaatggctaaggatagaaaacaaaccagggcgtaccaactcatcaagtcctgtatgcgagcctttttaaccaaggatgtaatcccttacatgtgcttctaaatccattgcttttggaagcactgcaaagtgtggaaaagctaccttctgggtctggctcatttcaactgtcccattttactttgcaacctgggaacacttttttacaaatacactt

SEQ ID NO: 93360 - DNA, 197 bp, Zea mays
  Clone ID: MRT4577_185131C.1
gggccgcgactacgtgttcgttcgtgagcgcacacacacgtcaaccagatctcccccaaagccagccgtcggcacctccgcttcaagatgcagatctttgtgaaacccctgactggtgagagtatcaccctctgttgatctcgtcgtcgcagtggtgctgactggaggcttttttggtggtattgtttgccgccgcc

SEQ ID NO: 93361 - DNA, 418 bp, Zea mays
  Clone ID: MRT4577_185132C.1
tctttctttttcccctctttgcctgcgcgaggtctcagaatcccgagagggaaaaagaaaagaaaagatgatgacttcctcggcctgttagtacctgaggcgatccctcgagcgcgatactgcgctgcagacagagagagcagcgcgctgtccaagaaccgccccgtcatgagtgagcggtgccacctccacctccaaaaaacaggatccagttgacaaccacaaactatgtgcctatttggttgacaacgcagctgacatcatttccccagcagcagagaagatacttgtcaatcgatgatctgtcattctttcgtaatgaaactggagatctccagatccttcagattttgctgtatgtcatatactattactatcaactgccgtttaggtcacatcttctataggcgatgctcga

SEQ ID NO: 93362 - DNA, 291 bp, Zea mays
  Clone ID: MRT4577_185133C.1
aaaaaaaaaaaaaaaaaaaaaaaaaaaaaattataaaaaaaaaaaaaaaaaaaaaaaggggggagaaaaaaaaaacgagcgggagcaaacaaaaaaaaaaaaaaaaaaaaaaaaaaaccaaaagggcaatcactttaaaggaccaaaacaacgctttgactggtaaaacccttaacgatactaatctgaatccccaaaaatcaaatcacggtttcaccatttaaaactataacgatgagaaacccaccgatttcccaaactaacatttgctcaaccataaaccgctaatgg

SEQ ID NO: 93363 - DNA, 274 bp, Zea mays
  Clone ID: MRT4577_185134C.1
ccagtcgatcccggagtcgatgggcctgacgggagtcgtgacaggtttgcttacgcggagcggtaaaggtgcaggagtttgcgcgattctgatgagcagtatcccgatgggacagatgatcgtctaaacgctcgaatggggaggcattattccgatgaggctatggcggtcatgccaggtgcccagcgtttgaacgtgtcctctgatcacgagaggaacgggaagaacagccatgagtctcgtcagctggatgaaccgattgtggcaactcact

SEQ ID NO: 93364 - DNA, 250 bp, Zea mays
  Clone ID: MRT4577_185135C.1
ctagctatttaggcgagtagcgccttggcacccacgggctagccgtactggcctgtgtgatgaactggctggagatactagagattgagatgagataatgcgagcgagcgagcgagcgacagggttaattggttcatcagattcagaactcagaaagacggctagctgctaggctctctgtctgtctctactagatctctctgtgtgttgtgtgtgtgtgtctgtaatcgattcccatcagcttgctgca

SEQ ID NO: 93365 - DNA, 313 bp, Zea mays
  Clone ID: MRT4577_185136C.1
aaacggggcaccgactggccacatttaattcaccttccgggaaaacaggaaattattctactttattaaccaagggcattcccgcgggaacccaaaattttttccaattcccggcccccaacaccctttttagccccctaactggaaaaccatccacagtttctgaacagggttctgatcccccctccatcctaaattgggggttaaataaaaaccccagtttcaaaaaggggcctggccctcaaataaaaacaattttacgggtttttctttcacccgctcctacaaccaatttttcaggggggaacaaaag

SEQ ID NO: 93366 - DNA, 129 bp, Zea mays
  Clone ID: MRT4577_185137C.1
ggacctgggctacaacatatgacattcgttgtagcaccaggaatttcgcggcaatcaagcgatcggttccagccggtgattgccgccaaaatgctgtgtaagcacatgatcagaagtgctacaacatat

SEQ ID NO: 93367 - DNA, 404 bp, Zea mays
  Clone ID: MRT4577_185138C.1
cccaaaaaacccccaaggattaaaaaggggcttccgacccaaggggctctttgggtacccccacaaataattaaggggagggggaaaacccccaggaccaaaagggccctgtacaggcggttaaggggaaatccccaaacaaaaaagaaaggcccgggcccccccccattgggggaaaacaatttgggaaaaatgttaaattacccaggggaccccggtattcccgggggaaggggtttcctttaatttggggggaaaaaaaaacaaatgggccgtttccccccccgggcccccccccgggcaaaaaaaccgccccaagaagaagtgaaaaaggtgtgattaaaaagaagccaaggccacatctttaataggggaccccgccaaaaaggcttttagaccgcccc

SEQ ID NO: 93368 - DNA, 388 bp, Zea mays
  Clone ID: MRT4577_185139C.1
agggcgaacaagggaatctaccatataggaaaaggggggggggcaccaaaacaaggggggggggggggaccaacaacaccaaaaggcatgcttttttttaaaaagcaacccgggacggggggactaaagactaatcggaaaaaaaaaaaaaaacttccccaaacaaaggggaaaccaggaacacgcaaaataataactaactaaaaaggccaacaattactgggaagtggaacttcttccgggccccccggaataaaaataagggccccaatcggggtttgtggcccttttgaacttgtaaaaactggaatggttccggaaagggcccaagccccccctgggcgccccgaaggtggtggtggtggccaacaactggacccccttgaaa

SEQ ID NO: 93369 - DNA, 254 bp, Zea mays
  Clone ID: MRT4577_18513C.1
gctggggcgggggataagggcacggagcaaaagcacccctccaaagcgcagcaatcgtcctgaccggacatgattacggcaggaggactgacacgaactcacaaaggccagccacctgcatcaacggaggttactgaggaacgcgcaactcttgcccgggagggccgggacacacacaaatgtttgggaaacccacaaacgcgttcacggcttagacctgtgcgtccagctgcatgaaatgcttactcctggcc

SEQ ID NO: 93370 - DNA, 452 bp, Zea mays
  Clone ID: MRT4577_185140C.1
cccacgcgtccgtgcacgcgtccgacaacgcttacgtgttatgcacgatgaggatcaatgcgtcgacatcaacactggtggcaggacgaactattgctcaagattatgaacaaggacacataacgctatcgcacgacgacagccatcgtattcgcgtaagaagatcaagtgcctcggagcagaccaaccatatgctggcgaacgctctgagcacctgtacatacctcaatgtgagtgacaacgtcgaaaacttctgacggacgcagtcattaacgcagatatacatggaacagctacagtccctgatgatcattgcgacgacttttccatactactcgtctcgcaacagcctgtacaagatctttgacgtcttgggacgtgttatacacatcaagatatgcgatttacaagatcctaacaccgtaaggactttgcaagtctgacactctttg

SEQ ID NO: 93371 - DNA, 263 bp, Zea mays
  Clone ID: MRT4577_185141C.1
gaatccacacagaaccgatggtttttagcacagcaggctgtcagccaagggttacagtacataatcagcctccttcttacaaaccatctacccgaataagcagcaggctacaacccattaattgccacacagggaatatatatatatgtagcacttgccttttactgaaccagggcatatgctcctgctgcttactagttctagaggtgggggaagcactgctagaggtcgttcttggaatgcctggcctccgaatgttcttt

SEQ ID NO: 93372 - DNA, 253 bp, Zea mays
  unsure (1)..(253): unsure at all n locations
  Clone ID: MRT4577_185142C.1
cggacggtggngcggacgcgtggggaatcgtgatgggatacatcgaagtctagcaaacagtgttggtttaggacatttgaaaaattgctaggtttgaatgtaacgatacacagatagtttgttttgatcatcacacatttctgtagtgtgcagcttaatcggcaaactgcttccaggcttgatcacataccacttttcagttgtaacatgagttcaggttttttcgtattctgtattcccttaatgacaaagg

SEQ ID NO: 93373 - DNA, 364 bp, Zea mays
  Clone ID: MRT4577_185143C.1
ttttttttttttttttttttttctttttttttttttttttttttttttgtttttttttttttttttttttaaaaaaagggggggattgcgaaataacttacttttttccatataccactatgggccggtttaaaaattatgaggcgctcccgctaggaagggtttttaccaaatcatgggaaacttataacttcttacccaatcaagggaaaaaaaaaggaaaaagggggaaccgggaaagcaatagctcgaattatgtaactggcaatttaggggcgggaaaaaggccccgggggggtccgactcgcccccccccccggggttaaccccccccggaggggaaagggaaccgggcgccccaatc

SEQ ID NO: 93374 - DNA, 1889 bp, Zea mays
  Clone ID: MRT4577_185144C.1
gacggaaatgacgagctattgctaacgaggatttcttcgttgccatgcgtacaaagaacccttaaaccctaatcctcccccgctacacgttcgcttgatctttacggccgccgctactcgttcgccatggctgcctgctcctccaggctcctatacctcactctgagctcctctttcctccgctcctgccgcctcgcgtccagctccctacttcccaccgcctcccgctgccacccggggtcgctccactccctccgcttctgctctgctgtccccgagtttgtcgatgtcgccgccgaccctgccgaggcggctgtatcctccggacacccgtggccggagtggggcaacttccttgataagctgcgggccaaggggtacttcgagcaaggtttgccctccagcgtgagttctggcgagggagccgccggagatggggatccagcaactgcatctgagaacgcagcaacggctgcttccggtaatacggtggtggatgcggaggatagcgcggtgacctcggaagatatctatcattttctcaaggacgagaacagggtgaagaatgcgtgcctcaaatttgggcgagaccgcttcgatctcctcagcttgcttcccaagcaggatattcaagctattgttatgtctggctgtcctaataacaatcggaagcccgtctattctgcaaaaaggttgagagagtacgtgcaggtcaaagaagaagatgcatgcagcatttgcaaatttaaggcatcttgtgatagagcttatgtcactccaaagggtgaggttgaagttaggactgttgatgttgttcgtatactgttaagttatgcaatggataaaaaccattcaggagataactctgttatcgaagaaagtgtgcaagaatctgcaaaaaagcttctctcaaagcttactgaatttagtgacacaacaatcgatccatctcttccgaaacctgcatttcaagttgctaggaaggctcagggctcagtggggaaggggagagaaacgactgcagttgaaatgaagaagggtgactggttgtgcactaactgtaacttcttaaattttgctcgcaatcgtcactgtctcgaatgcaaagcagatggaccaaagaagatagaagcggccgtggatgcaatgaaaatgggcgattggatctgcacacagtgtcagtttatgaacttctctcgcaacaagatatgttttaaatgtgaagaacctcacccgaagaggcaactcaatcctggagagtgggagtgcccctcatgcgactttgttaacttccgacgcaacgctatctgcaagaagtgcaatcaggaccgccccgaggatgatacccgagatagtcagcggggactgagaaaaaccagaggggctggcaagtttagaagattcgactatattgatcagaagagcgatgacgatgatgacaatgcctggttccagaagcgtggggcaagcatgaggtcgaaaccggaccagagaaccaccactgccaagagcagaggctctgacggtctggatgatattcttgttaccaccaagcgtagaagcaccaagcaagacgaggacgacgaggtcttgccgtacgagggtgcgcgcaagcatgttgtgagcagaagggcaacgccttcccagaggaggttcacggctgcccgtaaccagtaataatacccgagcttggagctttgatgactccgttctgtgaacaaatttcacagcgtcgctcgctctgctgctgtgatgcagacgaatagatgatggacataacacataagcgtgttcgatctgtagtgttattatacaaattattagggaacacacattgataaagctggtcctttacgatgatttttttgttgtcaaaaaaaaaaaaaaaa

SEQ ID NO: 93375 - DNA, 658 bp, Zea mays
  Clone ID: MRT4577_185145C.1
attggtacctcgagccggcgggatcgttagtagggcaggccgagtttgcaacagccggcacaaacaaccacccacacacccatacaattggtgcttcacgttccaccaaccgaggccttgatcagcgcagcaatcggcgtggtgacaatggagttcctcccgggtgcgtacaagaaggcaacagcggtgctcgacgaggcggcgagggcgcggctacggggcccgttcatcagcgacaccgtcgcgccatcgccggcgccgtccggcggcgctgcggacgccgacgacgatctgatggattcggtcgacgagttctacaacggatacggcgagcacggcacggacggcggcgccgtcgccaaggatgccgtggcgtcccgggctacggagtggaaggaagctttgcgattgacgctggcggatgcggcggccgacgcggcagccgtacggatccgcgccgaggcggagcgcattgtccgagacgccgggccagccgccgttggcggcggcggcgggattaggaagcaccttgtggagcggctccgtgcgaggggttacgacgtctctgcagatcgtcgtggggaagaaccagcagcatcgccgcgccgggcacgtacgagtacgtggacgtgacagtgggctcgccgccgcccctgcc

SEQ ID NO: 93376 - DNA, 1319 bp, Zea mays
  Clone ID: MRT4577_185146C.1
ttgggaccctcgaggccggccgggacacgttcgcttgatctttacggccgctgctactcgttcgccatggctgcctgctcctccaggctcctaaacctcactctgagctcctctttcctccgctcctgccgcctcgcgtccagctccctacttcccaccgcctcccgctgccacccggggtcgctccactccctccgcttctgctctgctgtccccgagtttgtcgatgtcgccgccgaccctgccgaggcggctgtatcctccgggcacccgtggccggagtggggcaacttccttgataagctgcgggccaaggggtacttcgagcaaggtttgccctccagcgtgagttctggcgagggagccgccggagatggggatccagcagctgcatctgagaacgcagcaacggctgcttccggtaatacggtggtggatgcggaggatagcgcggtgacctcggaagacatctatcattttctcaaggacgagaacagggtgaagaatgcgtgcctcaaatttgggcgagaccgcttcgatctcctcaggatattcaagctattgttatgtctgggctgtcctaataacaatcggaagcccgtctattctgcaaaaaggttgagagagtacgtgcaggtcaaagaagaagatgcatgcagcatttgcaaatttaaggcatcttgtgatagagcttatgtcactccaaagggtgaggttgaagttaggactgttgatgttgttcgtatactgttaagttatgcaatggataaaaaccattcaggagataactctgttatcgaagaaagtgtgcaagaatctgcaaaaaagcttctctcaaagcttactgaatttagtgacacaacaatcgatccatctcttccgaaacctgcatttcaagttgctaggaaggctcagggctcagtggggaaggggagagaaacgactgcagttgaaatgaagaagggtgactggttgtgcactaactgtaacttcttaaattttgctcgcaatcgtcactgtctcgaatgcaaagcagatggaccaaagaagatagaagcggccgtggatgtaatgaaaatgggcgattggatctgcacacagtaacttgcaccttacattataccattctttttccatttctttccagcaccgtttgatttgcatcaccctgtctgtgccttctaggtgtcagtttatgaacttctctcgcaacaagatatgtattaaatgtgaagaaactcacccgaagaggcaactcaatcctggagagtgggagtgcccctcatgcgactttgttaacttccgacgcaacgctatct

SEQ ID NO: 93377 - DNA, 263 bp, Zea mays
  Clone ID: MRT4577_185147C.1
cccacgcgtccgcccacgcgtccgcggtcgcttttgcggacgcgtggtcgctcacaaggagagcgatcaagtgcctgaacgaaacggagcccatcagctacagacccgtctgcggttacaaggctgcaaccactgactacagcctgatggccatggccaggtcctacttcctgcggacgctggagccgataggcatacgcgtccagatactcaacatcacggagctgtccgactaccgcaaggactgtcatcccactgtgttc

SEQ ID NO: 93378 - DNA, 1047 bp, Zea mays
  Clone ID: MRT4577_185148C.1
ccggccggggtgcgggattattcgtgcccccgcatagtagtacactgaaaaacaacgaagagcgagagcctcttcgccatggcgtcgaacaacctcctcgtcgacttgaagcgctgcttctcggcgccgtcgctccgttcctacctcgccgagttcatctccaccttcctcttcgtgttcaccgccgtcggctcagccatctccgcccggatgctggcgacgccggacgttaccagcagcgcctggcccctggtggccaccgccgtcgcgcaggcgttcgggctcttcgccgcggtgctcatcgccgccgacgtctccggcggccacgtcaaccctgccgtcacgttcgcgtacgccatcggcggccgcatcggcgtcccgagcgccatgttctactgggcgtcgcaactgctcggcgccaccttcgcctgcctctccctcaacctcttctccggcgccgaggaggtgccgacgacgaggatcgcggtggcgatgaccgggttcggcggggcggtgctggagggcgtgctcacgttcctgctggtgtacacggtgcacgtggtcggcgagcgcgagcctcggtcgcgcggcggcgacggcaagcgggagttcgcggccacggcgctgggcgcgctggcggttgggctcacgcagggcgcgttcgtgctggccgcgggcgcgctgacgggcgcgtccatgaacccggcccgctcgttcggcccggccgtcgtcagcggccacttcaagaaccaggccgtgtactgggccggcccgatggtcggcgccgccgtcgccgcgctggtgtaccagatcatggcgtgcccgagcgtgacggggaacgtggaggcggtggtcgtttgacaagctagtgtgcaactgtgctgtgcatccattcgttgtggttgtgaatgagtcgagggatctaaatgtgtgtgtgtgtgtgagagagagagagagagagatcatgatgacattgtgtgtgtaattagtttgtccagtgggctttcagttccgtaacgttgctgtacttaaatagcttgttgtacg

SEQ ID NO: 93379 - DNA, 650 bp, Zea mays
  unsure (1)..(650): unsure at all n locations
  Clone ID: MRT4577_185149C.1
tgggtaccctncggagccggtccggggaagatttcagagttattatgtgtaagcaataaaattagcataatgcctatagggggtcaaccaaaaaatattgtagactgatttttttgcttacttgttatttggatcctaattgttattgtgtgttaagagtgcttcttgggcaaagagattttttaaggctgaacagttcaaatggtccagttcttattgtatcttctcgttgacgggtatgagaatccaatcttatgatgaccagttacttcatttagctgctgacttagctcagaggttgttgcccgcatttgacactcctacaggttcatcaccttttctattattataatcttcctggaatgacttggttatatcttgcatcagaaatttgattccattttttttcattttttgttgtaaatggaccatttccattggtcaagaattgtcacttggcgatacacatggaattacaaacacacaacntgcatttgatgctttactataataaaaaacataaatataacaaacacattgtttaaggacggaaaaaacttcatgaatcatgaatccggatagtcataattaacttgcctctccaagtttgcggactgaaacttggatgtcatatagatgtagtattgggg

SEQ ID NO: 93380 - DNA, 543 bp, Zea mays
  Clone ID: MRT4577_18514C.1
tattttttttttttttttttttttttgaaacgggggaccagcatccatattggggaacggagaggaacaaaacaatatgattcaacaaagaattaaaacgagaagaactaaaacattaacacgccaggttgaaataagacaccgtcatatgactgcatagagaggggtaaaacagtagagttaacaaaggtaaaggtttactttttgcagcttatatggtcatgatttgatcattcttgtacaacatacagtatgctttcaaataaacttttttcaagctgggcgagcgaaggactcatgaataatgcaggatcatctagtcttgaccttgttagcttgaaatgttgccgaaatctttttccagctccttgtggtgatgagcgtcgatatgatcacccatgaactttttgtgtttgaaggccattggtttagtctttgcatacaagtcatgcacctggcactgctcttgtcttgtgctgttaaattacattgatcaccacgtcttggaggtttttcgaatgaatgtctcaaaacaagcacttt

SEQ ID NO: 93381 - DNA, 805 bp, Zea mays
  Clone ID: MRT4577_185150C.1
caagcaattactctgcttcaagtaattgtagtcattggcgcttttcagaaacaatttttttttgagaaggggaggagctccagagcacagttgatagaaaatgtggtaagatctctctccttgtgccctttggaccaccctcgacttctcaagcaggaaggtctggattttagcaccacacattttaccagattcagagaagtgtatttcaataagcttgccaaatcggcttgagttatggtttcgtgatgtttttgcattccccaatgcttccagaataacattggtctgaagaacctcagactccgtaccactagcacccccaagatcagacaaatattgcattgcaattttagctgtctcggtttttcctgatccactttcaccacttattattatagattggtttatgccatcttgcagcatctcgttaaatgccaaatcagcaactgcatacacatgtgggtcatcgttggccttttgcttgtattgcatgattgaagacttcccatagagagcaacttcttttaatggattgacagcaatcagaacaggtcctgcctttgtatagataagatcacgagaatatcgcaattgcagattgtaaagaactgaaggttcattcaagtaactcatctggatcaaatcatccactccatcgaggatatcagggttagcaggcaagagttgttctggtgacaccatcaaaacttttccattagccaggagtatttcagcatcatctccagacattgattggatctgtccaagttcccactttgcatttggtgaagctagatcgcga

SEQ ID NO: 93382 - DNA, 603 bp, Zea mays
  Clone ID: MRT4577_185151C.1
ttttttttttttttttttttttttttttttttttttttttattgatgcggaaattgtacgttcttcacttttatttaaacgttatcgacgcatttctcccgccaactaattgtgtatactcctgggatgcaacgacgtcacaatagttttacacacaaacacaacgaaaaaaaacgaatggctggcgagctgctaggtgtacagttggatttggatgactttcttctgtgtcgatcgcggggtcactgctatttgtaaaaaaggagtgtgtaaaaaagctggttccaggtgtccgggaggccgggaaggcaccagtggctgcagtcaacggagccggcgccggggttggcgcgctgccccggcaaaaagtcgccgttgtatgccgacgggtgcgcgtccttccgaatcgccgacagcgccgtgatgtcaaggaaacggacggggcttttcatgccccgcagcacggcctggatcacctggtcctggcccgaggcctggccggtcgagttgagcccggtcgccggtgccgtctcgccgtagcagtttttcgacaccgggttgggccattccttcaagctgtagggcgtgggcaacatggactgg

SEQ ID NO: 93383 - DNA, 516 bp, Zea mays
  unsure (1)..(516): unsure at all n locations
  Clone ID: MRT4577_185152C.1
ccgggncgagcccacgccgtcacgcagtagacacataatcagaggtcatactacaaaacacttctgaaaagtacgagttactgaattctcgctgagcgcgcgaagtgagctacttctgtattctgctgaacgctanacactctaacaaggcgaattcaaccaaccttcaaggttacctagagggcatgcaaaagttccgctcgtaatctcgaaagtctcctggcgaagaaggttcataccgagcaattacaaanagtgcatctctcaagaagggagaactcaagcatcatggggtgacgtgaagggcaccacatatgctcataatctgccttttggtcgggataagactctcgtgtacactatgctgtagcccgccccactcatggaaggaaggataccggtctggaagtaagaagtcttttattggagcgcaaaggattcactatgtattataaaactagcttaaagtgcatgtgtgttaacccttttcttttacgttgctcgaattatactttt

SEQ ID NO: 93384 - DNA, 209 bp, Zea mays
  Clone ID: MRT4577_185153C.1
atcaagaaataatattatatataattatgttaattccgtagcaatgcacatttatatacctactataaaatgaagatcacatttctattcatcagatagtaatatttgaaatgtacaacattctttaacatatttcgacgacataaactagggtgtaaatattatttgtgcacacactttgggtgagtgcaggcagctttttattaaac

SEQ ID NO: 93385 - DNA, 1211 bp, Zea mays
  unsure (1)..(1211): unsure at all n locations
  Clone ID: MRT4577_185154C.1
ggggggggggggggggggggggggggggggggggggggggggggggggggggggggggggggggggggggggggggggggggggggggggggggggggggggggggggggggggggggggttacttggtgggacacgacgctggtacaacggctacattcggcggtcttgagtactcccatataaagttgaggctgcagaagagctagttggatggacgaatacatcgggatgtgggaatttgctggtattggcatgtggttgctcagtcaggtctgatgctggagtaatgggacgggtgggtggggagcaggagcggctgtctgcaggctaggttgggaggggtgggggtgcgttgcacatgtgaggaggggacatggatgggtgggaaggagtgaggagaacgtgcggtactgggtgtggtggaatggaggacggaagggagggagtggggggtggggtgggggagggtggtgggtgagaagcggtggacttggggtctgagaggggtacgaaggagtacggagggggggggggggagtgtcgtggaggggaggggttgggggggtggggcgaggcatgtggggtgggcggggtgggaggagcatggggggagagcgtgggccgtgtacgcgtggggggggggtggggtgcgtgtgggcagggggggcgggagggggggggggaggggcgtgggngngggggtggggagggggagngtgggggagggggggggtggggggggnggggggggagcgggggagtggacaggaggggggctgggggggcggggagcgcgagggggtgggggggggggggggggggggggggtgggnggggggggggggggggagcgggggggggaacgganggggaggacggcgggcggggagagggggnggggggntgggcgtgggggagggggaggngggggggggaggggggggcgggggggggggggggggggaggggggcgggggggggggaggggtgttggcagcgggggggggggggggggggggggggggggggggggggtgggggcgggggaggggggcgcggggggggggggggaggggggggggggggggggtgtgtggggatcggggggagggggnggggggtgcggtggtgagggtgcggggccgggggtgagnagcgggggggggacgggggggaggtggaggggcgagggggggggggggggtgggg

SEQ ID NO: 93386 - DNA, 589 bp, Zea mays
  Clone ID: MRT4577_185155C.1
cgacgcggccaaacggtagaaagagcaagatagtgtcgtcgacggcgtttagccacctgttcccctccgccgccgtcgccgcggtatccctcctccctcgctgcgtctccttcggcgccagcggtggagctgcccctggatggaggagaagaagccgcagcatggccgcggccaccgcgggggcggcggcgcccgcctacacctccgactccctcgtcctctacttcaaggcggagggcaccatggaggagagggccattcccaagatcaccgagtctcttcagggtatggaaggagtcaaggacctagaggtgctcattgaagaaggcatcgcgagtgttgtgttaacaaaggagacaaccgtgcaagctactggagtattttttaacctagtggaagctatccagggagctgggttcaaactgcaaacactaagcttgagcttcgacgatttcgacgacataacagcaggagcaggaggcaatgtccaacccagcgagtgagctaatttgtgcagccgtgcttagtgccaaatgcatataattctgtcgggtacttttacattgcgtttaccccggtgaatttcccg

SEQ ID NO: 93387 - DNA, 1540 bp, Zea mays
  Clone ID: MRT4577_185156C.1
cattggaagtctcgaggctggccggaagtcatcgcccacacgcgaaggcacccagcagcagccgctccccgaactgaggaaccctaccacgcgggcgacggcggtgcgcgaccggtgacgggacagcggcagcgccccctcctccatctgctggtcccaccgcctcctgacgttatccgatactgccaatccccctcttcgccgttgacggagcttaccgaggaaagaagggcagggccatggcgggagccttcgctttccgcctcgtgcctcgcctcgccgcagagccggcggcgagggggaagggtggcggaggaggagccaaccgcgacgccggcagcagggcgctggtgtcaaagaaaccaaacaagcagcagcatttgtggatcaggaaggagacagctgggtcagggaagaaggctctccgtcttattgatgctgtaagatatacacttgccattgatactgtttcgaagttaccaaatgaaagagaagctatttatggtgcattggacaagtggagtgctttcgaacctgaatttcctattatagcagcagcaaaagctttggggatgttgaaaaggcgacgacaatggttaagaataatccaggtaaccaagtggttgatgagcaaaggacaggtgctgacatggacaacatatgatacacttctgctcgcacttcttatggataaacgggtagacgaagctgagtcagtttggaacactgtaatacagactcatacccgctcagtgcccaagaggttgttctctcggatgatcttgatctacgacattcaccagcgcccagataaagttttggagatattcgcggatatggaggagttaggtgtgcgtccggacgaggatacagcgagacggatcggaaaggcattcgtggcttctggccaagaagaaaaggagaagcatgtcctcgagaaatacttgaagaagtggaagtacatccatttcaacggcgagcgcgttcgcgtgcggagggacggaccattggcgtagtgcccgttttctgaaaaatgctcgaacctatcagagtatcgtgccggtaggcggtagggcaggggagatgctgttactgccgctgtgacagtcaggcacatggatatcggcactagtccctatcctatgtatgtggaatggaacggaaactggagattggttccatggctctagcctgtggaggagacgagcggatggggggtggctggctactaccggcgagatagtgatttaataggcactacataggcgtccagtgattgcgatggctttaacttgcgtatgtgtctgcggaatggtcccgtgctatttcggtgacttgtgcttgtggaattgtgaacacccactggaaagtgtatatcatgagagggacgatacctgacgtctgggcccatggcttgctgatttcacgcaacgaaccatttttgtttgttgcggtgccccggggttcacgtacttgttctgttcttgtgatctggcacaaagctgttggcttatccatttttatgcccatctttttcagc

SEQ ID NO: 93388 - DNA, 655 bp, Zea mays
  Clone ID: MRT4577_185157C.1
gaactccaccaaagttagtaaaatataggggaggggtgcttcttcgtccgctaaagctagacgatctttgttcatctgctatccacgaggacgccgtggatggagattgcaatcacctgtggtctgtggatggagctcggctgtgacgacacgaaggccctcggctgcgacggtgagtaggatgtcgccctaggaggagcagccgtgcgggggccctcgactgtcactgtacgccggagctcagccggggaggaggaagaccagcgtggaggagatctgaccggggaggatccgcagcgcagaggcggtcggccgcgagggcgcggaggctgccgaccgccactacgctccggagctcggccagagcggaggagcaccagcacggaggagctccgctgcggaggcgaggagcagcagcgcggaggaagaccggaaaactgctattttcccatcgtgcgaacatagagttgtagtggagttgtaaattatatttattaatgcatttattaatacgaatagaaaaataaaataaaatctgcaaacgtctccaatttttttaaaaaatacggtttccgaaatttattataatatgtagggaaaatgtaacgtgtgtactacataagggaaaaaaaaaaaaaataaagcggacctcgag

SEQ ID NO: 93389 - DNA, 137 bp, Zea mays
  Clone ID: MRT4577_185158C.1
tttgggttgggtataatgaacaaaggcgacgcgtcatttgggaaccaacagcttgaaccacacacaagtgacatgcacaatactcggaagtactactactgaggtagatgaaaacatctccctgcgatagctagcaa

SEQ ID NO: 93390 - DNA, 405 bp, Zea mays
  Clone ID: MRT4577_185159C.1
cacctctatggccttctttctagaccacctagggctccatcctgtgtccgatccgccgagagcacaccatctttctccactccgatcgaatcgatgcccgccgagggcgataagaagattataaccctaacaagctcctataggaaggagttcaaggtcgaaaaggccgcgactatagactcgcataccatacgacacatgatgctagattactgcaccgacatatagtatccctctttctaacgtctactacaggatcctatccaaggtaatagagtactgctacaagcacatacatgccgacaggaacatcgccctcgactagaaggtctgtttcgactacgtggttttccagatccatcaacagcgacattatcttcagtgagaaacttaagaactgatatt

SEQ ID NO: 93391 - DNA, 297 bp, Zea mays
  Clone ID: MRT4577_18515C.1
gcgagaacacttggttctaattctcgtcagcccctataagataacgcccatcttcacgggtcacgagaagcgttcgagctccttccacgggagaaatggtcaccgttcactacctccccgcatcttatgcctatgctccctccgcgcctgcgtacctttcctcacccgactacacacgtatctctcgctccgagccctcttcccacgtgcccatctatgtggctacctgcctttcgcctccccactcgcttcaggcggatacgggacctgggcggcgacttctttgtctttctcaga

SEQ ID NO: 93392 - DNA, 393 bp, Zea mays
  Clone ID: MRT4577_185160C.1
ccccagatgacaaaaacgactagtcccttaatgaccttgttatgctattggtagcgactgcgatgatgactaatgcctatagccctgactaacccagacaccttttgggggcggatacactctcatgcacaaggtggaccatgtcatctacgaaacccaggaggctacgaacgcttacacactaatggcccctgcgggggatcactcttgcgaaagcaagattgaggacgtgcactcaacctggtttacaataatggtagaaagagagacaacatacaacattggtatgggggtcaaaccaataattctcttatgacaatctcgtaaaatgttttctattgatactattgaatgtacaatactcatattaactgggttgttgtctggtgtggg

SEQ ID NO: 93393 - DNA, 1044 bp, Zea mays
  Clone ID: MRT4577_185161C.1
actcctaagggcgattgggtacctcgaggccggccgggcccttccccccttccgttccgttccgatttgacgagttggtggctgctatagattcactcacccctctccatttctgataagtatccagctagctaccagtgtatgcaccaggcagcagcagcatggcggagtgcaaggacgacgacagcggccggcggtctccgtcgtcgtccatggacagcagcacccaccccccggcgctctccaccgcgtcctcggcctcccgccgcccgccggagaggagggaccagctcagccccgacctgcagctagggctcagcctgtcgccggcgtcctccgccctcctggtagcggagacaaacaacagcatcgtcccttctacgccaaggaaccaagcactcccggattggcccccgatcaaaccgttccttagaagcgccctgacagcctcggcacgccgacggcgaacgctgttcgtcaaggtgtacatggaaggcgtcccgatcggccggaagctggacatgctcttgctggatgggtacagcagcctcctagcgaaactttgccacatgttcaaggcatctatcacttatgctgacgctgtggagtaccatcagcgggttcctcacgagaaggccgcgcatgttctcacctatgaagaccatgatggagactggatgatggttggggatgtaccgtgggagctctttctcggaagcgtaaagaagctgaggattgcgagaacagacagatgctagatagcaaactttttcatgcggtggatcgactctgtttcttcttcttttaatatatattaggttcattaggaaagattttgctgaactaaagagtggagtcgtgatgctgaggctatactaaccgtgtacagtgtactgaagaaacgccagccttgctaccacccctgcaaaattaaattttggtattttatgtttcctttccctgtttctttgactgccttgtaaataccatggttatttgtttatcaacaaggagtttgcatggaaaattttattgttccaagcg

SEQ ID NO: 93394 - DNA, 253 bp, Zea mays
  Clone ID: MRT4577_185162C.1
gtcttaataatagaatgagacacacgcggaattgaatataccgaaccacttataacatctatctaacaattggtatggattaccaacacgaccgatcccaacccaacctaaccaaaatgtacaggttattttctctgcatttgcactcccattgccaccaccactgcctgctgtcttgtgactgtccttgggaactccttcattggaaaagggtttatccagttattgatggactgcattacaacttgaccgc

SEQ ID NO: 93395 - DNA, 261 bp, Zea mays
  Clone ID: MRT4577_185163C.1
attagagttgaaattgataaaggttaaaaattttaactataagaaaatcataaacgttaaaatttataaaacaagataccgtacgtaatattaaaataaaaatatttcggttaataataagtgaaaaatttaaaattaattaatttgagctaaatgcccgatttccaaaaggaaaaattttcgggcaagggggtttagtgaataggccaacactccggaaaagggattatcccttttaaccgctaaaattttttttcttta

SEQ ID NO: 93396 - DNA, 420 bp, Zea mays
  Clone ID: MRT4577_185164C.1
tataaaaaaaaaaaaaaaaaaaaaaaaaaaaaaaaaaaaaaaaaaaaaaaaaaaaaaaaaaaaacaaaaaaaaaaaacaaaaaaaaaaaaacaaaaataaaaaaaaatataaaaaaaaaatagggggggctccttttaggggatccaattttccgtcccctttcttgcaaccctttggtttttcttttgggtcgcctaatttcatttccttgccccgccttttccacccttaggctggggaaacccctgggttgccccaccttattgcccttccaccaaattcccttttctccctctccctttttacccaaattgcccgccccgtttgcctttgctaccatttgcccaacctctatgcttaatggaaccccccctgtaggggctttttatgcctggcgtttttggtggtcccccccagcg

SEQ ID NO: 93397 - DNA, 218 bp, Zea mays
  Clone ID: MRT4577_185165C.1
gccaaatccacaactctatcgtatctaggtgcggaggggagatgtctaaattgtgaaccactttttgctaatgaaagactaccctggagccaaatgctaagagaatagaactcctcagctaatgctaatgccgcattgactagaacctacgcatcaaaaatcccaatatatgaaccagaatcatgtgccgcaatatcaagccttgccacaatcccaac

SEQ ID NO: 93398 - DNA, 177 bp, Zea mays
  Clone ID: MRT4577_185166C.1
ttttcctacgtaatctaaaaggcggcacctccaagatgggttgctgccacgaaaaggcagggttcctcaaagagtaccggttgtaaggcagcaattgttgctgctaaaggatggcagcgaaccaatggattaagcactgccagtggattaagtaatggttgtcgctgttgtaggtac

SEQ ID NO: 93399 - DNA, 323 bp, Zea mays
  Clone ID: MRT4577_185167C.1
acgtaagctcggaattcggctcgagaccaattgagaagctcactctcttgcgcccgcccatttcctctttcacggggcgtcttttgaaaaccatgggcggtacaaccgaggaccccattattgcggacttacttgctaccgcaacttgccacatcaggccttccaatgcggcggttgctactggcccctccctccgccggttcgcttcagaggccacagacgagtgagggtacgcatacaagacaggtgtcaccttgcggcccctatcaacgctcctgaagaggagaagagcttctacttacaaattggacgggcggtgtttc

SEQ ID NO: 93400 - DNA, 120 bp, Zea mays
  Clone ID: MRT4577_185168C.1
gggggggcccaccccgtcgtttggttttggatcgtggccggccgttctggtgtgttccaggctaccttccgcttgcttgcaaggtcatagtttttttatgggggaacctaatttaaatca

SEQ ID NO: 93401 - DNA, 276 bp, Zea mays
  Clone ID: MRT4577_185169C.1
ggtgattatttaaaatacatcgctcgcgcaaatacgaattcggaagcccgactcacacgggtgatttttatctcggaccaattaatttgaacacgacgacaaaaatgttcggagtaaaataatccgaatcgcgcatccaccgagaaaaatcatgcgcgagattatgatcccattcgttcctcagcaagttgttgtggtgatgaaatcacgtatacgttcgcagatatagtttcggctaatttcgatcagtcgtttcacgtccggatccaaatcttc

SEQ ID NO: 93402 - DNA, 689 bp, Zea mays
  unsure (1)..(689): unsure at all n locations
  Clone ID: MRT4577_18516C.1
gtccccctagcaactccgcagaccctctcctctcgaggcgtcgcggctccctcctgtttacctcttcttcttcctgactatatactctcccctcactcatcctcactgaacagtgatgtcgttccgcttgcttgattgctccatagattctgagatgaccgggacctcggagcacgatgaatccgctgctgcctacttgcttgatgtcctcgctgggaacgcccgaccctccgctgacgatctgactgtcattctggagtaaggtggctgccctcctgacgatgatacgacgcaactcctgctgccccaactgaacgaaaaagacttcctccnatctccccgccgcgcgacagggagaactttgcttcgaacccctgcggggtggatgtcgacaatgtggacgacgcctcacctgctgctagccgacttgctcctacatgtcgccgcacagagagagacaaggtggactacatggacaaccgcttcgaccgtctgtactgcagcctctgcgaccacgccgatgactactaccagtattggtacttgcttgcccccatttgctttatccgaccatgcatcagacattcaccatgtggtatactcggatagtatcgcatctagacctgactgagggtgaaacttacgtggagcagtatgatctatcatattgacacccctgctacagagta

SEQ ID NO: 93403 - DNA, 340 bp, Zea mays
  unsure (1)..(340): unsure at all n locations
  Clone ID: MRT4577_185170C.1
ccccccacggcggggtctccctttaaggcgccccccctttttttatatttnataaaaaaaancnggggggcgttttgaaaaaggtttgggttttcttgctgcgcccggagancacccctgtttgcgggcccattctttcttttgaaaagggcccttaatgatgcgcggacggccccaggtcgctgccaaaacccgacagggtggaccaacgccaacaggagaccgcccggggttgtcccaacaccccaaaagttgcgacccgtgggttaaccccggattcccggcccggcccccgggggcgcccccgcggtccccatagggagttnaataaagctggggg

SEQ ID NO: 93404 - DNA, 307 bp, Zea mays
  unsure (1)..(307): unsure at all n locations
  Clone ID: MRT4577_185171C.1
gctccgtctacccctctacacctgccattggtttttaaccatggcgtgggctactcggggccgtgtttttaaaaacttctttgctccnaccatcctcttcgtcccaaatactatctcttccccctccgtctcatgatccatcaccgccgccaagctatcccacttcctctccttttccacctcctgaaacaccgccctctgggccaccttcatcggcggcataataatgttcaataacctgcctaagcacatcttcttcaacttgcataacaagatgttctcctcctacttcacgcttatatctacc

SEQ ID NO: 93405 - DNA, 396 bp, Zea mays
  Clone ID: MRT4577_185172C.1
cccacgcgtgcgcagacgagcggtggcgctgacggacaaggagcaggcggaagaggagttgtgccaaggcacactgggtatgtcgcgtgactcgatgcacaagcgccgagccaccggtggaaagcagaaggcctgaaggaagaagctaaagtatgagcttggtcgccagacagccaacaccaagttgacaagcaataagacagttatgagggtccgtgttcgtagaggtaatgcgaaatggatggctattggcctcgacactggtaactactcatgtggaactgaagctgctaccctcatgacccttatcctcgacgcggtctacaatgcatcagacaatgagcttgcgatgacacagaccgttgttaagagtgccattgctcacgttgatgctga

SEQ ID NO: 93406 - DNA, 452 bp, Zea mays
  Clone ID: MRT4577_185173C.1
ctcgaggccggccggggaagcttatcgcttatcatccgcgcctctacatttcttctctctctgatcatacccctgcgggacacggctatatgccccgagggacacagccgcctgatgcggtctcatgtacgacgacttcctcttctcggcccccgtggcggaagcaaatacctaaccggagaccgatgttaccggcctcaaaaaaggattcatccagttccagaaccaagtctgggttcctgtggcactcctctatgacaaagcactggtaaccatggacacgggagaagatgcttagttcacatacacatatgcaaaggttgaaaacttggttatattgttgcattcatcatggaaatgtgataaggcgcctgtgaacctgactgagactgagcagaaggatatttacctggtaggattcgtgcagcttcttacggggtacgccttcttta

SEQ ID NO: 93407 - DNA, 140 bp, Zea mays
  Clone ID: MRT4577_185174C.1
ctcaggcagatcctgatctctaagagatccctagacctcaccacgaccccagctctgtctctgcccttactccactaagagagtagctctgcagaagtcttggtaaactatgtttgtacctctttcttcactctgtgtgg

SEQ ID NO: 93408 - DNA, 372 bp, Zea mays
  unsure (1)..(372): unsure at all n locations
  Clone ID: MRT4577_185175C.1
gcgagcaaacctagtccgagaaccccacncccgtcacacctttattgccgtcgccgccgccgtcaccgccggagagcttttatctgcatctacatccgggcctccccctccgtgctctcgttcccaacggccgccgcgttcccagcatcctccaccgccgacaccggggcccccgcctgcttcgctctcggctacctcctgaccttcacccacctcccacgccacgccgccggcccatgttcaggaggtaccttctatgactattccgaggatcactcgtaagaacattatgacgaacactccagccgcactctcacgtgtaatcaatcctaacgacataaaaggcccctactcccgttgctctactgcgca

SEQ ID NO: 93409 - DNA, 227 bp, Zea mays
  Clone ID: MRT4577_185176C.1
cagagttgtatcggtgtataggatgatggtagttgtgagtcagtagtctggagtctagacatccgagatcctctataatctgtccctggaaaccaactcgtgccaagtaacttgtacggagcgttatgtgcagctcgagtagatgattcgattgtaccgaatttcctgacgtgtagcttccagtagacaacaagagcatatacatattattcattaaggtccggcaa

SEQ ID NO: 93410 - DNA, 167 bp, Zea mays
  Clone ID: MRT4577_185177C.1
gtggactcgaagaaagcgatgcaccgcgacgtgaaggcggagaacatgctgctggaccgggagggggcggtcaacatcgccgacttccgccttgccagcgtctaggcgcacacctgctagatgactgcgctcacgggcacgctgggcctacatggtgccgaaggtgc

SEQ ID NO: 93411 - DNA, 1014 bp, Zea mays
  Clone ID: MRT4577_185178C.1
gtaacctatgtcctatgaatgaatatatcatcggggatggaacgaggagaggacattattgaggagaagcaaggtatgtacgcatgcgttttatctgcaaagcttcaattaccaccatgtctcagccatgtgagctgacctctgcattgcgttgcgatcgagatttgttcgtaacgaataattaatgacagtgatgatctctcgtacgtagctggtggagctgctacgagtgatgagagatcgtcatcccaaaaggtcgccgatggaaagggcgccgagccaccggcggccggagtctcgaaccgcctaaagcctagcgacgacgcagagaagcttgttgcgttcatggaagagaactacggcagcgtcggggtggggatgcaatccttggaggtgttctaccagctcattgtccagctcacctgcgaagctagcgctagggggggattgcatcgatcgtccgcatgcgcgatcggtgttcttcttccacccgtctcctcgagcatttaacattctgtttcctatgcatgcaggttgttcggaatggaacgtggtcactagcagtccctgtccgatagtgcataagcctgaattaaaggcatacaacaagcaccacaggtcggacggcaaggtgacgaaggaggagttcgaggcgatgagcagggaggtggtgaaggcgggcagcttcagggtggggaaggcgagcctggagcttggcgcgctgctgttcggcgccccggcgtgcgcgctgctggccaagaggatcctgccgggcctgggctggctgtccgacgacgtcgtcgtgcccctcgccacctccggctccgtcgcctacctcatcaagtccaagaggctgtgagcctacctgtgactgtctctgtggaccaagagagggttctgatgtgtattatgagattaatttgcacacgtacgtgcagtggataggactcgatctgcagctgaaacaagcaaagaattatatatataagcatggaatatgtatgatatgtgtta

SEQ ID NO: 93412 - DNA, 390 bp, Zea mays
  Clone ID: MRT4577_185179C.1
agtacattcctgatcatggcactagtgtgcatctccaaattcaacactagtgccaagatcacgaatgtacagagagaaaagggtagaaagtgcatcttgcattttgtcttgattttcatccaatgccgcagccagagcctcagcagatgcagcacgaacattgtaatttttatgggaaagtgcattgaaaataccagagtaatcagtgatggcatcaaaaccaaagcggtcccataattcctctgctaattcagcaaccaccttctccggatcatgagcggcaatccagaggcttgttgacacctgcaaatctcgttgcacagagtgcacaggaacacattttatagcagttaagcaggcaagcctaacatgcagttcttttgcatatac

SEQ ID NO: 93413 - DNA, 379 bp, Zea mays
  Clone ID: MRT4577_18517C.1
attcggctcgagcgacatggcgcgcttcttatccgagccggccgcgctttactgaagccaggctggcaccgtggtagccgagcaccttcactgattacgagctacggacagcatgtaccggagcatcttcgaaacgatccacaactcatgctcgagcgcccgaaaggacggccttcactcgctccctgtgcacaacctgacaatgctgattgtgtacacccgctagaacgaccactacgccttgaacgtcgacacgttgcaggagctcaaagagacggttgcccgccaggacaactcgatcgtgctggacgacacgttgaattctttggagggccaggccatgaactcgctcagggaggctggcaaggacttggatacc

SEQ ID NO: 93414 - DNA, 358 bp, Zea mays
  Clone ID: MRT4577_185180C.1
ggcgcggacgcgtgggcacagcaatccacacaagctcgtttacgtcacacgggcgctgcgcacagacacagggagcgtcggcaccaagggctggctaccaggaggtggactactgctcggaggaggggaggtcggtggccccggccggcttctgccgccacggcggcggcgtccaacagcacgtcgtcaatgagaagttcgaggaggtcgacacgggcttacgctgccggtgccaaccaccaccaccaccatggttaccacggcgggcacagctttatggtgcgcgagaccagtgtcgaagaggacatcaacaccttgcccggggaagttcacgagcgcaaggagagcttccttggca

SEQ ID NO: 93415 - DNA, 257 bp, Zea mays
  Clone ID: MRT4577_185181C.1
ccgacgcattcgttcattccaaatgattgacaatagatgcatcgggaatctactgagggggcttgtacagattgctgccgcgattaacgtcatgcacccgtggcccatgatcctgtgcggccaccatgccgtgctcccgatcactccttgccacggacactgatggctcaaattacgctcagtcaccataaggatgataccttactccttttactgtccctgtcatttcctccactgttgagacccggcaagggcaa

SEQ ID NO: 93416 - DNA, 479 bp, Zea mays
  Clone ID: MRT4577_185182C.1
aacggaaaaaagcattttttgcttttgaacgatttattacccatggaacatgggccaatgacgtagggggccgggggcgttttttaaaatttttgcaaaacccgaccccgtaggtttgaccagggcccaccgctttattttgcaatcaatcaaaataaaaagggcgcctccgggaacggggggccttgaaattctttgaccttgaccaaaaattcgggggggaaaacggggccccaccatttgttgacgttcttgcccaactcaatgaggcgcgcgaaccggggttcggcggcaaggcggtcggctttggccagggggaacaggtcggcaagcgtaaacttgcccccggccagaaaggcctcctcgccaaggcgctgtttgaaaatgtccagaattttgcccagttgcctggggtttttttaaaacagttgaagaatttcctccactttttgccggggcgccgggttaatcgcccccgt

SEQ ID NO: 93417 - DNA, 2227 bp, Zea mays
  Clone ID: MRT4577_185183C.1
gaacattatccttggaaagaagaattagaatgcttagtccgtgatgggcttccaatggccctgagaggagagctcgtggcaagcttttattggtattggagctcgtcgggtcgaagggtactatgagggcctccttgcagcggacagtgaaagtcaagaaaacaaatattcgggatctccaacttcggaatgtggtccgggaaaaccaaaaccatctcaaacattttcttctgaaaaatggaaagggcaaatagagaaggatttgcctagaacatttccaggacaccctgcactagatgaggatggcagaaatgccttaaggcgcttgctcacagcttatgctcgacacaatccaccagttggttactgccaggcaatgaacttctttgctggcttgctacttctgctgatgccaggagagaatgcattttgggcattgacaggcattatggatgactattttgatggttacttctctgaagaaatgatcgaatctcaggtggatcagcttgttttagaggagttagtcagagggagattcccaaagttagtaaatcatcttgattaccttggtgtacaagttgcatgggtcactggtccatggttcctatctatttttatgaacatgcttccctgggaaagtgtgcttcgtgtgtgggatgttcttctctttgagggaaaccgtgtgatgctgttccggacagctcttgcactgatggagttgtatggtcctgcacttgtgacaacaaaagatgctggggatgcagtaacccttttgcagtctttagctggttccacttttgacagtagccagcttgttttaacagcttgcatgggatatcaagctgtaggtgaagcaagactgcaagaattgagaaataaacaccgaccatctgttatctcctcaatggaacagagagcaaaaggtcttcgtgtctggagggatacgaacaggcttgcatctaggctatataattttaagcgtgacactgaaccattggtgtcgttatcagaagaacagtcaaatgacttgacagatggcgataagaaccaagaagccaattgtagtaatgtggatgatatgtatcatggcctcactgtcaactctgagattgattctctgcctgaccctaaagaccaggtagtctggctgaagggtgagctgtgccaactgctagaggagagaagatccgctgttctgagggctgatgaattagagacagcacttatggagatggttaagcaagataacagacgcgaattaagtgcaaaggtcgagcaattggaacaagagttatctgagcttaggcaagctctatcagacaagcaggaacaggaacaagcaatgcttcaggttctgatgcgtgtagagcaagaacagaaagtcacagaggacgcccgtatctttgcagagcaagatgctgctgctcagaaatatgctgcacatatacttcaggagaagtacgagggagctatggcttcacttgctcaaatggagaacagagcagttatggcagaaactatgttagaggcaaccattcagtacctaatctagtcagcagaaagcacagcttccatcgccctctccttctccaaggaccccaactcgagatgcatcaccaggccaagggaaccaagattcatcgcaggagttccagcctagaagaataagcttgcttgccccattttcttccctcggatggcgagacaagaacaagggcaagcagaacggctctgatgagtcaacaaacggtaagctcaataatagcaccgatcaaggggttgaaacacccaaaaaggacgacgaaaagaaggccgactcgccaaaagagagtgaacagattgtccgaacaccggaaagagacaatgaactgagactagggacacccaagatggatagtgaggtaccaagtgtggaaatggcggcaaacagtacgaatgggctggaggaccagttggaggagataaaattggattgatatcctttggctggtcgctaagccgcaacataaggtgccattaaattatgtattggtgtatccatcttccacctctattcttttaggtttatagattcttgtataacttgaggagagagaatgaataaactatgtttgccctcttataggtctgttgatcgcctgtaagctatcataagtacacatgaaaaagacgtaccaaatagaagattaccacgaaagcaatttttggaacaaaaaaaaacaaa

SEQ ID NO: 93418 - DNA, 405 bp, Zea mays
  Clone ID: MRT4577_185184C.1
atgccatgcttacatgaactggctgcccggcagtcggcagtgatgacagctcacaacaccaaccttccccgtcttcattatctaagcaaaagggatctaggggggcacgccttcggatcttgtgccctcgcgtttcgacgcgatggtttaggccgttcgtttagctatcggttggcagtcggctgccatcgtcgtcttgcggagggagaaatatctaggtctgatcttagttggttgtacctggcaacggtctcgctggagccattgtttgaaattcaaggagttgttttctatggtggaaactttggttctggccttaacttattggctcatacaacagcggtgcgtgagcgtatcgtattctctttggagatgttgttgttggagagccttcacgggatctaa

SEQ ID NO: 93419 - DNA, 465 bp, Zea mays
  unsure (1)..(465): unsure at all n locations
  Clone ID: MRT4577_185185C.1
gccgccagtgtgctggttctcgcccttaagcagnggnaacaacgcagagnacgcggggccaaanctttggtctgttgnaaagnaaggggagggatncctgcccctgcgcctgctnaaaanactnanangaacatatcagtctttcttgttttaaaaaaaaaaaaaaaaaaaaaaaaaaaaaaaaaacaaaaaaaaaaataaaaaaaaaaaaaaaaaaaaaaaaaaaaaagggcccctgcgttgttaccactgcttaagggggggggggggagatatgcatcacactgggggcggctcgattttttttttaaagggcccaanncacccggggggggggagnagaacaacnaacgggccccggggggacaacgngnncacngggaaaacccggggggcacccaacgcaaccggccggcagcaaacccccccccggcgcagaccacggaagagaaaaaaggcgggggc

SEQ ID NO: 93420 - DNA, 229 bp, Zea mays
  Clone ID: MRT4577_185186C.1
actaggcgttgggttgtgccttttacttgtaccagctccggcactcaacacaggggaggcttatgtactgagagagagagagaaagatgtcagttgtagctcatcatctacacaaccagtctggtattctggcgtgggtaccgaacgatgtgttaaagatcttctgactgtctgacgagaactactgcctgtgcgttcgagacagtgccttagcgctggacgcagtcaa

SEQ ID NO: 93421 - DNA, 2353 bp, Zea mays
  Clone ID: MRT4577_185187C.1
tggtacctccattgggacctcgaggccggccggggccgcacattttccttctccgggcactgtacacttctgactgcggctgatcaggcccaggggggctcccacttcttcctcctcgacagtcctcactcctcagtcctcactcctctgtcctcacacaccgctccagcgtccaagccatccgtgcgaaatctgctcgcagtcgcagtagtcaccactgttctcctaatctcctgggatggcgccgtgctgcctgatccagatcggctggtgtctcgagcgcccccgtggctttcgcctcgccgcggcgctgtgcgcggctgtggtcgcgctggcgctggcgcccgccttggatgccacgtcggcgtcgcttctgggcatcaactacggccgcgtcgggaacaacctcccgccgcctcagtccgtcatgccgctgctcgagggcctcggtattggccgcgtgcggatgtacgacgccgaccccaccgtgctgcgcgcgttcgcccggaccggggtcgagctcatcgtcggcgtgcccgacgagtgcctggccgccgtggccgacccgggcggcgcggcgcagtggctcaaggagaacgtcgcgcccttcctgccgaacacgaagatctccgtgctcgccgtcggcaacgaggtgctcaccggcgcgaacagctccacgctgtcgcgcaccctcctcccggcgatgcagtccctgcacggcgcggtggccgcgctcggcctcgacaagcagatcaccgtcacctcggcgcacaacctcggcgtgctcgggacgtcgtacccgccctcggcgggggccttccgcaaggacctgctcccgtatctctgccccatcctggactaccatgccaggaccggctcgccgttcctcgtgaacgcgtatccctacttcgcctactccagcgaccccaggggcgtgcagcttgactacgcgctgctcgacccgggcttcgccggcgtgcaggaccccaactccaggctgcactaccccaacctcctcgtggcgcaggtggacgcggtgtaccacgccatcgcggcggccaataccgcggcgtcgcgggtggtggaggtgcgggtctcggagaccggctggccctccgcgggggccgccaacgagacggccgcgacgccgcagaacgcggcgcgctacaacagcaacgcgatgcgcctggtggcggaggacaagggcacgccgctcaagcccggggcgccgctccgcgcctacgtgttcgcgctcttcaacgagaacctcaagcccgggttggcgtctgagcgctactacggcctcttcaagcccgacggcacgccggcgtacgagctctccttcaagctaccgcgcgacaactccacgtttggtcacggcgataccggcaagggcggtggcggaatcggcggtaacggcaatggcaatggcagcagctggaacaatagcggcggcggaaacagcggctactatgacatctcggcttcagcacgtgacactacgatggatccgaagaatcgcaaccctaactgggaccggtgggggccgaaggatgctccgcagggttcccagtcgtggggtaaaaatcggagtctcagctggcggttgaagactggatcaggaaagcctgatggcaaggatgacatccctatctctactcccggcgatggcggccagccaggtatcctcaaaacccctcaccctaccattctgaaagttgagaatgaattggtgcatagggttttctgccaaaaatatggtatgaatggccatcatgctagggagtgctttaaatctttgtggtgtgagatatgtcgcaaggaaacgcaaaacaccgctcggtgtgttctccccaaacagaacaaacctagcatgcctattgttgggatggcgccagatgggctagggttttactcttctcattttgccaaaccgttatccaacaaaccaaatcgcagttttattggtttggttaaaatcgttgagggtttgatctcggccgaggatcttgagaaggatttcggttttcatttcccctggggacgtacttggaaagctaccaagtgtcattctggtttcctcatgcaatttccctctcaagagaggttggatgagatgattaatttcccagaaatgaaaatgaagttgtcgggtgccaaaatctatgtttcttcttggagttcccaggctaagcccaagtccaaaatgcattcggtgtggattgtggctgagaatgtgccggaagaacttcaaaattatcaggctatttgtgtcgatgttttgggtccgaccgcacacccggggttacccctcaaggtgtttctaggagtaggacggtgtcaacgactgtag

SEQ ID NO: 93422 - DNA, 203 bp, Zea mays
  Clone ID: MRT4577_185188C.1
cgcgcgcgccctacctactttatcttcatgctattcacccacacaccgattcctatcctaagcgcatttctcactaccaagtgggatccttcctcacaccacctcttcactttcttccgaccgcctctacccaacccagacatcctgacttcagtaccttctaaccagcctcacgcagttaccatcactctctactatagctc

SEQ ID NO: 93423 - DNA, 369 bp, Zea mays
  Clone ID: MRT4577_185189C.1
atcgacggaaccgtgggcagagtcgtcggccgcaccggcggctggctgcacagccggtcggcgttctccatgaacttcacgcggcgcatccgggggtccgcgaagaaccccctgataaccaggaagctggagaggaatggtaggatgacctgcatgacgtttccccgggactggctgccgagggacctgagcgtcatgtggttcgggctcagctgctggatcgggccgtccatcgtctcggtcatcaacgacgacaggctcacagggctcatcgtcacgaacatcggacacgagctggcccacctcaccacaccgtcgacagtgatatcccagttctggctgtgggcaatgaccttgcacctgggcctg

SEQ ID NO: 93424 - DNA, 288 bp, Zea mays
  Clone ID: MRT4577_18518C.1
gcccgcccccccccccccccccccccccccccccccccccccccccccccccccccccccccccccccccccccccctcccttctttttttttttgccaaaattcaaatttttaggcggcaccaacctagtcacctttgtaaggaacctggaccttttatgttgaaccccaaaattaccaatgttgtcggggaaactgattttacataaacaaacctcccccgttggtttggcttcaaggcataacccatcccgctcccaaaaataatttcacctaaaaaccgccccc

SEQ ID NO: 93425 - DNA, 404 bp, Zea mays
  Clone ID: MRT4577_185190C.1
ggctcgtatactgcggacggcctttccttttttttttttttttttttttttttttttagcagggagatactgtgtgtgtattaaatggaaaaacgaaactgcagatttggggatgatggtgcataaaggatttttctaaggaaccaaccctggcaggcaaattgtccacctgccctgaaaaagaagaccggtgtccgtcctacgtacgaggaccatggccgttaacgggaacaacaggccaccggtcctcatggatccagcggattatgagcactgcaaaaatagaaacggaatccatgcactctgcaagccaggtcaacggaaacacgggggtgctttgtgtattctccaaaaagaagaagcacagccgcttacgggcagcattgtgtgcctgccaggcaaat

SEQ ID NO: 93426 - DNA, 238 bp, Zea mays
  Clone ID: MRT4577_185191C.1
aaaaaaaaatttttttttttttttttttttttttttgaaaacagagatttttgtttgtttgttaaacaccttttgggtttttatactcccggttttgggaatactgcttttttttttcaaaactttggaaaggggggggggcgaaacaccccctaaggttccaaacaggggctaacaaatttagaaagacagaggggccccgggaaaattttattattttgcttgggggtggaacata

SEQ ID NO: 93427 - DNA, 318 bp, Zea mays
  Clone ID: MRT4577_185192C.1
tagctgttggctgttgccggttcgcagtttcgcacgtactcgcgacttcgcaagccatcggcttcccgcctctcttcctttcaaaaaagaaagaaacagctaaaggctcaagcaacacggtggtgcctgtcgggattgacgaagctagcagcggaggtggcgatggacggggagtgctcaccgatggcagcaacgacgcggagcgggacgggcagaagccacagcgaggcggagcggaagcggcggcagcgcatcaacgcccacctcgccacgctccgcaccctcctccctgcggcgtcgcggatggacaaggcggcg

SEQ ID NO: 93428 - DNA, 996 bp, Zea mays
  Clone ID: MRT4577_185193C.1
cccggggtcgatccagcccacatctactccctccgaccctcgtcgcctccgcgctctccagcgatgacttcccgcgcctccatacctcgcaccagctcttttctctggccacttctcgcttgaaccgcctccgccgccccgacctcgccgcctcgctcctcgacctcctccttgcctccgccccgccctccccggggctccttgcgcgggcgctctccctctacccgggacccgacgatgcgctccgggccttctcctcgtctgcccccgccacccgctcccctcctccgcaccttctccgcgctacccggatacagtggttctccaagaaaggcgagacagccaagggggaggagctgcttgatgtgatggaatcaaaggaggtagccccgaattaccttacctacaatgctatcatgcaggggtattgcaaggaggggaatgtcggcgcagcgatgcgtgtgttcaagaagatgaaggtgatgaagaggcgggaggggagaagtgacttgggtgtgtctgctcattcgcagatatatgtggtgctgtttaggagtttggtggagaaacagaagtttggtgatgcgctgtggatttttaagagctgctttgcaatgaaggcagcaccaccatttgaggctgttaaaggtttggtagagggtttggtgaaggcaggcaggtcagcagaggccaaggatgttgttgccaagatggcctttcttgtgaaaggcgatgctaaacttgcttgggagaaggttgttggcgaatttttttttcaaagagggaacaacaaatttgaatccatgatttgctaggctttcatgcattttggacttggaatgatgatggcaaagaagataggctttcaacatgggatccaaagttgccttcttgttgtcactggagtgtttttgcaaggtccgtggttagatcaggatgtaatggatgctccctttactgtaagaacttgctgaattttgtcttttaataattttg

SEQ ID NO: 93429 - DNA, 317 bp, Zea mays
  Clone ID: MRT4577_185194C.1
gaccacgcggtcaggcccaactcaaattttacatcaaggccattcgccggaaatgggttcggacctgacttacggcggcggaaccttgccgcaaggttcggcttcaaacggtggggaatactcccggaattcttcaaagccgctctcgtgtctcgcccgcgccgcgcgatacgccgccgccgaacagcgccctgtcttcgctctcgcgggtatgctcttcggtggcgctatcttcattttctcttcgccctccactttatcgccgtcagaccccgccgcgtcggtcggcttcaaccatcttgccatcagggggcact

SEQ ID NO: 93430 - DNA, 266 bp, Zea mays
  Clone ID: MRT4577_185195C.1
gcaggtcattaagaatgaagatcttgaagagctgcgagaactaggttctggtacctttgggactgtgtatcatgggaagtggagaggaacagatgttgctattaaaagaataaagaagagctgcttcactggtcgatcatctgagcaagagagactgactgtagagttctggcgggaagctgacattctttccaagcgtcatcatccagatgtggttgcgatctatggtgtggaacagcatgggccatggaggacaatggccactg

SEQ ID NO: 93431 - DNA, 681 bp, Zea mays
  Clone ID: MRT4577_185196C.1
cgggtgtttacaccgttttgtacttttgtgggatgtacttaccattaccattgttgctcggttcggctcagtttggcagagagaataactactctagttcgctaaaaaaaaaaaaaaaaaaaaaaaaaaaaaaaaaaaaaaaaaaaaaaaaaaaaaaaaaaaaaaaaaaaaaaaaaaaaaaaaaaaaaaaaaaaaaaaaaaaaaaaaaaaaaaaaaaaaaaaaaaaataccccccgggggggggaagccccccttggggggggagtttcccccggggaaaaaaccccccccggatttgggtggccccaaggggtttatttttcccaaccaaaaaacccccaaaaaaggggaaatttggggttttggggggccccccccccggggggggcggcccccccaaaaaaaaggggtttaaggtttccccccccttgggaggggccttttttttaaaccctttttttgggaaagggcctaaggggaaaatggggttttggtgaaaaatttttttttgggggttttcccgggcccccgggggtccccccaaaaacccttttaaaaagggggacccccaccccccctttgggtccccccccccaaggcttcggggggggggaggcccactggtggggggggggcccccaaaaagattttccccccggtttgggggggggttctcttttt

SEQ ID NO: 93432 - DNA, 429 bp, Zea mays
  Clone ID: MRT4577_185197C.1
aaaacaataacactataataacaaatgggagctttaacaatcaaataaaccttgggacaaccttttgtaaagcaaacccttttgagttcaattcatgcaggactactatagtttaggacataaccctactacaccaaaagtacccaacatgggcatctaatttacacagacgcctagcccttgtatctcttaaaaccataagagaaattgaggaatgtcggattagaagacaccaaacctgttatctgcgaataccgcaaacgcataatccttcatggtctcaccatcaaaaaattggcggtactgcatattgctaccgagaaacttggatgtaccctgaacaccctttatgtacaaaggcaatttatgtggctcgaacacaaacctgaaaaacatcctgaatttatcgttggaagacacatatgattt

SEQ ID NO: 93433 - DNA, 285 bp, Zea mays
  Clone ID: MRT4577_185198C.1
cccaggtcaaatccctcccggaatccgtccaaaggctcgcgtaccttgacacgctggacgtcaggcaaaccagagtacagaggctgccacagggtgtcggcaaggccaggaagctacgccacatcttggcagacgcttgttgtcccgatggcagccagcagtcagaatttcgaagcttcactgcgttggagcccccaaaagcgctgacgagttttggagagctgcaaaccctcgagactgtgcaggctaacaaggacatggcgatgaagctagcgaggatgatgc

SEQ ID NO: 93434 - DNA, 250 bp, Zea mays
  Clone ID: MRT4577_18519C.1
gttgcattttccttgagagcgagtgcctgtagcgctcacaaccaaagaccgatggagcccactggctacatgaaacccggggcaatcaaccccgtggaggaggtgcccgccgaccagaagactacctgcggaaggaagcccacggcggagaaccagtttccgcgtggctagtccaccggtaaggcaggcggttagggtacacgtggccagcaaaatggcaagaagagcgtggatacgtacaagatctaca

SEQ ID NO: 93435 - DNA, 156 bp, Zea mays
  Clone ID: MRT4577_1851C.1
gaggacgcgggtctggagaggcgcctcaggacggaccggcccaagttctggaaggacgcctggagggtgagagccccgccggccgaccctgcgaccacgaggcgccgcacgagcgggtgttgggaatgcgccgggggggcggaaactccgccaggc

SEQ ID NO: 93436 - DNA, 326 bp, Zea mays
  Clone ID: MRT4577_185200C.1
ccccaccttcttcgttgcctctcttcctccctctcctctcttccttcctctcgatcgatcgtcatagcaatccaagctagcaagcccgtccgtcgtctctcgtccaagaagcatacaactactaatggggaggtcaccgtgctgcgaccaggacgcgggcgtcaagaaaggcccgtggacgccggaggaggacaagctgctggtggactacatcaacggcaacggccacgggagctggcgccgcctgcccaagcacgccggcctcaaccgctgcggcaagagctgccgcctccgctggaccaactacctccgcccggacatcaagc

SEQ ID NO: 93437 - DNA, 664 bp, Zea mays
  Clone ID: MRT4577_185201C.1
cggtcgcgtgggccgctccccgtccttcgtcccctcgcctgtcgcctcagcctccacgcgacgcgaccacggctcgcctccaaaattcaaatcctcgccgctagacgcgcccactgccatccagcctctggggtctggctcactgcccggccgtcaggccacctggcactggccacgcccagtcggtgcggaagaggaggccgcggacctggccgagctcccttgtgaggtggtcccggggcgcgcgggcctcacggtggcccatggacgccgggcggaagtcacgccgagcggaagtcacgccgagccatccatgcctaccctggcttcttccctgcctacgcggaagttggagctgagtcttgagtgcccatgaagctcatatcgacatgttggccttgttgggtagcaggttggagcaggttactccgttactgccgatgtgcattcacagtatgaaaatgagatccaggaattgatggatgtgatttctgttgaataagaggagaaaaatgacattcacaggaagcttcagaatgtggaaaatgagtgtaaatgcaagctggattgatgagttgaaaaggaagacgagtttcttcaaacagaaaacgtcatgaaccaattctaataggaaaacagaacaagatttgtatcctcaacatgc

SEQ ID NO: 93438 - DNA, 223 bp, Zea mays
  Clone ID: MRT4577_185202C.1
acgcgtccgatcgacgtgcagacataccttaacaagcttaatatggtaccacgcatctattgaaaactgcgaaacttttaatccccaaccggggacttacatataattgaatattcagtaaagcattgcagtatggtgtatacagcgcaaattgtctgaatgaccccaccacaatgtaccccacctttattacaaataacatctaatcacacactaacataac

SEQ ID NO: 93439 - DNA, 193 bp, Zea mays
  Clone ID: MRT4577_185203C.1
tccaagatgtgagactcccagacctctttggtaccgactgaatctccttcgactctcctgtaacgcgttctggtgagagaaagagagatcgacgctcctcgtctctctgattcgcggtggtggtcgaccgcccgaggggagccagatctcgatgcagagccgcgagatctgccgacggatctatccgacaaga

SEQ ID NO: 93440 - DNA, 342 bp, Zea mays
  Clone ID: MRT4577_185204C.1
gtctagagtagtatagcgtagtgtagtagtagtagtagtagtagtagtagtagtaggggagtatcaactcataatgagttgatttgtaagtattgttacttcccttaatgaaaaatgactatctcctcctgcgccaattatttttgcttcatagtaaattgaactcttgttttgtgaagttgattcattcggaatagtatctaaataactcgggcatcatattgatgcttttagaaatagccaccgagtaacttgtagagtgtgtcggcgctttagaggtaacgccgagcaactgaagactgtatcagtgttttagaagcaacgccgggtgattgggaagcg

SEQ ID NO: 93441 - DNA, 789 bp, Zea mays
  unsure (1)..(789): unsure at all n locations
  Clone ID: MRT4577_185205C.1
acaaaaatgaatgtcacatctttactatataataggagttctctacaaaatagctaaataattacatcatatgaagacaacgatcctccgcaaccatagttgactgggagatgatgacctagacctctcacgaactcatcgcgacatccttcctgctccccatattgcagtacctgttcttgacttggggggatgtgagtacatcaagggtgagctcacatatgtttatcgctcaacaagttttggggaataatgtgcatgagctcacttacgatgggggttcaggtgaattgtaaggcttaccaaagaagatgattaaagctgaatattgcttttagagttggtcaaattttattagcagttactaagtataagtagataccaacccatttaaataaaagatcataattaataataaaacccacaatgcaatgcaaatgacagattaagtttagttccataagttactcatgtgagggtccgagctgctcatgatcgttagcacggttgatatatcagttttatactctgctgaggttgcatatctttacccacaagactttcctgtttagccagggttagctagacccttggacacttctaaggtgaatggctagggatccactgcgaggcctttacaaagttccactagaggagagaacccgctacggattctgcgccgaaggtgatgtaggaattcctttttcnggaaagctaaaaatatagtccaacccgaggacctctctacacctgcactcctccaccccacttgcccttttgggaaaggat

SEQ ID NO: 93442 - DNA, 133 bp, Zea mays
  Clone ID: MRT4577_185206C.1
agggggtacttttacaaaagctacctcagagcacagagaaggagttcacgccccccggcgcgacaagttaatgtgcttacacagggacagcacagttaagaatgcgggtcgcagattcacaaggtattgactg

SEQ ID NO: 93443 - DNA, 277 bp, Zea mays
  Clone ID: MRT4577_185207C.1
ctgttttctatcctactgactctaactatcctcgcggtggggtgctttgcaaagaacaccaggatcttctcagcagatcttctgttttttttggtaaggaagaagctgcctggaagatggaagaaattctgctctctccgccttgttcgaaactaacttttctatgccgactctttgttgcatatctggcatataccatagttcatatcccgcggatatgtccaggcttttatggtcatctagcgcttctgcattggatctagtgcccttaggcagg

SEQ ID NO: 93444 - DNA, 106 bp, Zea mays
  Clone ID: MRT4577_185208C.1
cccacgcgtccggttccttctgccaagcacaacacagaccatcgtctgcacgcccaactgcacccgcagttgtcgggtggcaaaaccgaaccaaaacctagattcg

SEQ ID NO: 93445 - DNA, 196 bp, Zea mays
  Clone ID: MRT4577_185209C.1
atatcctggttaaatttttttttttatgttcatattttttttttaccacaacactaagggtgggggaccttagcttacccaccgagaagggcacgttaactgcccgtctaattggggaaacaaagggccctgccccttggtgttaacctcgggttttctgggggggctgcaaggcttcttttaaacaaggttttgg

SEQ ID NO: 93446 - DNA, 588 bp, Zea mays
  unsure (1)..(588): unsure at all n locations
  Clone ID: MRT4577_18520C.1
cgtacgttattcttggnnatcctctagaagcggcccgccctgtggggtggggggggttttttttttttttttttggtgtttttttttttttttttttttttaaaaaacaacgcacactcaaatcatacatttatttgatactaaccggtccacaaataagtttacatacccaaataaagctataatttattggggggggggggggggcggnactgcaaaccacgcttgcttgaccacacatgcaacttttagctagggacgtcgatcactgaccaccattcaactccatcgatcaatgcttggccggggggggggagataggagtcggtgatccatagggcggggtaggggggggggactcaggctcagggtggggtttgagctctggcttgggctccggcttaggcttcgggggcacaggcttcttgggaaagggggaaaaaaaggggggggaggcatgggctttggggaagggatcaaggaagggcttcttggcaaatgccacttttttcttggctgggggatggttgataggagttggagacccgtatgggggcatggggggcttgtcctctggcttagggtggg

SEQ ID NO: 93447 - DNA, 589 bp, Zea mays
  Clone ID: MRT4577_185210C.1
ccctttctcgagttttttttttttttttttgagttacaaaccaaatagcattagcataaaaagaaacagatcaagttcaacaacacaagttcaaccacactttagctatttgttgccactgaaattgaaattcactgccacactttagctaaatgcccccaaaatcagtagaatggcagacaatgcctagcttgtggcttcctgcaacacacacagtagaattgtatggttattaaagcggtaaaacgttaaaacgttatgaaccaacttttcaacgtttaaacgaacgttgaaacatcttttcagacttgaaattcactgtcacgctttagcctgcaacacacagtagagtggtattatacatttatactgttggctgttgcagccacgctgagcagcggcggctggagcactgcgcactggctggtggctgcttcactgcgcactggctggagcactgcgcagtgcgcactggctggtggctggcggctcgctggagcagtgcgcactgtgttttggatacgaacagcagcagaatacgaacagcggctgccgacctgggtggaatacgaacagcggctgccgacct

SEQ ID NO: 93448 - DNA, 1277 bp, Zea mays
  Clone ID: MRT4577_185211C.1
ggcgtctccaaagggtcttcaaacaacaagtcggcgcagtcgggttgtcaggtgattgacaatgacgactacgatttgctgtgtcgaagtggtgttctggtggaacaagagtacacggtgtcatcttgggatggccacacggtgcttttgggtgactcgcacgtggttacttttagtgcgggtcaggcgctctggttggcgacgaattcacaacaagttgtctgcctccacggcgagctattctttatagaaaaaccagaattactcacgattgccaactccacatctaacatggcaaagggtatttctagtgattcttccttaaagttgcctccgattaaggacttcctcacagttgccgtgagtcctattggagacctcaaagttgctgcgaaaactttgatgggctcgaagaacctatcgaaggagtcaaaggcatactacgaggccttaaagaaagaacgtgctgccgaggatgctcgctcgacacttgaccttgagttccagaagttcgctttcgcgctgggcaatttctttcaacggatcaaaccatcaaagggtggcgaaagctggccagattggacgttaagaaatgcccgagccggaaacttcaagaagctcgaaaacaaactggattcgatcttcaaggtagagcaggcgaggattgaagggataacgcatctccagaagatctctggagaagcgtttgaccgggctcataaggcggaaactgaagtgatagaacttcgtcatgatttagctgtagctcgaaagaggctcaaggcttatgatgacagttacgcctcccgtgatcattacaattacgggaatctcccaccgggagatcaatggtagtattcccacctgaatacaaattacattcgttatttcatttgtaatattttcatttgtgcttttgcataagaggacacttcaggcaaatcttgtccctcgcaaaacccttacaggctgattcctgtgaaggttttggagagaaccctgggtttccttgggggatctcggaagatccttatgaagacccttatgcagtttataaagttcccttttggttcaatttaaatactttaaaacaaatatgagacaattcgtacgctaggtttggaagcccgtgagtacttattgtgggacgcaactaagggagtcccaggctatcactactataaggtttactatgacggttgctggtcataggttttcccttttgatatatagtctcttgtgcggtggaccgaacccccccgcacgcacacaaaaat

SEQ ID NO: 93449 - DNA, 232 bp, Zea mays
  Clone ID: MRT4577_185212C.1
tgcccatcgcgtctgagaaagggttgctcccataggaggccattcagaatattcctctactggtgttgagctgctatctacaagtggccgtacccttctagagacgtgtagtaagtattgcgctcgcagaatctacgggcctagaccagtagcatgatctatcaactggttcatcaaccagatcgaaatggttctggaagccatcggaggacatgcctttcgtgatgatggt

SEQ ID NO: 93450 - DNA, 422 bp, Zea mays
  Clone ID: MRT4577_185213C.1
ggtgcaccaaaaaaatgcattgcatgggaggccattccagcccgaggggtatgtacaaagtacacatgttgcacattataccgataaaaacacagacgcggcttggcctatgatctacatccgaacgtaccggaccaccgcaccacacaacctagaaaccgaaaaagaaccctccacctcacccagaccgccaaaccgaacatttcaatcatcagacggaggataggcttggccaaatgagacacactggtgatgcagatcgagaactgggctatgcgcgccctcgggaccggccacaaggtctcagtggctgccacgctacacgatccgcccgtactgcacgagcgccaagcggggcacccctcagatcgtctacagccggcgcgccaccaagactgaggaccccccattcattaagcggt

SEQ ID NO: 93451 - DNA, 593 bp, Zea mays
  Clone ID: MRT4577_185214C.1
tcgaagccggccgggccgggacactctgcctgtctaggggtgttgattttatgacgccgacgctgctcatgctacatccctcgagaagacgtctgctcctcgacgatcgatacgatggtcgtcttctccgacctccacaccgacgacggtctcaagtccctcgaggatcacctcatcggaaaaacctatgagtctggcgactccattactagatgatgacattaggggcttcaccgcggtgacgtcaatacctgacgctgagattcctaatgccgccggctggtacaagaccgcttctgcggatggatcctcaagattccctggcaacgctgatggtgtaaatcagcctgcgaaaacagctcctgcgatggctgctcctgccaatgacgatgacgatgatgatgaccttgatttttttggggatgaaactgaagaggaccagaatgcatctgatgagcctgccgtcgctgccaaggcctcttctagaaagatggaaagtgagaaatcctccgtccttatggatgtcaaaccatgggtacgatgacactgatatgtatatgctgtatgaggctgaccacatcgatcagatggag

SEQ ID NO: 93452 - DNA, 487 bp, Zea mays
  Clone ID: MRT4577_185215C.1
ctaaaccattttacatctttaggcgggggcctcaatcataaagcaatcgggggggggggggggattacccccatgcccgggtctatgctagggggttccaacaacccatcgatttacgaggggggcgtaaaagggccctaccgggctaactccacccatcccaaattcaaccacccggcccctattgaattctacacaccattatgctccgccgccacgacggggacaggtgggggctcctcgggccccccggtggggcgcccggggaaccaccgggccgtccgccgggcgaggggcagccaccgccgatttttcttcttcgacaggcgttcccttgccggggggcgcaaccggggcaggctcacaatctccgacatggagcgcaccccggacgatattatcctggccggggaccccgacacgggggagcccctggtgcactcgccaccgaggggggcgtccaccacaacgacaggctccaacaggc

SEQ ID NO: 93453 - DNA, 441 bp, Zea mays
  Clone ID: MRT4577_185216C.1
atattagaacattatatgggcccaatatattcggaggcgttgtctgaaactgcatcattggccacacatggggagaaacgacggccaccgactcaattttttgtcgagaaataaaaagagtaacacaacgctttgctgatgctaaatgagaaaagaaaaacaaacttgctggaacaccgcttgatcacaattcacaaatttatatatgtgtgaacaaaaaaggcgaacaaaacgcgaagaccaaaaaaaaaatgaagacgcgaaaataaagatactatcaaaactcaaaccaaaacctacctaattaaattacagcgcatctccgtttattgcgcttacaaaccccacttgccaccatgatcagctactagctccatcgtatatcgtgagctacgatcgacctcgcgatggaccagatcatcacacaacctgcttactcgt

SEQ ID NO: 93454 - DNA, 433 bp, Zea mays
  unsure (1)..(433): unsure at all n locations
  Clone ID: MRT4577_185217C.1
gaccgnaggaaagcaaggccgagcaanaaacccaaaccaccngaagggnnacaacncnggacaacccgcaacgcagaccaanccggaggaaccccaaaaccaaaccacccaggaagggcccacggcagggggaagaaggagacccaggtttttttttagccagananaaaacanaaangacgcaaacccgagagaggagccngcccaaaaacccagacccangnncgacgaananggnccnnggacagacccggcganacnganaaccaagacagcnngggaanaangcgaacgcagcgcccnngaaaacncgaanngacgggaccaaccacaaaccangagcccacagggaagcgaccagacgagggggccangagggaannaacaccccnnnggccaaanaccggacacaaaggaggggcaaaccaccacc

SEQ ID NO: 93455 - DNA, 440 bp, Zea mays
  Clone ID: MRT4577_185218C.1
aggctcggatcttggaagagagtcagtcttgtactgagtttatttgagcaagctaatctaaaaatgataagtagttgccagcttgtgatacatcctagctgacatcgctgctgcctctagttgccagcttgtgatacatcctagctaacatcgctgctgctgcctctagcagcgccgactcgccatcgtcctcctccgttgacaccactgacaacgcccatggtgatgctcctctgcaggctcaggctcagggaatctctgactctgaccactcgcccaacgataaggacgcagatgcagacatggccaccttcatcgttcatcgtctgaaccggccggccgtccgaacgcagacaaggacgcatatgcagacaaggacgcagatgcagacatgactaatcggccggtcgtccgaacggacgagctcagtgagacacacg

SEQ ID NO: 93456 - DNA, 370 bp, Zea mays
  Clone ID: MRT4577_185219C.1
atcagtttcagcctctgtgattacccccatgcttcatgtggagactcaagttctgttagcaattatattttttgagctccttgagttttgaattcactcgattgttctgagccgtgggtgctagttgtccaatggttgcaattacacatacctaacaaacaaatataaatatatttagatttactactaatatgaatgcttcacaaaagataccaaaaaaatacccagactgcagaactctgtttaacaatcctaaaagggattttcatttgcataaatagtgtgtatcacttattgcaaacatatagcattttgtaagtgtaaaaacatgtgggaggaggctggagctgaaaggatgtttctactggca

SEQ ID NO: 93457 - DNA, 603 bp, Zea mays
  Clone ID: MRT4577_18521C.1
cttcagatagggaggggggtgccgctcggtgtgagactcctcgtcggcgccgaggcgcagccagcgccatccctccaagttcggctagggacgctgcggccttccttgcttgccggttcgcctgctcgggactctgtcctagccggagttgcggcgaagacgaggccagcgtctgcgcggaggagcgccaccggaccagccacgggacgacgcacggcggagatggggcgggctgctctgtccttgccggagattgttgcgagacggagacgaggcaggcggcggcgccgaggagctccagcggtcccaacatcggaccaccccaggcatttgtgctccccgacatggtcacgaacgcgagctgtcccgctcccgccggggtgcttggagatccgcgccggtgtcctagccagagctttgcttggtaatgcccagccccagaattgttccatttctatgattttttctgttctagcgatgcatacatcacaagtgaatcggctgggcagaggtgaactaggccattttgttttgaatgtgtcaactgaaaccaatagaacaagtgcttctaggagttattgattccgtagaacaactttttct

SEQ ID NO: 93458 - DNA, 289 bp, Zea mays
  unsure (1)..(289): unsure at all n locations
  Clone ID: MRT4577_185220C.1
cccacgcgtccgnccacgcgtccggccactcgtccggccacgcgttcggccacgccttcggccacgcgggcgggttaatcgggccggcggcggcggcgaaacagcacatcgctcttttgatctcagccattgccgaagtggagcaaccccaggacgcggtgaagctcttcaaccggtggaccttcgacgatgtccaagtgaacgatatcttgctgaacgactacctggctgtgactgcggcgaaacacgcgacatttctggcggacttcgcggggcgctacttcaagaa

SEQ ID NO: 93459 - DNA, 735 bp, Zea mays
  unsure (1)..(735): unsure at all n locations
  Clone ID: MRT4577_185221C.1
ctttttctccagtggtcataccggtgattgtcccatggtcctctcgctagttctctctcgaggctggctggtacatcaactcgacgtcaagaatgacttcctgtatggcatgctaagcgagacaatctactgcaaccagattacatggtttgtccgacctggtgtgctgtctcaacaaatgtgtgtacaaacttaagaaggcatctcgggcctgatacaattagttcgcttcgtattcgctctccctaggatttactgaggccaagtcctatgcatttttgttcatcttttgctagggcaccaagatggtatacttgttatatgttgataatattgtcctcacagcttctagcaccgagcttttgcaaaataccatctcggctcagtgggaatttgccatgaaggacctgagatttctccaccacttcctcaacatctcaatggaatgaaaatttagttagttcttcctacatcagtgctctatatgttggatattcttttagctctctaggatacagactacaaaccctgcatcacgcatgtggatctttaagtcaagcttgctgncaaactccggncctcctgtggcattngnagttttgccggnagnccgnnacccttgagtatctaacggtcaccaagtgcgacattgcttatatgtgggggaacagggctatctgcacatgcatgatcctggggagcctgacctgacggggatggaacatgagctacgct

SEQ ID NO: 93460 - DNA, 2020 bp, Zea mays
  unsure (1)..(2020): unsure at all n locations
  Clone ID: MRT4577_185222C.1
acgaatacggcagcagcagcggcctgcgtgcctgcctgcctatccacccttcctcctccggcctctggctcggacacctgcgctcgccctcgtgcggacagagccgagagcggcagcgacggaggcggggctgcgccggcctctcaatgcagcagcagccggagcctgccgatccgccgggccgggccttaccgccaccggcggtgccggcgccggcgcctgtcgccgcgcgcgcggcgcaccaccgccgggctagatctgaggtggccttccgcctcccggacgacctcggcatcggcggcggcggtggccctgacggcgacaccttcgatgatatcggctcggaggacgacctcttctccaccttcatggacatcgagaagatctcatcctccgggccctccgaccgcgaccgcgccgccgagacgtcgtctcccccgcgccccaagcaccgccacagcagctccgtcgacggctcgggtctcttcttctcgcccggcattggcggcggcgcgggcaaggatgctgcggcgtcgctggccgaggtcatggaggccaagaaggccatgactcccgagcagctggccgagctcgccgccatcgaccccaagcgcgccaagagaattctagctaacagacaatcagcagctagatcaaaagaaagaaaggctcgttatatgacagaccttgagcggaaggtccaaactcttcagactgaagccaccaccctgtcagctcaacttacactatttcagagggacacgaccggactttctacagaaaatgcagagcttaagataaggttacaggccatggagcaacaagctcaactccgtgatgctctgaatgatgcactaaagcaggagttggagaggcttaaacatgctactggtgagatgaccaattccagcgaggcatataacatgagattccaacatgttccatacaactcttccttcttcccgctttcccagcaaaatgcatccccacaccttggtagcacccagctgccactgccgttccacccaccccatcccaacgtgccaaaccaccagatggtgtcccaccgaaacactctcccggacataatgcagcaagagtctctcggacggctgcagggtttggacattgggaaggggccactggttgtgaagttagagagcagctcgatctctgcaagtgaaagcagcagcaccttctaacgaggcctacaagtgaaaacccaccgtttcagtaggttccattgttcatagtagcctgacatccttgtgctgcttcctgctctgtaagcccatttgttatttaattcattcaattagttgaaattatacgctgtcgcactggctgatcaatcatgttgtagaatggtccatgaacccttcaattctgtttgttttgggttcgtttcctgtttctgtgactggtatcatcagggcatttgggttttggagtgaatttctctggtggtactttgttgttgttttagctatgttccctcatggatcctctcattggaacacacatatgtatagggtttggacattggaaaggggccactggttgtcaagtcagagagcagctcgatctctgctagtgaaagcagcagcaccttctaacgaggcctaccaatgagaatctgccgtttcaatacgtcccattgttcataatagcctgacatccttgtgctgcttcctgctctgtaagcttatttgttatttaattcattcaattagttgaaattgttccttgtcgcactggcagatcgatccatgttgtagaatgatccaggaacccttctagtctgtttatgttttgggaccatttcatgtttatgtgttcggtattagggcatttggattttggagtgaaattctctgatgatacttttgttgtgttcaaaaaaaaaaaaaaaaaaaaaaaaattttggacatactcactctgtaccaaattcgttttaggccaatgnnnnnnnnnnnnnnnnnnnnnaaaaaaaaaaagaaaaaaaaaaaaggtgtgtgg

SEQ ID NO: 93461 - DNA, 1839 bp, Zea mays
  unsure (1)..(1839): unsure at all n locations
  Clone ID: MRT4577_185223C.1
agcgtccggttctgncgatagcttcactagccgggcatgccggttgccgtcgcgttggcggcggccgccgcgctcgtcgtcctgctcgtcctgtccgcggtggccgccgccgttttcttcgcgcgcacgcggggcgccaggccgccctcgctgtcgcgcgtcgagcacgcgccgtcgtccgcctccggctcctcccgcgccgcgtcgtccgcgcgcaaggagaaggtcggcgcggaccaggtcgccgagccgggcgccgcctcctctggcgtggccagctcttccgcggccgcgagctccctcgagtcgccggtgaagaggaaggcggaagcggtcagggtcggcggcggcggcggcggggccgccgcgggggtggagatggaggttgggtgggggaggtggtacgacctgacggagctggagatcgccacgggcgggttctgcccagcgaacgtggtcggggagggaggctacggcaccgtgtaccgcggcatccttgccggcggcgaggtcgtcgcggtcaaggacttgtttgatcacaagggccaggccgagaaggaattcaaggtggaggttgaagccatcggcaaagtgaggcacaagcaccttgtcggtctcatcgggtactgcgcagaaggtccaaaacggatgctcctttacgagttcgtcgaaaatggcaacttggagcagtggctgcacggcgacgtcggaccggtcagccctctgacctgggaaatacggatgaagatcgccgtcggaacggccaaaggcatagcgtacctgcacgaaggcctggagccgaaggtggtgcaccgcgacatcaagtcgagcaacatcctgctggacaagagatggaaccccagggtgtcggacttcggcatggccaaggtgctggggtccgggtccagctacgtgacgacccgcgtgatgggcacgttcgggtacgtggcccccgagtacgcgtccacgggcatgctgaacgagagcagcgacatctacagcttcggcgtgctgctcatggagctcatctccgggcgcagccccgtggactacaaccgccccgccggcgaggtcaacctggtggagtggttcaggggcatggtgggcagccggcgcgtggaggacctggtggacccgcgcatcgccgcgccgccgccgccgcgggtgctcaaccgggtgctgctcgtctgcctccgctgcatcgacgccgacgcgcacaagcggccccggatggggcagatcgtgcacatgctcgagggcgacgagttccccttccgcacggagcaccgctcgccgcgggcgtctcaccggacgtcgacggcctcgcggccgtcgcttctgtcggagaacgtcggtgccaccgacgactcggacaagtccatggcgagatgaaggatctaaccctgcacgaacacacctggcgcggcatgcgaggagccggagctggggcttgggggatggactgacttttctcaactggtgtaattttttgttgttgatccacggcgggatgagcgttctaatttgctatgctgctcgtttggtttgatggtgtttaccgtaatgtatgatttggcacagccgaacacatcttctctttgttgtttgttattactaggcttccggatttgggcaccacccgaagctttcttcgaccgagcgtgctccctccgccacatgatcggattgcttacgggacgacgggcaatcccggtgatgagatcaagtgtggaacaacatgtgatttaggggcgaaagggaagacgggaggggtactgtttggtttaggttctatatattttgtaccaacgattatgcacttagatatagatttctttt

SEQ ID NO: 93462 - DNA, 134 bp, Zea mays
  Clone ID: MRT4577_185224C.1
atattgccgggtcgacgagcactaagtcggcggccgccctcggtcgggtttatgaccagtgagaagtcttccggcttggccccacaagcaacgtgaccgaggaccgctccggttgggagctcgctgcactcaca

SEQ ID NO: 93463 - DNA, 1327 bp, Zea mays
  unsure (1)..(1327): unsure at all n locations
  Clone ID: MRT4577_185225C.1
ggaccctcgaggccggccggggaagctttgttatctttcaagggaatcaaatgcatgcacgtgggttcctgatagattgccacagaagcagcagttattattgttgtttcttactactacaagtctacaacatatcgtgctaggctaaaatggacagtggctacaagttcacatgttctgacgatagcttcactagccgggcatgctgattgagatcatgacttgttttaggggccaggccgagaaggaattcaaggtggaggttgaagccatcggcaaagtgaggcacaagcaccttgtcggtctcatcgggtactgcgcagaaggtccaaaacggatgctcctttacgagttcgtcgaaaatggcaacttggagcagtggctgcacggcgacgtcggaccggtcagccctctgacctgggaaatacggatgaagatcgccgtcggaacggccaaaggcatagcgtacctgcacgaaggcctggagccgaaggtggtgcaccgcgacatcaagtcgagcaacatcctgctggacaagagatggaaccccaaggtgtcggacttcggcatggccaaggtgctgnggcccgggtccagctacgtgacgacccgcgtgatgggcacgttcgggtacgtggcccccgagtacgcgtcgacgggcatgctgaacgagagcagcgacgtctacagcttcggcgtgctgctcatggagctcatctccgggcggagccccgtggactacaaccggccggccggcgaggtgaacctggtggagtggttcagggccatggtgggcgcccggcgcgtggaggacctggtggacccgcggatccccgcgccgccgccgcctccgcgggtgctcaaccgggtgctgctcgtctgcctccgatgcatcgacgccgacgcgcacaagcggccccggatggggcagatcgtgcacatgctcgagggtgacgagttccccttccgcacggagcaccgctcgccgcgggcgtctcaccggacgtcgacgggctcacggccgtcgcttctgtcggagaacgtcggtgccaccgacgactcggacaagtcgatggcgagatgaaggatccgagctgcctgcacaagcaactctgcaaacaagcaagcaaccctccactaacggatctggcgccgtcgtgcggcgtgcgaggagctggagcagaggggcttgggggctggactgactttttttcacccgatgtaaatttttgctgttgattaacggcgggatgagcgttctaatttgctatgctgcttgtttggtttgacggtctttaccgtaaagtatgatttgacgtagccgaac

SEQ ID NO: 93464 - DNA, 549 bp, Zea mays
  Clone ID: MRT4577_185226C.1
cctcgaggccggccgggataatctatgtatcaatagataggcttcttctatactctacctacctctcggttgctgaaatatcgcccttctacgattcatgaagtcgatccaggagtacgaccgcctgtgaggcagagcatctcgatagcacctcgccctcgccacgatgcagcacggaacggccggctaggatataaactagccttccaccatggcacttctcttctgagcccgcagaagctccggtgatgagaccttctaccggaggggatatatgctagcaacatcttcccctatccgtacgatctgtctactgctacatccgcaccgccaggtgcgtctcctgaccctgctcccactgcgatacctgcggcatcgactgcaacctatggccatttgttgcaatgtagatctacgctcatcatctactgaagcggcggcatcctacgacgtttgacactgagcccactacatgatcgtcgaggtgattcttgacctatgccttgatcgcatcaggaagctggcctacaactgcactggtctccaggg

SEQ ID NO: 93465 - DNA, 486 bp, Zea mays
  unsure (1)..(486): unsure at all n locations
  Clone ID: MRT4577_185227C.1
gcgtatctagnaaaaaaaaaaaaaaaaaaaaaaaaaaaaaaaaaaaaaaaaaaaaaaaaaaaaaaaaaaaaaaaaaaaaaaaaaaaaaaaaaaaaaaaaaaaaaaaaaaaaaaaaaccggaccccttgggtcggacccgtgggtttaaccggggaatattcaggccgggtaccttgcgggctttcccgatttttactttttaatgggggtcattttagaaatttggcgtaaataaggggcaattagttgtttccttgggggaaaatttttttccgggttaaaaatctcaaaaaaatttaacggccgggaaactaaaaggggtaaaaccctggggggcctaaatgggggggcttaattaaattaaatggggtggccctaactgccggttttcaagttgggaaaacttggggggccagtttttttaataaatgggcaaacccgcgggaaggggggttttgttttttggccccccgggggttttttttt

SEQ ID NO: 93466 - DNA, 769 bp, Zea mays
  unsure (1)..(769): unsure at all n locations
  Clone ID: MRT4577_185228C.1
ccnggccggggaaaccagaaaaaagagtcgatatctcaccgtcgtgacgagtaaaacaaagctctcgtccggccacganagtccacagcggagcagaagacactgaagcggcgaaagcaaggcaaagaggagcgcacgagcacctgtagtagcgtcatcgacaacgcgtgctgcggcgcctgacgcgtgtacgggagcctctgtcctcgccgtcctcctgctccccgtccccccggcctgtccgtctactctcccccatccgcccgattccggcggctgccagcgtctgtggcacgagggccgcacgccgcccgcgctgccccacacaaggggctcgggagggacctgctacttcgtaggcgccgccccagaggctccttccggatccagacaaggtctcgaggaatggagagcactacgttctgcccgtatgccatctctcgactgccaatgagaatatgccgactgatcctggtaccctgtctccacatgcctcccccatcatcatacatcgggtcgcctgattcccggattgcagtggatgtagaattgtctgtggcgtttaccgcgctttcttccgtggtagagaaatatgccatggaactagcatttagagcaatgaggacccgagcaccaccgaactcatgttggctccaaatcgactttcccatttggatgccacgcagagggatctgctactgcaccaagcagtttttcgtacttggaaccaaggaaaggacctccccacaggtgtcgactgttgatgtct

SEQ ID NO: 93467 - DNA, 298 bp, Zea mays
  Clone ID: MRT4577_185229C.1
gagctcacctgagcggcgggcgccctgttctttttgtttttttttttttttatttgatacttttaaaaaatatttttaagaacgggcggagcaggccgggcaaaaagaaacggcagaaccccaaggctcaagctacacgggagaacaagaaagcaaacaggacaggaacccaaatggccccagaaaaaggaggcaagcaaaacaagccaaaccgcggcaggccgaagcccattgcccacacaagcaaagagacagcgacaaaaatgggagtcccagggcaggccaagggaacggcggg

SEQ ID NO: 93468 - DNA, 320 bp, Zea mays
  Clone ID: MRT4577_18522C.1
ccctttattaaatgatgttttattgtttttctgtgttcttacccctattcgttgtccgtgtttttcggtgcgttttgagagcagttgtttttgttgacgtcgaacacccagcaggcctcgcgctagtcgagccgccccagtgggaaaaggacagggcttctgcagctaatgctagggcgtctgcgtcggccacagcccgagtcagactcttaacgaggtccctacatataaatcccacacgaaagccccaagggcgagggcacaaagcttcagggacccgggctgtccgaatccacctacagaactccagctgttacaga

SEQ ID NO: 93469 - DNA, 232 bp, Zea mays
  Clone ID: MRT4577_185230C.1
cattactcatgcaattttttggtaatggctacgcaacatttaactcaagtggccaaggagtttttttcccgggaacatggttggcggtctagtcttcggattgatagccattagtgtgtgtttttagattttgttgggctgtgtgctcctatgggcagaggccggaagtgactttcaaggaattgtgtcatctctatgtactattcttgaatgaataaaaatccttcccttt

SEQ ID NO: 93470 - DNA, 291 bp, Zea mays
  Clone ID: MRT4577_185231C.1
actcaaccaaattcgcagtcacagcgggcgtaaactactcggacgatcgtctagagccgcgtgcacaggtgacggagacaagtgtgctgagagcaatcgtgtccgcgtcagagcgccatccgcaaggtgctgcgtgacaacatccaaggcatcaccaagccggcgatccgcaagttcggcgacgaggagcggcgtcaagcgcatctccgggctcatctacgatgagacccgtcgcgtgctcaatatcatactcgagtacgtcatccgcgaagccgtcaccttacaccgagc

SEQ ID NO: 93471 - DNA, 260 bp, Zea mays
  Clone ID: MRT4577_185232C.1
aaagaaaacaaccttaatctaactacttttacactacacaaatcaaaaaacccaactaaggcatggttcactccacctgaggagtactatcacaagacccatactcatactaatagaccgcggcctaaacactcggtgaatcatgatctttaattaaacactacgctcaaaaccttaaaatcccttcacatatgaacaacaccacctgtttttaaacctatcgtacttactatcatactaaatctgcatatctttcccca

SEQ ID NO: 93472 - DNA, 665 bp, Zea mays
  unsure (1)..(665): unsure at all n locations
  Clone ID: MRT4577_185233C.1
cgcaccccatcaattgnagttttttatctagtctttttattttatttttatcaatggcttcttcatcattgtttctccaatccatttttatgacatctttcaccaatctttcatgtaatcaacaattccatcgaatctctcttctcggctcctgtaaagccttccaaaatctgggtatctaatctaacggtacacatttctcctatgcatcaattttcactgccaacaagaacctcactgcttctcaagctctctcccaaaacgggaatatcgaaaaccctagaccaagcaaagctcaagaactgagtgagtacgaaatcaacgaattagatcgacacagccccaagattcttaaaaacgcattcagcttaatgttcggtctcggagatctcgtaccattcacaaaccaactctacacaggcgatctcaagaaacgcgtgggcatcacggcaggtctctgcgtcgtcatcgaacacgtgccagataagaaaggcgaaagatccgaagctacttatagcttctacttcggacactatggccacttgtccgttcaaggaccatacttgacttacgaggattcgctcctcgccatcactggtggtgctggaatcttttaacgtgcctacggacaggtcaagcttcaacaccctgtgtttccgacacac

SEQ ID NO: 93473 - DNA, 279 bp, Zea mays
  Clone ID: MRT4577_185234C.1
acggaggtgctgcggctccatacacccttgtggctcctgctcgcacgggcgtgctggagctcgtgctacgtccatgggttcgactgtgcggcgggcactatcgtgttcgtgaacgcgtgggcgatcgccacagatctaacgcattgggcaatgcctgatgatgtcgtgccagcgagatttgagagcaatagcgtcgacttcaaggtaactaacgtcgagtagctaacgatcgtggcatcccgaaggctctgctcagcgatggcgtttgcactcttgcgc

SEQ ID NO: 93474 - DNA, 661 bp, Zea mays
  Clone ID: MRT4577_185235C.1
gagctgtacgccgccgctccactcccaggctcccagctgcccttggcgaccgtcgccgccggccgccctactccgagctgttcaggacgctttgctggcgagcacccaccacaccagatgttatccctatcgaaacggcaaggtctagattcttggacctcgttgttgaaagctttatctgtgagcatgttactgagttggtggaatgctctagctctgactgcagccaggtggatggcaaatcaagcaagagaaagcagcaggaggttcgatacgagggtgacccaagggttgctttgccattgatgtatatagcaaacctgtacgaaaccttgataagtgatgtcaatgtgcgtcttgcggcactgattgggttccgtgagaaaactataggtctagctcttgaagcttcaggtggcttgtacaggaaactgatccagaggttcccaaagagaggccactgcagcttcaagaggagggagttagcgacttctcatgcaaccaggacaaagtttcctgaacttgtggtacaagaagaaaaacgagttcgttttgttgttattaacggattggcgattgtagagaggccagaaaatatgagaatggaagatgcggaatggttcaaaaggttgactggtcgaagtgaaggtgctatttgttc

SEQ ID NO: 93475 - DNA, 704 bp, Zea mays
  unsure (1)..(704): unsure at all n locations
  Clone ID: MRT4577_185236C.1
ttttattcggcacgaggtctcatggtgtttgtcagtcataagatggcagcaacaccggtttttgtttcattcttcgtagaaaatgggtgcagcaaaatcattgatgtgggaagaaagtgaagtctaacggcacttataagatcattttttttctttcaggagtttgaatggtttgcacttggaggtattctttttgttttcntggtgtcttgcaggtatgatgccagcaagaggcattttagttcgtggtatctataatgcatctatcattgatcacttattgcctgtgcagtgcactgttgtagtaatattgagctgaacagcattggttgttggataggttgcttgagaccattatttgtgctttgagatctgcatatgtatgccaactcttgttttcccgttgacccattttgctatcattatcgaagatgactatttatcttagactgttagttgcattctctaactgctaatccattttctaaatcacatcaaaatgattattaaaattactcctatgtactttatatgtcggttatgttcatggttggattgtccgtttaccattaattaattgttttctgcaatttgtgtgatcccatatttaagctcaagcctttcaacattctcattcaataaatcctctgtcagatgacaacagctatcgccctttgagatgtgagaagagaagtgagaatact

SEQ ID NO: 93476 - DNA, 409 bp, Zea mays
  Clone ID: MRT4577_185237C.1
gcacgagggagtgtggggttttttgttcacgttggagttaccctctcctttgcccaaagttaaattgtccagagccaagaatgccagcctctgtgtggtgatcaaactcagcaagtcactgacctcgccgtgaccagtgctaagaaggagattctgaagaggagtctactccagtgtctgctgatcaagtgatggagctatctaactggttatggggtagaagtatctagaacctcttcactgcaaaggtcatagctttgtgctgctgatgatggtgttaaatgccggtgggctcggccttcttataagtctaagtaacccttctatacttcttattgaggatggtcttttaagctagcatatttttcaaacttatacttttgtaatcattccgataaaataatgtaaa

SEQ ID NO: 93477 - DNA, 1790 bp, Zea mays
  Clone ID: MRT4577_185238C.1
ctttgtactcggcctcgccttggcccgactcgcgggagctgtacgccgccgctccactcccaggctcccagctgcccttggcgaccgtcgccgccggccgccctactccgagctgttcaggacgctttgctggcgagcacccaccacaccagttgctaggactacatgaatggatcatatactagctcgttaagcctccatgatgtcagtgtcgacgatggacaatcagctcttgataacagcagtagaacctctagtccttttgatatcctgactcctcaagatgttatccctatcgaaacggcaaggtctagattcttggacctcgttgttgaaagctttatctgtgagcatgttactgagttggtggaatgctctagctctgactgcagccaggtggatggcaaatcaagcaagagaaagcagcaggaggttcgatacgagggtgacccaagggttgctttgccattgatgtatatagcaaacctgtacgaaaccttgataagtgatgtcaatgtgcgtcttgcggcactgattgggttccgtgagaaaactataggtctagctcttgaagcttcaggtggcttgtacaggaaactgatccagaggttcccaaagagaggccactgcagcttcaagaggagggagttagcgacttctcatgcaaccaggacaaagtttcctgaacttgtggtacaagaagaaaaacgagttcgttttgttgttattaacggattggcgattgtagagaggccagaaaatatgagaatggaagatgcggaatggttcaaaaggttgactggtcgaagtgaagttgctatttgttcaagagattacaaattctattcaccccggcataagatcaggcgttccccacaggcagcatttgacatccctgatacaagtgctttggcagaggatgagaactcttcattggtttgttcttcaggatttcgctcaccaaacgagatacaaaatcagcatcagtcaacatcaaagagacctatcgaacatctagaaaatcaaccctttttacaccttttccatcaagcagaagatgatagcatgcagcaagttcaacattgtgctcagttcccacccattcatcaatgtacgagcactccacatctatcagataacccccaacaccagcaacaggcttatttatctcaacatatatcttgcttgcaagttgggcaaggtcatcttggaggacgcatgcatattattccaaccagccctgcgaagttctgtgatgagtgtggctccccatatttgagggcgacatcgaagttctgctcagagtgtggtaccaagaggctaggaatgtgaggtgacttgatcaatgtgtatatgaatctgatgatgtagcaattgtagtcttatgtttgtaaaagggtctctagcgtaatggttaaggcagcccggcgaagttctgtgatgagtgtggctccccatatttgagggcaacatcaaagttctgctcagagtgaggtaccaagaggctaggaatgcgcggtgacttgatcaatgtgtatatgaatctgatgatgtagcaattgtagtcttatttgtaaaagggttatttgtaaaagggtctctagcgtaatggttaagttttcttttaagttttctgagtagcaactctggttgggccgttttagagtgggcggtgatatcttactagtgatgggggccagggtttggaaattttctcgagaccatgttttggtctcctttttaatataatactggaatgacggtcttttggaatgaccccctttccccag

SEQ ID NO: 93478 - DNA, 402 bp, Zea mays
  unsure (1)..(402): unsure at all n locations
  Clone ID: MRT4577_185239C.1
aacanttatttaatttaacataataggggaatttttgaaaatccggaacggactatccaatagctaggcgccttttattacgaaacctttataaccttccaaccaacataatccaacactttttgcacatgtgataaacaaggatgcacggtgataaaagacctcacaataaactaaagctccacccctcttatctttgtatacaacacatataccccccacttcaaaaacggtgctgtaaacaccacaagcccctatttcctgagttctattatccgggcactttttatgctccacattggtttggaaacccccctttggtggctccttatgcagaaatcaaaattccggggttcatacaatccatttactggccgaaatgttacaaccaggatcttgggc

SEQ ID NO: 93479 - DNA, 126 bp, Zea mays
  Clone ID: MRT4577_18523C.1
gttcaaaaacatagtttatataacctggggtgaacacaattaatagctttagattgaagttacctcttttaatcatcggtgacgccctttattgggtaggctaatgcttaggttttactaacgcta

SEQ ID NO: 93480 - DNA, 284 bp, Zea mays
  Clone ID: MRT4577_185240C.1
aaccctgcgagggaagagattatgtgctttacatacccactgacgttccaaaacacttaccatggtgcttgtgcacccggttgccaatactgctaaattggaagagcagtcgaaggattttagaacacaattgagcttgatcgtggacctgcttaattcttttgctgcgctcggcgctgtcactatcagggtgtcgggctttaccacgctccagctaatggtatcactcgtttctcagaccatcaaggggtggctcaagcttaggtggccgccggaaggggcaa

SEQ ID NO: 93481 - DNA, 581 bp, Zea mays
  unsure (1)..(581): unsure at all n locations
  Clone ID: MRT4577_185241C.1
cggcaagcgccactaatctgcctccgaggaaactacagcccaccacagacccgagcggaagaagcctgtccgggcgcggtaagggtggcaaggggctcggcaagggcggcgcgaagcgtcaccggaaggtgctgcgcgacacatccagggcataccaagccgcgatccgcggtgcgaggaggggcgggtaagcgcatctcgggctatggacgggagcccgcggggctcaagacttccgagaacgcnccggacgccgcccacactgagnnncncccgcngcccgcccccccccccccccccccccccccccccccccccccccccccccccccccnccccccccccccccccccccccccccccgcgccccccccccccccccccccccccccccccccccnccccccccccccncnccncccccccccccccccccccccccccccggcccccccccccccccnccccccccccccccccgccccgcccccccgccccccccccccgggccccccccccccccgcccccccccgccccccccccccccccccccccccccccccccggccccccgcccccc

SEQ ID NO: 93482 - DNA, 148 bp, Zea mays
  Clone ID: MRT4577_185242C.1
gccaacctgacgtacctatatataaaggagctccgaggcagccagtgaatagcccacagtcttttccaagaggcatggataggctggtaaactgccatagctccggttctccggacatacgagtgagtcggtggcgctccacagggaa

SEQ ID NO: 93483 - DNA, 374 bp, Zea mays
  Clone ID: MRT4577_185243C.1
ccgggacaacccacgcgttcaattaatctaaaatctatttctatttttacaaacaaaaacctcccgcattatttcaaaattcgttgttttactaatactcatccacctattacacaaattatataaaaatacaacaacaatacatcttcaccacaaacataaaatattccatttcctctctcacacactatcaatcatttccattcattaataataaatcatttcatacatcctcatcaacaagtctcaacaactattttctcacatttcactaacattaactatctataccaatccaatcatctttatttacaaatctcctcaaccaaaaatacaactctaacctacttcatataacttatattacaactata

SEQ ID NO: 93484 - DNA, 577 bp, Zea mays
  unsure (1)..(577): unsure at all n locations
  Clone ID: MRT4577_185244C.1
cattctagcatgcatattttgtagtttcatcaacgtactcaaaacaaatattggcttctagtagccacatgtccatacatcacaaacataactaaacagtaaacaaaaatatctctcaatacatgttttatcatttaagcaacaattcaaaagcaagagtccttccaggttgacgtccaagtccttccaggtttcagcaagagtccttccggatttagtacacaaattgagagcttgacgtccaagtccttccgagtttcatcatcacaatctcatatgtcataatataagtccctcgacaccttcttgaatctcttgcaagcagtcccaaaaactttgttgattaacctcagcaccatctttgtaactgtttcttatccagtcctgtgaacacattaaagcctccaaaatttcaggagtaagcctgctgcgatgctcactaagaatccgcccactagtgctaaaagctgactctgatgcaacagtgctgaccggaatagccaatatgtcacgtgctatctttctaagtgttgtctgttngaaaacattacaaatacataacagtaaaacattacag

SEQ ID NO: 93485 - DNA, 128 bp, Zea mays
  unsure (1)..(128): unsure at all n locations
  Clone ID: MRT4577_185245C.1
ccgggccgggaaatgccgtaggtatggacttcagncgcaacttaaccgactttangccttgggcacgttttatggcattcgatttctatgnagaataatcattcctcgaaactcccagtgccgtggca

SEQ ID NO: 93486 - DNA, 321 bp, Zea mays
  Clone ID: MRT4577_185246C.1
gataccggggacctgtttattggaagggggaaaacttccacctgggccttatttccttttttggaattttccccttccattcctggggggcctaattgttccattcggccctttcccatttacccaaaaaaattgcgtccagccaaattttaattttgccccaccatttccacccaaggctttggcccaaactaccatttaaaaccttttaccaccgggccaggccaaaaacccggccttttgaacattattttacttttgaaaaccaatttgagaattttcttggccaaaatttgatgaagaattggctggattgattat

SEQ ID NO: 93487 - DNA, 393 bp, Zea mays
  Clone ID: MRT4577_185247C.1
ctgcaggtcgcctttggttggtcccccccttctccaagagaaattgttcatgggcaaagtcttcttcataacctttgttgaaaatattaccattgggtgacctaactaatggccggggctcaccaagtggaaggagtaatgcaggttaaaaagggtgggctatggttaagtagaagcccctaaagggggtgaatggggacctgtaaattcacactaaatggccaaaccctggtatgaaagttggtagaattaaaccaagtgctatagcagactcttacttgatgttcctttgaatgagtattgaactttagaacaatggcacgagtgatttagcaagagctctatagaagaaaccaatcacaaagaaaagcaactcatgagacacgtgatttt

SEQ ID NO: 93488 - DNA, 626 bp, Zea mays
  unsure (1)..(626): unsure at all n locations
  Clone ID: MRT4577_185248C.1
ttttttttttttnnnnnnnncgttataaatatataaaccaaacgaacaccgcaccctttttttttttttttttaacaaactatattagttcaattattaattatgtttccatacaatcaccaaaatcacatatggctcaactagatgctttttaatttccttgcagatatatgttggttgagcctcttgggttgtttatataagaataaatggactggagagcaataaacctctctccttaactactctagtaaataaacaaaatgcgacatacactcttcgttttgcaatataaggaagtagccactctagtagataattaattaagaatccctcgatcgatcatcgttggattgaagtgtgcattagtcgtcgtcgtcgtcgtcggagttcgcccaggccatgcactctctctgaatctgccccagcgtcttggggccaccgccgccgccatgacgatacagctgctgcggcgtcgcactggtaatggcggtaccagcagcagcttggtgctgctgtgccgccgcatttctactggcaccagcagcagctgcttggtgctgcggctgctgcgctgctgcggtgccatactcgccatgatggtgatgtgctggcggtggcggctg

SEQ ID NO: 93489 - DNA, 154 bp, Zea mays
  Clone ID: MRT4577_185249C.1
gtgtagtctgagaggcccgtcgttgctcggattctctcggagaccgacacgatgacaccaggatatttatcacgcactcggggaagacgacctaaagacggttacccacgtacagagaagagcattccacacaatatacgagcatgcgaaaggg

SEQ ID NO: 93490 - DNA, 432 bp, Zea mays
  Clone ID: MRT4577_18524C.1
aaaacggggacccccccccaagggggatataaaaaaaagaaacccccaatggcaaaaaaaaatgggggaaaaaaaaccaaaaacaaaggggggattttaaaagaggacaggaggcttttgcaaaaaaaaaagggacagttggcttcgtttggcaaaaaaaaaaacgggtacgaaaacaaccacccattcctttaattaggggggccaagttcagaacacacactatatgctaaaaaaaagttgtttggaaaggacatttgggccctggcactgcaactcggaggaaaaaaagggaaacccggattttttttaatgggaacacttaaactggagcttttaaaagggaccgctattgggaccaaaaaaaaacccacggggggacccccccctacaaaaaaaacaaacgtagtaaaaaccaggggggggaaaccc

SEQ ID NO: 93491 - DNA, 233 bp, Zea mays
  Clone ID: MRT4577_185250C.1
caaatagtgtaccatttgttttacataaaaacaacaagaaacatatttcacaacctatgaactgaccaaggggataaatattcaaaactacacatcaaaagcatttacaatattgcatgtattggactggatggatccattcgtttaaaggtacgacctaaagagagcgtctatcgtatatacaggatgtctgacgccgacattacactcgatcactatcttacaatccctag

SEQ ID NO: 93492 - DNA, 589 bp, Zea mays
  Clone ID: MRT4577_185251C.1
caaataatttatattagtatagataatattataacaataaaaatgtagtaataattattaaaatataatttttctttgttttctcaatcgaacagaatatatatattatataatattatgttaatgaatacattagccaattaactgcacctatttttcttattttcattatcatggaaattggaaatataatataatatattatttaagatataacataaagttgtgcacctagctaaatatatattatgtgtataaaaatatattcaatcttcaatgcagcgattacagaaacaattgtaggaactagcgtaaattttgtttggcatacattattatggtgtgcaacgtgatcgcgttatataaagcattaaagctctataatattacattcgtatcataataattatatgttgtaatttttacgctgtttacatagataacatattatatatattatattatattgtaaggttttttttaacattgaaaacaaaaaattataatgacttattgaagggaattaaaaacacattttttttttcaaaaatgaattaattaaaaattaagatattaaaattaaaattaa

SEQ ID NO: 93493 - DNA, 147 bp, Zea mays
  Clone ID: MRT4577_185252C.1
tggtgattttctgtgtcctgactatgcttctaggaatcgtgaggatggcgtcaatggaaacactgggagagggcgtgtgggcctaggaaggtgacctatgtgcatcagtttgaatttatcagggaacatttaatgtggcattggcag

SEQ ID NO: 93494 - DNA, 102 bp, Zea mays
  Clone ID: MRT4577_185253C.1
cgtatcgttctttatcttatccaattctttattcaactctgacgggcatgctatggggtcatgttcatataaaactgtagaattcactcttgctaaattcta

SEQ ID NO: 93495 - DNA, 623 bp, Zea mays
  Clone ID: MRT4577_185254C.1
acccacgcgtgcgcccacgcgtccgtctctttcctctcaaagaaagaaagaaagaaagaaagaaagaaagaaggaaggaaagaaagtagcagatcgcttgttgctgcgtttttcaggagctcacgacattaatgcgctgtaatgtagggtgctcctcctggccaaatgggagcaagttatcctcgcatgtttctggtcctcctgctgcttcatggagccagtgctgctttgaatcctccaacagcagggccaaaatggcagactctgagcggtcgtccccctcaagtcatagctcgaggaggattctctgcgaccgcataggcttctgtaagacagggctgacccttgataactcgacgactgtcgctgagatcttccccaagatggacaggacgtacaagctgtagggagaggatgtccatggctggttctccctagatttcaccgcggagcagctggttcagaacgtcactttgatccagaacatcttttctcgcccgagcacattcgatgcctcctttgggatgtacacgctcgatgatgtcgttgaactccacccccctcaaatatggctgaatgtagagtacaattcattctttctggagcacaagttaagcagcgag

SEQ ID NO: 93496 - DNA, 420 bp, Zea mays
  Clone ID: MRT4577_185255C.1
attcggctcgagagtatgcaatgcttatttttcagccgctcccactactacatttaggggagctcattattagcgcccgggcccttgttgcggtgcggcccacggccatggccaagcttgccctgcagctcaagagcaagttgttcgacctcgttggccgcctgaccagctgcggccgtgccggcaccacccacaaggatgccgatggcgcgacagaagccaagttatcagtggtatcccagcctgctgagaccaggccaaggggaggtgcttctcccgatgatggaggtgccaagggtcagatcaacagtgacaccatttagaggagagggagaggagaagagaatagatcgaagagacgataagaagctcgccaatcggtaccatgatagaaagaactgaagctgtaaatcacagttg

SEQ ID NO: 93497 - DNA, 605 bp, Zea mays
  unsure (1)..(605): unsure at all n locations
  Clone ID: MRT4577_185256C.1
gggccaaacccccgcggcggcgnnnggcaggagctcacgacattaatgcgctgttatgttttttgctcctcctggccaaatggggggaagggatcctcacatgcatctggtcctactgctgcttcatggagccagtgctgctttgaatcctccaacagcagggccaaaatggcagactctgagcggtcgtccccctcaagtcgtaactcgaggaggattctatggtttgtttcctgactcgagccacatggcctaccagcttgccttgtctaccagcttgcctgacgtcgttctgttatgtgatctacaattctcaagcgaccgcataggctactgtaagacagggctgacccttgataactcgaccactgtcgctgagatcttccccaagatggacaggacgtacaagctgcatggagaggatgaccatggctggttctccctagatatcaccgcggagcagctggttcacaacgtcactttgatccagaacatcttttctcgcccgagcacattcgatgccttctttgggatgtacacgctcgatgatgtcgttgaactccacccccctcaaatatggctgaatgtaaagaacaattaattct

SEQ ID NO: 93498 - DNA, 225 bp, Zea mays
  Clone ID: MRT4577_185257C.1
cgaaagcgtgcggacgatgatctttatctactctatagtgcatatgaacgcgatcgagaccatgaagcagatgatcggtgtcttcggtttcctggctctcgctacgagcgatatatagacgcatacaagtggaagatgtagctgtcagctaccacctccggttcatctaccagcgtcggtgcatctgacacctacggttcacctgccaactccggtgcatgttcc

SEQ ID NO: 93499 - DNA, 410 bp, Zea mays
  Clone ID: MRT4577_185258C.1
gctatgttgtcacttcctttggaggctggaactcctgctaatgtatcaagtacgtcttccctgcaaagtaacggtgtatcttcaaggcacacacctgctgtttcagaatcatcaggtattttgggcactcagccagaacaggatttgcatcatgacctggggccatccatgtcattgttgggtgttccacttcaaagaatgctcccagatgacaggagccaaacagtctgtcagccagatagaggaactgatttgtcagggaacggcgaaactgaatatctagcttgtaccaccagcgatctgtccacccttccactttctggtgaagctgaaactgagaatggtcaagcaagtatgcctgcacaggaaatcacaagtcctcatgcccaacatagtttagctttagcaac

SEQ ID NO: 93500 - DNA, 453 bp, Zea mays
  unsure (1)..(453): unsure at all n locations
  Clone ID: MRT4577_185259C.1
gcgactatcaccatangaaggactcaatacatgtaccttacaagtcggcagccaaatacatatcggcgctcctgtatgctcacatggtgatctctgtatgcgctgctacatgtgaccattttcgcgcagtgctcacaatgctcctagtagctttcgattctgtgctacgtgacctgtcaccatggacagtgcttcggtatgtgaaaacgcatttcttcaaccgatacgggatccaacatgcaatcgcacttggcatgttacctttatcacgcttgttcctccaacagtcatcaggcctattacagctattacgtttgatgcattgattgggacaaaacattacggcacatcgactacaacaacttgtgctagcataccttgctggctactgttatcaacatcagtttattccatgcaaccaactagctgcattgaactctgcttcttatttgc

SEQ ID NO: 93501 - DNA, 303 bp, Zea mays
  Clone ID: MRT4577_18525C.1
cctcatcttatctctattatagggctccatctttgaagggcctgcaggcccaacgctgaagccccccccaaagcaagtagggcgaatggcagcgatcgtagcgggggggcgaaggagcccacatcgggggcatctcagctgccgcatcggcggctagggaggctggggtcgccatcgccataagtcaaacaccaaccagccggatgaagggaggcaagcacctggggcggtctttcagcaggatagctaaatgcagccaggacgccggatgtgcagaagctgccgagcaggaagcagcaccct

SEQ ID NO: 93502 - DNA, 355 bp, Zea mays
  Clone ID: MRT4577_185260C.1
aaaaaaaaaaaataataataaaagaaaaaaaattaaatcaacttcacaaataaaaaaaggggagagcactaaagcacactgtcatcatgaactataaattacttcctcaaccatgttaaagatccaacacttactatcacttgcattcaagaattatgctgctttatattaacaccaaaacaaaactaactaaccaacgttttaaaacatcttaattggaaaaacaaataaccttccccacctaaatttccttgaaaaacatccacctttcacctattgcctttataaaaattagaccacatccaatttcctttccaaaacagtgttcatccttatttaaaaatctgacccaccc

SEQ ID NO: 93503 - DNA, 324 bp, Zea mays
  Clone ID: MRT4577_185261C.1
attcggctcgtggctggccaagattcttttgggctactatgatcactggcccaaggggcacctcgaccagattgcagcgctctccccatggccctaggagctgcaccagaggctcgaggccacactggaccggtagcagtcgccatgcaccaagatggatgaaagaagaaggtccggaaagggctcaggcacatgcaaggcttgcttgacctaacaccagaccccgaaggagacaaggtacctgtcacaggacccctggacggaggcacactcatgacgaggctgtacaagtacgacaagacagcactgccctggctgagccac

SEQ ID NO: 93504 - DNA, 655 bp, Zea mays
  Clone ID: MRT4577_185262C.1
ggcgattgggttcctcgaggccggccgggatgactgtatgcgaagcatgagatcgatgtcatcggcgttgtagacgagtagggaggttggcatttaaaatgactgtttggggactttgctttctgttctgacattccctcaggcacttcattttacaagattatcttggactcctacagcaaaagcaccttacaccgtacaacctcaaccacttacaccaaccaaacatccacaatggccgacaacaacaaccagcagcccggtcttatcggcagccacgcccaatacgtcaagggtgccgcagaggccaccattggtgccatcaccggctctcagccctggaaggcttcgggtgagcaggacaaggccgctggtcttgccgatatgaagaaagctggcgaacttcgagcgcaaaacgaccccaacaaccagaacggatatggaaaggccgaggagattgccggcaagcttaccggttgccagggaatggagcgcgagggtcacgcaagcgctgctcagaagaaggaataaatggtctctttagcgttgaacgattgatgtctgtacgatatatatacctcggcaatgagatcacttcgatgactctgtcgataataccaaatttttcgaaaaaaaaaaaaaaaaacccgcggcc

SEQ ID NO: 93505 - DNA, 138 bp, Zea mays
  Clone ID: MRT4577_185263C.1
cccacgcgtgcgttgacgcgtgctgccatgcttgaaattttgacatagaaacgggagggcacctccactacaactaggcagcgcagatagttaggtcaaatcgatattgacctgagatgactgatcatagcttaaatt

SEQ ID NO: 93506 - DNA, 1285 bp, Zea mays
  Clone ID: MRT4577_185264C.1
ctaacaactattttgttggaactctaaaatgtgacacgtatggccctagcccatttttctaatgagtggttggatagatagagtaccccggtgattgctatttagcatgcaccaatcttgtcatccccactggcactctcaacggccaaagcggcgaggagtctatccgagagtaccgctccaaatggctgatcgttgccacaggagagaacgccgagcctgttgtgcctgacatgccgggaatccataacttcaagggtcaagtaatgcactcatgtgactaccgtagcggcgagtccttccaaggcaagaaggtgctagtcgttggctgcggtaactctggcatggaggtgtctctcgacctcgctaaccacaacgtgcacacctcgatggctgttcgtcgttcggggcacgtacttccaagagaggtcatggggatctcaacttttagtttgtctgtgtggctcctcaagtttctacgtgtccaaatagtggaccggattcttcttctactcgcttggttcattttaggagacactgcacaaattggtattcctcggcctagcatgggtccaatggagctcaaacaagtgtctggtaagacaccggtgcttgacgtggggacgatagcacagattaagtccggcaacattaaagtatttcctgcaattcgaagtttccaagaatatggtgtagagtttacaaatggtaggattgaatcatttgatgttgtgattcttgccacaggttataagagtaatgttccttattggttgaaggagaatgaatttttttcacagcaaagtggatttccaaacaaaccaaatgaatggaaaggaaaggatggactctatgctgctgggttctcaaggcgtggtctacttggtgtgtctatggatgccaccaaaattgcggaggatattgcgcagtcttataataatatatataagctacaaagatcataagaacaaatgatatttaactatttatcaataatttagctatcaccatttgagagttttgtaaatatatgtactagtctatttgcataaattataagagatggatatgctagataacaaatactaggctagcttatctatcaacgcactcattatataattgacatatgctagtacatgtcacattttagaggtccaacaaaatagttgataggattgatttattgcatgcttttatttctttttaatttggcaaatattgtaagtcatttttgttattatcaatcaattgtaatgggtaatgtatggacgttttcattctt

SEQ ID NO: 93507 - DNA, 306 bp, Zea mays
  Clone ID: MRT4577_185265C.1
atattactgttttcttttcttgatttattgtttttttgtcaaatgacaaaccctaaaatcattcaggggggggaataaattcggggtggccgacacaacaaaacaaccgggtcatttttaaaccaccaccgttcccggtgaagcccggagggggtttatctttgccccccctcataggggggggggggtcctaaaagccgccgggcatgggggggtaaaaaatcccattgttttgcggcccccccggggacgggagacaaggggggggggggcctctcttgggagaagaaacccggaggggggggg

SEQ ID NO: 93508 - DNA, 788 bp, Zea mays
  Clone ID: MRT4577_185266C.1
cggtcgcgtgggcggacgcgtgggcggacgcgtgggcggacgcgtgggcggcccctttggctggagttgcagattggagcattggtggattacttcaacatgcaatgtttatgactttaattccacaacatcctgtgctccatgaaaacaatgaaccagattatgaagcagaagtgcttcatgaagacaatgaaccagattatgaagcagaagtgctccatgaagacaatgaaccagattatgaagcagaagttgaagaagaagtgctccatgatgacaatgaaccagattatgaagcagaaggggatgccacattctgtaaaagggattattctcatgcattggatctctatactatggcaatggaaattgatcctgataattcaaccttgtatgcaaagaggagcctttgctttctgtacacaggcaatgaaggaaaggctttggaggatgctactacctacagagatatgcaaccagctcttgctctggtcaaggagtattgcatgacatgcgaagcactcttgcctggcttgaactcggattttttaagcaaaccaactgacgaagcgttcggggaaggacaatccgtgaagaaaggttattagtgtacagggaagaaagaaggttgttactgcacaggaaaaacagaggttcctagctgttactgacaggcaagaacggagattctagttcttagttgttgattcgattagatgccacagtggcacgggcaagataatgatgcatgagcatccgttcaaaacacagcactctagctagatcgc

SEQ ID NO: 93509 - DNA, 217 bp, Zea mays
  Clone ID: MRT4577_185267C.1
attcgctactcactccactaatcaagacataaaagttgatttctacaataaccagactagcaatagcacaatgaaattaagtacgatggcgaaatcactagcatcatttgcgaacacaaatacaaaggataaaggatcgcttcctcgtccaaatacaactagaataattcgatatccaaatgttcccaaatcaaacttgattaatcccttcctaaaa

SEQ ID NO: 93510 - DNA, 213 bp, Zea mays
  Clone ID: MRT4577_185268C.1
aaccagggggacatttattataaagtactccaacaggggccgtgcaaccctgcaagcaatggtacacaaagcttgaccgcgtttctagtagttgtagcaagcctgcctttttgtactcggaaaataactaatgcttggtttaacaacctaacttgccagattttttcccaaaacacacccccttggtttttcaatgcaatacttgccttgccc

SEQ ID NO: 93511 - DNA, 634 bp, Zea mays
  Clone ID: MRT4577_185269C.1
ggggacccgcgcagcacgacaggccgcggcagacgcccccaccgccgccgtcgccagagtggcgcaccttgtggagcaggtccagcgccaccacctgagcccggacgcgaacctcctctccagctccgtgcactccgacctactcacaccgcgcgaggagggcgaggcagagcgcgcgctggacctccaggcactggaggcgtacacggaagcggtggacatggcggaagagtaccatgcggctgccggcgccggaaagaagctcaactgctacccacaggcgtacaagcctttggagcaccgggcggccggggcagacgcacaacagaggcttaaggtcccactgctctctcacgaaggccaggtccatgagcatgagatcgaaaagctgagcaccgattcaagaagaccatgtcgatagcaccctcacgagcgcgacacccaggtcaagttcaacactcgacgagtatacaacaattatagcagaagcgctagggccgtgactggagatggtccacattggagtggtagacctgaagcatttgaacctggagttaggggctgaagctgaccgatgtcttggaaacactaaatgatcatctgtaccaagtgcaacaagagcagacaggcatgt

SEQ ID NO: 93512 - DNA, 364 bp, Zea mays
  Clone ID: MRT4577_18526C.1
ccgatcgttcctctccactttacacattccagttccattccaacttcgatgccgggcgacaactaccaaactacgacagttcgtccacatgaaggatgagcgaagaggataagactgatgcttctgctgagcagacggagagggcccctatgctaaatgaacggatcctcttttttctgcccaggaggagcgtacttgctcatccggggcatgatcttgagatcggtcctgatgctccggctgttttcaacgatggaggggcgaacacaaacggacgcaaaggtaaatatgagcttgacatgaaaactgtactgatgaaggttgatcgagcactatacttataagttttatacactcacaatta

SEQ ID NO: 93513 - DNA, 325 bp, Zea mays
  Clone ID: MRT4577_185270C.1
actacactgggccgaccaacccaaaacttcacacgtttaaaagaaaggaagaacctagggggccattgggaagggaaacaaggacgtcccgccccaacccaacaagcatgcgcggtcaaagggcacggcggagctcatgccgccgactaaaagaacaacgcaagccccgaaggccaaccccggggcaagcttaagcgactgaatgcccgacagcggcaaaccggccaggcacagtccccccaccgaactgacgccaaccaaccggcacccgacggagagaccttctttggacgaaccacctgccgctgcaccaacggccgcctcg

SEQ ID NO: 93514 - DNA, 455 bp, Zea mays
  unsure (1)..(455): unsure at all n locations
  Clone ID: MRT4577_185271C.1
gtgtgggggtgtttttttttaaattttttttttttttttttttttttttttttttttttttttttttttttttttttttttttaacaagaatgccatactgggcctatatatctaaaattatattcaccccggataaatttnaacaattgggctgtgggcgccaaatattaaagtaaacccaaaattaattaccccacccccaacgaggggcgggccatttggaccacataagcaaaaacccaacgtttttacttggggacttttcctcggagccccaacatccaagagggcaattcattaccaccagggatccgacgaaaaaaaacccgcgggcatgggccttatttccatggggaaactccccacccccccgaaaaaagacgtgtactcctggacctcggccaacgcgttttgcccccggggcttggcaaaggacccctggaaatccacctaa

SEQ ID NO: 93515 - DNA, 330 bp, Zea mays
  Clone ID: MRT4577_185272C.1
tcctacagaggagctcgccatgtcctccctctcctctgccgccgtcaccgccccttccttcgccgcaccagcgccagcccgcgtcgtggtcagaaggaggtccttcaccgtgcgcgcctctctccggaagggcaccgacagcgccgccgcggcaaaggctgccagcgccctgcttgccggggttgccatggcccaaaaggcgctgctgtgcgcaggcgactgcgggatcgtcttcgaaacgcagcacaagatcaccgtcaagggcagcgacaccatcacattcaagaacaacgacgacttcacgcacaacgctcttcttcggacgaagac

SEQ ID NO: 93516 - DNA, 372 bp, Zea mays
  Clone ID: MRT4577_185273C.1
ccttcttttttttggtgttttttttttttttttttggttttttttttttttttttttttttttttttttttaagcaaggtgaaacccccccaccagaaagcggacaaattaagggttgggtttgcctgggggggaccggaacccaaggaaatgtccacgggggccgcaacacaagaccggtggcccttaatggggggcccacctaaaatcaccccaccctcccgggcaggtgggcttacaacaaaagacacagctggggcggggccctaatgccggaacaacaaaaaaaaacccagtctgggccggcccctaatacggggggaacaggcccgccggggaagggcaaaatttttttatccattttctttggac

SEQ ID NO: 93517 - DNA, 403 bp, Zea mays
  unsure (1)..(403): unsure at all n locations
  Clone ID: MRT4577_185274C.1
cgtaangcttgggatccctctagaagccggacggccctcccccttttnttttttcccctttattatttttacaccatgggggttttttaaaaaaattgtccgttgttaccccaggtaccctgccacaaaacaaacaaaggaaccaagggcgataaaagcaaactaggaaacagggcccagaggggtccctcccccaccaagaacaaaaaaaaaagaaaaaaatgtgggctccccctcccccccggggggaggaacaagggcgaaaatggatctacttggagccgccttggcagcaaaaacaaggaaaaaaagggagggtgggcgggcagcacccccacaaaggggttaaccctcttaaaactgaacagggggggggggaacagcccccccaaccccccaaaaa

SEQ ID NO: 93518 - DNA, 166 bp, Zea mays
  Clone ID: MRT4577_185275C.1
gtaaaataactacaacaatgacttacagcgcaaccatccctgtagtttatcgaccattttaaatttgactatcagggatttagataccaccaggtccgttcctgctcccaggtcccgacaactattgcttacactataggtctttgagacaaaacagcgagattta

SEQ ID NO: 93519 - DNA, 188 bp, Zea mays
  Clone ID: MRT4577_185276C.1
ctcctgagggtacacaaaatagttggcgtctgaaagatgaatcgttcatgatcaacattcataagaacatatataatttctcaatatttgtttgagcactccgaaattgtttacaaagaattcccgagacttcttaggttcacgcggatcttcgtgacgacgtctggtcatagaataacaaatttatg

SEQ ID NO: 93520 - DNA, 332 bp, Zea mays
  Clone ID: MRT4577_185277C.1
gctcaacactggcacatgcttggctcggtacctatcaatcaatagcagttgaaagggagcagcaaggactggacggcaccttttccttctgccagtcggtcctggatcggggcacagctagctagctagctagcgctctacgagcaaaagaaatgcagcagctagcaggtacatggcacggacggaaccaagccgatcgaaactcaccggcgacgaccgtttgccggaggagagcgcgaacgtcagcagcggctccggccagtccagcccgagcacggcctggccgtcgccattcctcgcttcagtcagggtgcacctggcatgccccatgc

SEQ ID NO: 93521 - DNA, 689 bp, Zea mays
  unsure (1)..(689): unsure at all n locations
  Clone ID: MRT4577_185278C.1
cccgggcaagatagagntgtgagggaggagattctgaggaaaaggagggccgggaagctgcctggggacaccaccagcatcctcaagcaatggtggcagcagcactccaagtggccataccccacggaggacgataaggcgaggctcgttgaagagaccggcctgcagctgaaacaaatcaacaactggttcatcaaccagaggaagaggaactggcacaacaactcccagacgtcaaccctcaaatcaaagcgtaaaaggtgatggagagctgcgccaccatgtactgcacacctgacacgtataccaattaccaacacgctaatcaaacgacgtacggccatgcatggcgactcacaagaaataaagaggatcgatcgattcaactgtatatttctagtcattagtcactagtcagagaggtgacaggttcatgacacacacaaacacacgtacactagtctgaccactggcatatttgcttgctgctgtgattaatatattttgagccgatcatgtgctcggagcatactttattcttgttattattgtatagcatagtttgtccaccccaccccctgtgcacatatatacagtgacctgatctgaccatctcacctgctggcaggaagagatcgaagaacagagaggttaattgcatgtaccatgacaatgccaaaaaatctaaa

SEQ ID NO: 93522 - DNA, 495 bp, Zea mays
  Clone ID: MRT4577_185279C.1
ggccgggatcatatcattatagcattagcaaatgaggaagggcgtagagaggatcgaggatcagagcacaaagcagatggacgacggtcattggcgcgtgcctggctctgggatctgccagctgctatggactgtacatggcctgccccttgccggtgctggagggtttggacgttgctcgggcctggctgacgactaacaagggcgacgggggcctgcaccctgacccggtacacctgaggcatgcggaatgcacaccgctggcggcggggccctactacctactacgcgggcagacgagcgacatgtgccatgcgctccgcgatcagtgctgacagctgccaatgacgaagaaggacgatcaacccgcagcgcagcaggtacaaattatgaagcatgttgaacgtgccgctggccgctgcagccagctggacgatccacgtctcatgcatcaggcacaactactggtggctgttcagaggctaaggcctaagg

SEQ ID NO: 93523 - DNA, 399 bp, Zea mays
  unsure (1)..(399): unsure at all n locations
  Clone ID: MRT4577_18527C.1
atccaaagagcacgcagcgcagcactgaagcaccacttcctgcactcactgtgttagctgctcaaaccgtagtagtaacaggtccatcaacaccaatggctgccaaggttgcgcccttccttgccctgagcagcctgtttgctcctaccgcgcatggctgataacccaactgctctggcccagtcgttctcacgccgccagncgggccgactccgttccatatagacacggttgttgccccatcaacgcgttcaagnnnnaggggtgcgacattcatcctgctgcccaggagcatgccgtcacggacgatgaggaccggcntgccggtgagcatgcnaaggcgaccgcggaagaagatggcgctgctactgcccatattactgacagatatatacctct

SEQ ID NO: 93524 - DNA, 376 bp, Zea mays
  unsure (1)..(376): unsure at all n locations
  Clone ID: MRT4577_185280C.1
gcgccgccncggcgcgccggccggaggaagaggaggccggggccgncgcgagggccaaccacggggggaaccgccccnagaacacggcccggcccccgcggcgccggncggcgcgacccnccgggcggacaggaagaccggcgcagcgccgcacgcagcgccccgcgggggggggggacagnggcccaccaaggccgcggaagagccangngcagccgggagaacggccccancaaagaaaggggccggcaggagaaggcccaggncaagcgcggcagccnncggggcagaacgcgagacncaagggngaaacncgaccnggccaaggcgcgacggccgccgagggcggggcggaccaggcgngaccaggacgacg

SEQ ID NO: 93525 - DNA, 349 bp, Zea mays
  Clone ID: MRT4577_185281C.1
gtccggatcccggtcgcccacgcgtccgataagaaaagaaaaagaacaatagcgtattgtaaagagctcctggatgcataacatgtggctcaagatatggtgcgctatcaggcactccagtgggtattgcgagacgatcaatgacttgttgtggtatttgttgctaattcggaaaatgacacgggtttaaggggcggtcaaagggaaagcaacggagaagcttctttcgtcaagacgctggatcgagaccgtggaagctgtcattagaatatcggggaagggaattagagggttaaggacaatgcccttgaaacggctgacacggccaacgcgaggctggaggaggtta

SEQ ID NO: 93526 - DNA, 536 bp, Zea mays
  Clone ID: MRT4577_185282C.1
taccttctgatagagagagcatatgtcgatcatgaagggtggcaagaatgaagcggccgctgcgggggtggccatactgctggttctgcatgtcatggtagctccaccgacggtcatggtcgcccgctcgccgcgcggagccgagcaggatggctccctcgccacgacgcccaaggagaagatgctgtctgccacgctgtgctacacggtggagacatgcaaatacactccctgcttcactcctgcttgctcctgcagctttagggatcgcctctgctacataatatttactcctgatgcttgagatgaggtcattccgcgaagacacaactcttacatgcatgcggcgaacgacgacgacgacgctgtctctcgtgagcttcagtacgagtgatgcatgcttcaaagtatccatggatgctttacggatatgcgtattaattaaacgggtcagagaaccggacagaagggggaggtgttttatttacgtcttctggagatcgaatagaggggaaatatatgttagtgatgtgtac

SEQ ID NO: 93527 - DNA, 306 bp, Zea mays
  Clone ID: MRT4577_185283C.1
gagaatgttcccaaggagagggcgacaagccgctttagcgatcaacacgggtgcgcccggagcgttttggacagcgggccacggcgtactccgtggggcgcgtcggcggtggacgcctgcggggcgccgtcctccctcgaggcgtcgcgtgggagatgaccagcttcgactccgggacgcgcccaggctctccctgcaccgtggacgggcaggtatggagcagacggcggcgccagaactaggtcggccaccagctcctccgacgacctccggcgccgttggcaccgcgcggaagacaagcccacc

SEQ ID NO: 93528 - DNA, 159 bp, Zea mays
  Clone ID: MRT4577_185284C.1
tcgaccgcgtgctcaaaccggggggactctacgtctcctactagtgggggaggaccccgttgtaccgagccgaggaccccgaccacgttgagtgcatacacggcatctagcgcggcgacgcgctccctgggctacaccgtcaggacgtgatcgcgacca

SEQ ID NO: 93529 - DNA, 214 bp, Zea mays
  unsure (1)..(214): unsure at all n locations
  Clone ID: MRT4577_185285C.1
ggctttttgggntttggtcctgttcttcagtttgctggattatactatatatgacttatgattttgacttaaaaaaaaaaaagtcatctcgtctcaggttgcggccgaaccagagccccgtcccaactccaccacctctcttctctacggcacgagcaagggcggcgccggccgcggcgtcggcggcaaccggccctcgctctccccatctgtg

SEQ ID NO: 93530 - DNA, 314 bp, Zea mays
  Clone ID: MRT4577_185286C.1
cggacgcgtgggcggacgcgtgggggcgaactttgtgtacccgagtggggtggatcgtgttcaagaggcaattcgttcatctcgaagaaattgctgctaagggtgagaagactagcccacaattgcgacaacatacttccttaccaagaacaggtcgatgtgcacagatccttcttgcttggatgtaccttaaggctctcaggttttgagttgagcaatccttgttggcacaccatcaactggactgctcgcatactcagatatggtctactcatctttatttcgcttcggttttaagactactcactgggaaa

SEQ ID NO: 93531 - DNA, 1845 bp, Zea mays
  Clone ID: MRT4577_185287C.1
ccggccgggaagtactcacgagcagcagcgcttgcgaggctcaagcgccgcagcatgtctctggccccgtccatcccttccatcaaggtgaaggtggggcccgtctcggtggagcccccgcaccgcgcatgccgatccttcgcggcggacgggaagacgaagaagaacacagcggaagagctacgtgctatcatggcaaaaaaaaacaacattagtaagatgtctgtcgtcaagcaatcggttgctttgatgtgtgatagtaattgtaaagcaagagcgctacaacaagctgcccaagtgacagggacaatcgcagcaggtcagcaccagaatatctgaatgtgctgcgcccatgctgagttcctgaaaacctcacgaactgacctgaccgttaggagacaacacgttcctgggccctgtgttcgcggacggaaacttggcaccacacactcttatccacaacgagagcgtgggtgtgtgtcccaacattctccacgcgttccttccttccctccatctcctctctgttcatagcctcccaagaaacaagagccaaacagcgcttgcgaagctcaagcgccgcagcaatgtctctggccccgtccatcccttccatcaaggtgaaggtgggggccgtctcggtcgctcctccacaccgcgcatgccgatccttcgcggtgatcaggagctccaaggcagagggccccatccggagacctgcggcgcctccgctgtcgccaccgccaccgatgccacccaagacgccggctctgtccactcctcccaccctgtcgcagcctccgacgcccgtgaagcccgctgctccacccacgtcgtcgcagccgatgccaccttctcctgagcccaagccagttgacgccacagcccagatgcggaagccggtggctggggccatgacgctggagtaccagaggaaggtggccaaggacctgcaggagtacttcaagaagaagaagctggaggaggccgaccagggtccgttcttcgggttcttgcccaagaatgagatttccaacggaaggtacgtttgccccccttctcatgaaccgaacacttcaaaattccaagcatctgccaacagagacaccagcatgtctaggctgtagacaacacaaagaacttcacgtgtgctaggacgcctaggcggagtgacacgtgaccctgccgtgttcagtactgcctccctgtaacgatcgctgtttatcgctctttccagtacttttcgcctgttctggtgctcgcctgttctggtgctcgcctgttctggcgcactggagcgcaccagcctgatctagtgatgaccaaaagctgctatgttgggcagcccaaggacagtcatgaaaagacaacacctataaattagcaagccgaattaataaattcaattttaattttagatgctacaggtgtaagcttcgagtatttgacagatgcaattatttctttacaaattctatgggttgagggaaaatggaataatagttattgaatagtaaattcatgtcttaggagaaactcgaacagttattttatttgaatatatatatatataatttatatatatatatatataaaaatttatatatatatatatatatatatatatatatatatatatatatatatatatatatgacttaaataagagaaaggtaagaaacatgtacctagcatctggcaatgtggtatgacctgaaatgttaggaactggtgctaaaccaacctttcaaatcagttaccagtaatctccacaagaacacttcccatctttgaaatgatgaaatcggatagaatcccttaaaatgatttgccggctaatcatct

SEQ ID NO: 93532 - DNA, 185 bp, Zea mays
  unsure (1)..(185): unsure at all n locations
  Clone ID: MRT4577_185288C.1
tcatggacctgnnccngccgcccgatcgcncgttcccgtccgggactgggccatctccgaccagcccgtcaccgccgatgacctccgccagccgtcgccaaggtaggtgacttctctgaggacaaccgatctgggatcaatcactcgttgcaccggatcagcgctatccggaaccgaaagctcaa

SEQ ID NO: 93533 - DNA, 765 bp, Zea mays
  Clone ID: MRT4577_185289C.1
ccgggaaaggacagaggcaggcagcgaatcacaatggatgcgaactggacatacatggacagcttcctgacaacatggaatgagtgggagatccgcatgcttgtgctcaccagcctcgccctccaggtgttcctcctcttctccgccggcatccgcaagcgtaacgtctccgccgtgctgagcctgcttctatggttggcctacctgctcgcggactccatcgccatctacgcgctcgggtacctctcccagacgcgcgtgcccaagggcgtggacccacagtccttcgagcgcactcaccgcgtccaggccttctgggcaccgttcctcctcctccactcggcggccaggacaccatcaccgccttctccaccgaagacaacgagctctggaagcgccacctgctcagcctcctcacccaggtcgccctcgccgtgtatgtcttcgccaagtcgcaccctggcaacaatgtcctagcccccgccttgttcatgttcttgagtggtattgtcaagtacgccgagaggacatgggcgctcaagtgtgcgagcatggacaatctgcggagcagcatggtcacgacgccggatccgggccccaactacgccaagttcatggaggagtaccggttcacgcgtgactgcgtgaggcagggctcgaggcggagatcgtcatcgagcaggaacgtcgtgcgaagactgccgccggcgtgactgtggccgtcgcagagaagcagtgccctaccgacggtgatcaccgaagcga

SEQ ID NO: 93534 - DNA, 408 bp, Zea mays
  unsure (1)..(408): unsure at all n locations
  Clone ID: MRT4577_18528C.1
ttgaaaacacacttctgctactgaaggagaagcaggaggcggcagaggagcgaaggagaaggggagagcagaagaaccgagcatggctagtgctactccaatgcttggtcgtagcactgcacgcctgttcttcccctccttatccttctccttggcgctgttgctcctgtgctgcagtgccgtctgcaacgccgccggcaatgatgatgagtctacggncgttgcttgccatcaaggcgtcgttggtcgaccccttgggcaagctcgcgggctggaacccggcgtcggcgtcgtcgcactgtacctgggatggcgtgcgctgcaacgcgcgggacagcggttcgccggcctcaaccttgccggcatgaacctaagcggcaccatcccccacgccattcttggtcttac

SEQ ID NO: 93535 - DNA, 1074 bp, Zea mays
  unsure (1)..(1074): unsure at all n locations
  Clone ID: MRT4577_185290C.1
cattgggtacctcgaggccggccggggtgtgtgccggcaccttctccacgcgttccttccttccctccctccctccctcccctcccaagaaacagcaagagccagccagcgcttgcgaggctcaagcgccgcagcaatgtctctggccccgtccatcccttccatcaaggtgaaggtggggcccgtctcggtggcgcccccgcaccgcgcatgccgatccttcgcggtggtcaggagctccaaggcggagggccccatccggagacccgcggcgcccccgctgtcgccaccgccaaagacgccggctctgtccactcctcccaccctgtcgcagcctcccaagcccgctgctccacccacgtcgtcggagtcgacaccaccgtctcctcagccgaaggcggctgtggccacagcccccgcggcagcgctgcagaggccgctggctggggctgtgacgctggagtaccagaggaaggtggccaaggacctgcaagactacttcaagaagaagaagctggacgaggccgaccagggcccattctttgggttcgtgcccaagaatgagatttccaacggaaggtgggccatgtttgggtttgcagtagggatgctaacagagtacgcaacaggctcggattttgttcagcaattgaagatccttctctccaatttcggaattgtggacttggattaataatgccgggcttggtgttttcgttatgtataagtcttttaaatgtaatgtacttaattgatatggcatatagaaaattttatcttgcaccttgaaaaaaaaaaaatgaaaaaaactgacaaaagcatcccctgcaagatgcatcgaaatcatgaactacaaagccttttgaatagtccagtatggtttgtgatgagatttttcgtagtactttctactatttgaaggtttttgaaactgtctagcctgagcatttcagacagcatggtccttaatagcaatcaatcgatgagtcgatcaaacattgngcttgagattgattaatcagttggaaatgacatttttccaagtcatctggaaacagaccttgtgatgttact

SEQ ID NO: 93536 - DNA, 609 bp, Zea mays
  Clone ID: MRT4577_185291C.1
ctttccataaaaaataaaaaaaaaaaaaaaaaaaaaaaaaaaaaaaaaaaaaaaaaaaaaaaaaaccaaataataaagaaaaacaaaaaaaaaaatggacgaaagagaaagaaaaaacctgctgatgaagacagaaactcatgatagactccaacgacacatgatgagccccccacatcgactagaggagccgagacaggaggactccatcgccacgacaaccaagggtgacgatgttggccaccccgctgtgctacacggaaacagagatgaaaatacactcccggctgcactcctgcttgctcctgcacctttaatgatccccgctgctacgagttagttactcctgttgctggagttgaggctattccgcgaaacaacaacttttagatggatgcgacggccgacgacgacgacgctgcctctccagagcttgtgatctagtgaaggatgttgcaaggcatccgtggatgctttacaaatatgcgtattaattacccttgccgaggaaccggacagaggggggtgttgttttatttacgtctgctgcttgacaaataccggggaagtgtatgaaaaatgcgagagaaaaaaaaaaaaaagaggcca

SEQ ID NO: 93537 - DNA, 245 bp, Zea mays
  Clone ID: MRT4577_185292C.1
tcggtcataagtgttgcatgcgttaggctgctcgaacagagggtggctgccaaggcgaagtcatacatggatgatcgagtgcttgtgtagttatgaggaccatgtgccaacgactcccggcaacaaggtgaaggactgtgcgtacacctgcggttgacctggaagctagggttacagctgctgcctaggaccagaagctcgccaaggactttctcactgacaatggaggtgctggggtctattct

SEQ ID NO: 93538 - DNA, 3156 bp, Zea mays
  unsure (1)..(3156): unsure at all n locations
  Clone ID: MRT4577_185293C.1
aaagacttgaactagagtctcaaatcaaaattactttttttttgtcacatggtacattttatccaacagacatacacaccattttaccgagccgctagcccgctacaaatgaccagacatgcacacgacacaaaaaccagttcttctcgggaggaacctcgatcagttctgtaccaacagaactaaccaaaccgtctaaaagaggaaaaaggaacaaactgaacaaaaacctgcaacttctcagattatttctgcacaactggggaaaagagcttcggagtcagcgtcgatttgctatactgaaggagctgactttcattggcgtagcgacaacgagcggagcttcaggagagtcactcgtcgcaaacttctcgtgcatgaagcggctgtcgacgattgattcatccttgaggacaactttgtagcagtagcagctcttgaggccctgctgatcacggtagcactcatggttgctgtccttgacttgctgaaaattccaaatgacgctgaatttgccgactgtagcgacaaggtgcttttcctgctttccgttctccgttacccatgagaattgcccgccgtggaatttgttgtcggtcccggctaaaactgaatcaagtggagtgagcttcagaagccttggtgcagcaatcctattccccattcggccactaaacccagtcttttctttcccatctttgtccttgaagatagtgcatatcaagatcaagtatgtgtcagttgttcccagaatccatttcccatcataagtaacatctacatgtgtaatcggggacccaaggcctgggaatgctgtcttcgccatacgcatcgagctcttagaatagagtctgatcttgccatccacagaaccaacaacgattgaaccatccccagtacttgcaaagcactggaaattggtgccccgcgagaactgatgaccctgtgaccagttcagcactggtgagtctgatgagctaccgattgtctgcacccggcctctggcgtcgcgcatatcccatctacacaacctgttgtcatccaggcccaagaatgtcgacccggagggttccaactgcgctcccttgctgtcattggcaatgtctcgcattgtgatatcagctccatccttctcaaaccgccattctgcgacaaccttcccagtctcaacgtcaacatggtgaacaccattggaatgcagagcctctcctgggctcatcagtagcatgttagtctcgccgcgcatcagcagtgccttcttcggcgtcgaataagcgctcccactgccgccacggcctcccgagatcttcaccgacgcgcccttcccgtgcaagccgtggcggaagttcttgaccacctgtatcccggcgccgccgactaagaagctgttgtcaagcgccccaagcgcgaggctctggatgctgtcgccgtcgccggcctcctcctcgaactccttaagcaggtccttccctggtgctgcggcgggaggggtgaggctttcctccgcgtcggcccaaacagtgtcgtcggcctcggcaggccgcgcccacgcggcgaagtcggcgccgaacacctccttccgcccttcgtccgtggcctccactccgtacgtgttctcgaaaagacagcgctcgtactccaccctgaaccggcgcaattcggcgtcggtgggtagtcgcagagcccatacggacccgctcgcggcgaagtccgcccggcgctgcgcggggatcgtcttcagctggagcgccgagtccacgggcgcggagacccgcggccccggcccaacctctaggaaccacctgggggaggaggcgtcgtcgctcgactggtcgacgaatgcgtaggtcgcgcggcgctcggcgggcacccagcgcgcggaaggcgaggccccgccgacgtggaggtagagcttggcggcggtaggtctctggtacttgagatccagcgacctgagcttggcgtcgatggcctcaagcgaggaaggtgtggcggtgcggaggaggtcgtcgtcgcgctgccccgcgctcgctgcggcctccgcgatgggtgatcgggcgtcatagtcgtcctcgaattcctcctcttcgtcggaggaggtgagatcgacgtcctcgcggctgtgggagccgcccatgacggttgcggtggaggggaatttaactccggaattgcgagccggcgatccggggcgcggtgcgggaaaggagatcgtgaattggtgatggaggcggggaaagtgaggtcggagcggcggggagcgtgtatttgtacgctgcgggccggggattgctgatgagggcaggggatggtcggtgcgtgtggcggacgcgacgcgctccacgcgccggggacggcgaggccgagcaggttccttcgtgaagggggcgaactatttttttttttttttccggccggctcgaggtaccnaagcatcaaggaacatanaattcataggaagccagtttactagcaacggtcactatanagcaaagttttgaaatgcaaacgcagatgagcgcacttggctgtagtgttgaactcaactgcaaggtttaccatcacaggcaattagaagtgttcaaggtttacaggcaaatgatcaccaataacgaagtaatgatcactactacatagaatttttgcaatgcaaatgcccacgtcacagcactagcaatggaatgcacatgactgcactcggatagtgttgtacccaactgttgcaacattactacgcaataaatttgaaccgcaaattacccttgcaggcaataagaagtgtccaaggtgggatatttttttagaagtggtctttaagcaaggttattttcgccttctgagttgttgagactgctcctcaaggtttaagtacaacaactataacatgattctacaaatgtccttgtaggaacataattaccgcctcctactacacaccggtacttcttactaggtgcagagatcatgctgttaaaaatgaggacaaaacaatcacttcatactagttgttaccacttcgagataaaacaaatcacttcgagtaggcacgttcatatgcatagagaaaagggtgaacaagttctctcctctatacaaatcactggcatttaattggtacagagttacttgttgtgagaataattnnccattacaccg

SEQ ID NO: 93539 - DNA, 451 bp, Zea mays
  unsure (1)..(451): unsure at all n locations
  Clone ID: MRT4577_185294C.1
ttcttggnagcgtgggcggaagcgtgggcgggcgcgtgggcggacgcgtggngaaaaaaaaaaaaaaaaaaaaaaaaaaaaaaaaaaaaaaaaaaaaaaaaaaaaaaaaaaaaaaaaaaaaaaaaaaaaaaaaaaaaaaaaaaaaaaaaaaaaaaaaaaaaaaaaaaaaaaggggggcctttttaaaggatcaaggtttacttccccttttttgcaaattaatattttttttttagggccacttaaattaaattaattggccgggttttaaaaacttcgtaattggaaaaaccttgggtttaccaaatttaatggctttgaaaaaaatcccttttttccaatttgggttaaaagaaaaaaggccccaaccaattgttttttcaaaaattttcccaccttaaatggaaaatgggaccccccttttagggggaaattaaacacgggggttttg

SEQ ID NO: 93540 - DNA, 442 bp, Zea mays
  Clone ID: MRT4577_185295C.1
cggacgcgtgggcgagcagctgggccgaccgcacgcacgcgtacccactcagcggcgcaatggcggggcgccccctcacctctcgctcgtcggcggcggccggccgggatgcgtgagatcgcggcgccggatatcccgtttcctcactcgccgccgccgcccgccctttccgcttgccgctaccgccgctgcagcagccatgtcgtcgtcgtcgtccacggcagcgaacatctccgagcgtccgatctctccggacaccacccgcgtggcctgggtggggacgggcgtcatgggccagtcaatggccggccacctcctcgccgccggctacgctctcaccgtattcaaccggacggcatccaagacccagggcctcgtctcccgcggcgccagcctcgcggacagcccgcgccgaccccaccctcgccgccgaaatagccgc

SEQ ID NO: 93541 - DNA, 411 bp, Zea mays
  Clone ID: MRT4577_185296C.1
cactaaaagctagacccatttttcaacagcaatatggtgtagaattgaagaaaaacttaactcggaaggtgaatttatgatgtttggtggcttctctttttggagaaatgggttggaaattgttcttaaaaaatgagttgtgaccttaatttcataatggactacagaagccattaattcaaacgccacatacttgggcctcaaatatcaaaccgatgggaagtattaaaaaaacaaaacataaaatgttttaaaaacaaaattggacagaacattcattatggaacaaaataaattttgttaagtacaagaaaatgatattaacttttgaaatatactaactgactagcatttggccctgctatgcagggacaacattgttttaaattatatctgctacaactcttaact

SEQ ID NO: 93542 - DNA, 1435 bp, Zea mays
  Clone ID: MRT4577_185298C.1
gcacgagatggagccacagttgtagattgtcgtgacaaaataaataaaaagcatatatcaagtgaaattaaattcgttattttggaagtcaacatcagagagtttatgaagggtaactggggagctcagtaacccccctccatggtcatatgcgttgatggtgaatatccaatgaacagagcatctttcccctcataggaccccttcccttttaatttattccatttgtatcatagctcatgaaattatgatataaatggaataaattaaaagggaaggggtcctatgaactgtgtatactcttaatcaattatcccactcccgatcagcagctgatcgctcactcttgcagctcgatcattctttagctgctctagcctctagccctagctagtagctagccactcggtcgtgtagtcatcagccttctgatcgtcacccatggccactgccgagcctcctgcgttaataaccacggaggatgctaagattaatttgtactcgcgccgtgcgtgcacgtgtgcgcaggtccagaccccgaccgtcgtggcgaccgaggaagcgccggcggtggagaccccggctccgcccgccgtcgtgcccgaggaggctgcccccgccgccgaggccaaggtggaggagccagctgccccggcggagaccgagccagctgccgccgctgagcccgaggcggcccccgtggaggcggaggaagagacgccaaaggaggcggagccggagccggcggcggctggagaggtgaaggaggaagcggcagcgcccgctgccgagacagaagcagaaccagcagccgctgagcccgaggctgctgctgcggaggaggagcccgcggcggccgagccggccgctgaggagcccgagaaggccgagccggccgctgaggtggccgagaaggccagcgagtgaggccgtgcgccgtgcgcgcactgcggcggcggacagcgggtcgggagatcgatggctcagcgcgcgcgcgcctacatggcacgggcttgctgttcagtacaacgcgaacgtgacggtttctctccatctctgtgtgtgtgacagtgtgtcgtagctatagcagtggctgtcgcgtggactgcccggtgcggactgcgagtgacatgggctaaataaagtgtgcgtcgtctggtctggtggtggtagtggggcgcggtgccccatgtgtgccgctgcagcttgtgtctctgttttgcttcatgttctctgtctatctactctcatgtatggcagtttgggtgatcttctttatagatgcagccagttgttcatcggcaaaaaaaaaaaaaaaaaaaaaaaaaaaaaaaaaaaaaaaaaaaaaaaaaaaaaaaaaaaaaaaaaaaaaaaaaaaaaaaaaaaaaaaaaaaaaaaaaaaaaaaaaaaaaaaaaaaggggcggcgggttttaa

SEQ ID NO: 93543 - DNA, 513 bp, Zea mays
  Clone ID: MRT4577_185299C.1
cttccaatagaacttgctttacgtgcacaacataattagcgtcgcctgtgcatgttctacctcgagacatcctccagggggggttgactacacgaataccgcaccttgaacacctcaagaggacgagacatcactcaatgcttaatggtccaggaagtgctgccagtacaccatggaccactatgacatggatggggaagtactacctacaaagcaacggaaatacttacatagttacaagaaaggtagaaaatatgatcagccagcaccatgccttaactctgaggcaaggaactgcggccatcgaccaaaatacgacctaatttactctacgccgagctagatgaagataagaccttacccacactcacctcctcaagatcgatgaggaggaagacctgtctacatacaattaatacggaaagttgatgctaacaaaccaccacaagagacagcactaccacggtatggccaatgccgtctcaaggaattaagaaacgccctttcttatga

SEQ ID NO: 93544 - DNA, 571 bp, Zea mays
  Clone ID: MRT4577_18529C.1
aaaaaccccccgaataaaaaccacccggggaaagcaccaacaggggggaaaaaatcacaaatcttcaaaccaaaaaaccctaaaccaagggaaaaacccaaggggggaggacaccgaaagaggggggccaaaacccccctttgccaacaacaagcttggcaaagaggcccggggggtcttcaacgggggcaattgttggggccccggaccccccaaccctaaaaaaaaagggccccccgaaacccaaaaaaatctcaaccggggccagggaatctgccccgagcccaaaaaatttcgattccccgaaaacttcaatttggccagaaaaaacaagcggctttttcacaaacccacaaacctgggggggggaacccctcttggcagcgcaggaaacaggccccaaaagcattggttgccggcggaaaaaagggttccccctccccaacggggaaaaagccaaaaaatttggggggattgccctgaccgccccggcaaaagaaagggcggaaaaccccgcaaaggaggccatgggcctcaaacgggaggggagagggaaaaaccgaggggaggc

SEQ ID NO: 93545 - DNA, 407 bp, Zea mays
  Clone ID: MRT4577_1852C.1
gtgctataactgcgagcagtagcaggttacttgctcaaattaggcagtgcacgcgtatcaactactacacagggacgtgagggctacgagctgggctgttgatcgacacgggactgatcagggtgacacagaacaccgaaaagcgctcgcagcgtaaggctggcgacatgcgacgcgacaaacaggttgacctggccgtcaaggaacaagctcatgaagtcctcgccgtccacgggctcgttctcgatcaggaacggggcaagcctgtggaggatgtcgatgcgcggggagagtatctgcctggctgtagaggaggccttctccacgagtcccctaacctcggagtccacaacatacagtgtagcctagaggagcccttcgagcttgacatctgacgccccaagaaa

SEQ ID NO: 93546 - DNA, 481 bp, Zea mays
  Clone ID: MRT4577_185300C.1
ttatggggtttttttgtaataatatttggtatcccctagctgttacgaaaattaacgacgtaaccaaagccttcgattagggccacgcgaaatataagtaacatactcgggaaaaaacagggttaaggtaccagggactcgggggaaaagaaaacccccgccctaaaaatatccaaaaacgaaaaacgggggcggtaacaaatctaaaacacaaaaccccccaaaaaaaaagggggggcctttccccccaaaaaaaaaaagaagaccctctcccgacggagaaataaaaagggggaaaaacccttgaaaaacccccctaaaaaagggaaaactcctcccccccccgggggttaacacccacaaaaatcccccatattttatccccaaaaaaagtaaaaactttcaaaaaattggggaaacaccagaggggggggggaaaaccaccaagggacaaaccccccccaaaactaatagccccccc

SEQ ID NO: 93547 - DNA, 444 bp, Zea mays
  Clone ID: MRT4577_185301C.1
ggatgtcggatgatccttcccagaacaagggtccttgccctatggatatgccgggtacatcggtctgcttgctctcctagatcctcgacactcttcatgaagctttccagcttcttcttgatctcctccaccccaaatttcaccgcctcctcatcccgctctgcaaactctacgcagtctatcattgagctgatttcctcctccacccgtttgatgaggactttgatattctccaaatccttgatggcaatcaatgtgccaaactgcatttcgctcaccaccccctcctgtctgttgaccgcgtcctgacaccctttcagcaacgaatcaaaccacttccccatggatcccagcgggactgcagcagccgcggccaatgccgcagcgacaggcggggcagcgatgaccgcggcaacaatcgagcagatgagcacggccgcgaac

SEQ ID NO: 93548 - DNA, 387 bp, Zea mays
  Clone ID: MRT4577_185302C.1
cccactcgttctctcctgcgcagcgcaacatttacacgctaaggctggccgactacatcctggaacaggtcctgtaactactacgtaccatctgcattgcatgtccacgactatagcttctagtttagactttcaatcatactatcatcaaagcaaaggccttcctgccggcgtatttgctttgactcttgtacttcacgccattagatatctagcacttggtcactcttcttaattagttcgctttgcttttgaggttgattataccattttgatgcagcgtgaactgcatgcatggacatgcaacgctccaatggcctttgtaaagtgaaatgtttatccccattatctgcatttttcctatcaaaaatgaactggttctcatat

SEQ ID NO: 93549 - DNA, 207 bp, Zea mays
  Clone ID: MRT4577_185303C.1
gttatgcctgcgtattcagctagctacacccagggcgtactttaataagctccggtggggtctgctaacgttctataggtactcgcaccatgtctattgctccatttctgcagagactggcccctatcgtcgacagacgcaccgtttggtggcgctacggcgtcctcctcggtcaagtcgctcacaaagagtcgaaccctctcctga

SEQ ID NO: 93550 - DNA, 939 bp, Zea mays
  Clone ID: MRT4577_185304C.1
ggagaattttgatccggttcagatcgctcaggcatatgagaaaaacggagcagcatgccttagtgttcttacagatgaaaagtactttcagggaagtttttacaacttggaggctatacgcaatgctggagtccagtgccctcttctgtgcaaagagttcattattgatgcttggcaactttactatgcacggtccaagggtgcagatgctgttcttctaatagctgctgtattacctgaccgcgatatcaaatacatgttgaaaatttgcaaaatacttgggatggctgctttagttgaggttcatgacgaaagagaaatggaccgtgttttagggattgatggtgtacagctcatcggcatcaataaccgtaatctcgagacatttgaagttgatattacaaacacaaaaaagcttctggaaggtgaacgaggacaggttatagctcaaaaggatgtaattgttgtaggagaatctgcgctgttcactcctgatgatatttcgttcgttcaaaacgctggggtcaaagcggttctcgtcggggaatccctcatcaagcaggaggatccagggaaagcaatcgctgggcttttcggcaaagatatctcgcatgctggtgctacctagagacgacgcagaagagcaacagaataagccagaaacgctactccgggttgcatcattttgtgtaggggagaaaatcgagcgttgcaatcagaaatccaccctttcgcagagttttgatcggtcgttttgtttacctgacctgccaacttccccatgctgctatttttttgtgaccgagccatctcaataattacagattttagtgcacaagatgtatatgttcaaaaagttggatgtagttgcaagcagcttgatttttgccaaaaaaaaaaaaaaaaggccgcgattgcgccgccgactaggagctgtcg

SEQ ID NO: 93551 - DNA, 270 bp, Zea mays
  unsure (1)..(270): unsure at all n locations
  Clone ID: MRT4577_185305C.1
ctgaggaccggccggaattaatttccgggtcgacgagctttttcacggcggccgccctaaacnaaacacngnngggacttttaaaagaagaaagagggaccgaacaaagcaganggaaagggacaggccacagaaagcacaacaacagaaaagagacgacaagcaagggggaacagacacccaaacaaaaacagcggcagagccaacagacgcagcaggaagccgccaaacacgagggagacccaaaaaggggcgggaaaccacaaaccc

SEQ ID NO: 93552 - DNA, 903 bp, Zea mays
  Clone ID: MRT4577_185306C.1
tctttaagtggaggatggtccactgtagggcgttccgaagtgggtttgcggcctacttgtacgtggccaacagcttgatggacatgtatgccaagtgcggggatgtggagggtggtactaatgtgttcggtgccatcgtcaacaaggatctggtctcatggaacacgatgttgtttggatttgcaataaatggatgggccaacgaagcactggtggtgtacgacagcatgaaatcccatgaagtctgccccgatgaggtgacatttgcaggtttactcacagcctgtaaccactctggtcttctggagcatggggaaagcttcttcgagtcaatggtgtctgttcatggaattcagccaaagccagagcatctgtcttgcattcttgacatgtatgcaagatcagggaacattacaaaggctatggagatgttggatctttattcagaaacgattcgggcacataacagtgacatacgtgaagctctgcttagcgcatgctctttggaacacctgaatttcagggttgcgaggaaggcgatggaagacatggtagcgaccaagtctgcgggagacgtgggctatgtcatgctgtccaacttattctgtgccgctgggcagtggaaccaggctgagcaagtgcgaatagcaatggctgagcacggcatcaagaagacacctggttgtagctggatcgaagtccaaggtgctgttaaggtttttgcatcaggtgcacaagatcttgatcattcaggttctgtattggatgttattagcttgttggatgaagagatgacaaatagcatgtattttgatttgtagtcgtatgtataggtcatcagtcatcacagcgtcccgcactgtgagtgttattatttccaaatggaactttcttcgtttcccc

SEQ ID NO: 93553 - DNA, 158 bp, Zea mays
  Clone ID: MRT4577_185307C.1
atcacaaaccaccactattgtaaaatcccgggtgaccttagagagccaaagccacccctgggggcgacttgactttgcaatgcaccgggacacagaacacacacaccatcttcggagtaaagagcaatcctcttgcgtccccttctgttcgatcccca

SEQ ID NO: 93554 - DNA, 461 bp, Zea mays
  Clone ID: MRT4577_185308C.1
gggtacctcgaggccggccgggaccatgttcaatcagagggccggcaggaaggttctcttcgcacttcagagcagggttctaatctgaacccgtgcaagataccatgcgcacgaacatcgcagtggcatcacgaggaaccaagacactcagaaacgaatggtactctctaatattccatgatccagagtacatctgtacactgcaatgaacactaacgccgctgctgaagcgctactctgctacgtgctacctaagataacatgcgataatcatgctaagcccgccatatttccttgctagctacacttcatttccaggagcagatgctacttgcagccgttcaccatagaagaaaccaccttgctagtaacaaggtaacatcaatacaatggagacattaatggttacgccacaacagtagatgtcctgctcacagcagtgaagatgatgattccgatgg

SEQ ID NO: 93555 - DNA, 205 bp, Zea mays
  unsure (1)..(205): unsure at all n locations
  Clone ID: MRT4577_185309C.1
ccacgctcggttgccaaagaatccctcncctagccgccgccgcgtctctccctgagaggtgccgggaccgaggaatggccgagttcangtagagaaatcggttttgcttgtctcanacggggttgctgcgtctggtgtgtgaagggggagaaattcgtgagattgttccgaatcaggctgcaactcgggatnaggttccaanaca

SEQ ID NO: 93556 - DNA, 836 bp, Zea mays
  unsure (1)..(836): unsure at all n locations
  Clone ID: MRT4577_18530C.1
ctcgaggccggccgggttcccttcttcctctctctctctctctctctctctctctctctctctctctctctctctctctctctctctctctctctctctgctacctaacctcactgcacgcatcaggtattcagatcagatctccgaggttgagggcaagatcatcaaggcgcagatctgggacacggcaggccaggagcggtaccgggcgatcaccagcgcctactatcgcggggcgctgggcgcggtcctggtctatgacgtgagcaagcccaccaccttcgagaacatcagccggtggctcaaggagctacgcgaccacgccgactccaacaccaggatcatgctcgtcggcaacaagaccgacctgaggcacctccgggccgtcgccaccgacgacgctcggagcttcgctgaggcagaaggcctgtcctacatcgagacgtccgcgctggaggccaccaacgtggaggaggcgttccagctcatcctgggcgacatttaccgggccgtcagcaagaagcctgtggcgtccgacgaggttggcgccggccagggaggcgtcaaggaaggtaagaccatcgatgtggcgactggtgctgatgccgccgctcacaagaagcagtgctgctcggcttagaagttagaagaacccatgctggtggtctctcgttcagtggcgtatgtgttgttgtgatggttgncagatgttgttttttttctcttcttccagtccaaaagtttgttgattcgttttgccacatactacctttgttggagggataatcatgctcacatatatattctctacagcaagcagttatatatgattatac

SEQ ID NO: 93557 - DNA, 206 bp, Zea mays
  Clone ID: MRT4577_185310C.1
aagaacttgaaagtacaggtctgtacttcgaggcgggtttgaaagttcttgatggtgcggttcttcttagaaactcctaattttgacatttcaaggacaaggggggggagggcgggcaatgaaaaagtacttttggaaccggcaaattatgccatttttgggcttatgaatttgaaccgggccaaaaaatgggttcttggttgttt

SEQ ID NO: 93558 - DNA, 311 bp, Zea mays
  unsure (1)..(311): unsure at all n locations
  Clone ID: MRT4577_185311C.1
aaacactacccgacactagatcggctagnngnccgtcttcgncacaaananatagcgaggagaggagaggaggagagaccgagacgagccgagccgagcggagggagagagganngggangccacattccacgggagcccggagagcagggttcgcgggtgccggagcggaacatagacgatctgccgtggaacgacgccaactacacggcgctcacgccgatctggttactggagggcgcggtgctggcgcatacgggcagggcactacggggtgcacggacccgtgcgctacatgtgggctgacaccta

SEQ ID NO: 93559 - DNA, 195 bp, Zea mays
  unsure (1)..(195): unsure at all n locations
  Clone ID: MRT4577_185312C.1
cacaccgtcttctaccttggtccgtctcctttctattttttgggcaacngaaggagaccatatggaccaggggcaaggcatcggcatccataaaaaaccgaaggctggataatggaccctccaccgaccccgggggaccctccgattcttggagcgccgggaaatacaacagatcgagcaccatgcacgcattta

SEQ ID NO: 93560 - DNA, 613 bp, Zea mays
  Clone ID: MRT4577_185313C.1
tttttttttttttttttcggaaatgccatttcgtatatgaacagaattaccgtacactatgcactatagttagtgaccgatcgatatactacgtataacttccagcaatataatatttatagctagctaggtccaaggtatacctagctttattttgtatatatctatatgtatgtatagacatttgttcgcgcagtttattgctgcagtagtatttgctgatggcctatgcctgggctcggcaccgacccgtccggcacctgcgtcgacgtcgtcgtcgtcgtcccccaacgcttggcgacggcggtagtcgtctcagcatcgctggaaggcggtgccatatctcttgtcgtcgattcttgggaagctgcggggctcggtaaggtctctttgacgtgcgcttgatgatgtgcagcttgtgcatgccggcggtcagtaggcggcgccgccaccctagtagcctgtagccatggacgatgacgctgtcaacaagagaagcacgaacacacctgttttgtgtgaggaattagccatgagaactctcaaagagacagagacgactactagctagctagttacacttgtgctacctagctagtgagagacgaatgtg

SEQ ID NO: 93561 - DNA, 244 bp, Zea mays
  Clone ID: MRT4577_185314C.1
agcatcccacagaaggcggcttcgtactcttctacctccgcggctcaaacctttcccccttctcccaaatccttccgccggccggcgctccctccgggccaagaccccatgaaggaaggcatttgtgtccacatccggcagggcggtgtcctagtcggaaacccctgctgggacgggaactggcctcggcacggacttcaagctgaggggtagatggcccgtcaccaggcccttggcggggggg

SEQ ID NO: 93562 - DNA, 562 bp, Zea mays
  Clone ID: MRT4577_185315C.1
attcggctcgaggaaccttggcgagatgatgacgctcggtagaaatgatgccgcggtaacagcaagtttcattgaagggctgaccttggaaggacctctcggacatgctgctcggaagctcgtgtactgcctcagaatgcccacggatgagcaccgggtgaaggttgggatcagctggttcacaaaggctgcgatcgattcgcttgcctccgtgcaaaacgcggtaagtaacacgctcacaggctcatcatgactgtacgggttcttaggtgtatattgcctgcctgaacggaatgaaatggaggacaaatcgatgtccatcttatgtacgtaatcgaggttcttctcgactagtgtgtaccatactttttaatcatgctgctatgttcctacggtacaagagcagtgatgatttatgtaaaaacacgtgtggctatgctgatgactggcgtgaagggcttctagttgggttggttacgtgttttaagtccgggttcagtccgggttcggctttccgtgggatcaaattctatgtcgtggtaaaaaaatctctcatttattc

SEQ ID NO: 93563 - DNA, 201 bp, Zea mays
  Clone ID: MRT4577_185316C.1
ggggcgctaagcctgtcgccgatcgaccgctccacattgctaacgagctcagcagtgaccacaacgctacatgccgacgacatcgatctcggtcattagagtacttccgacgagaatgatcatgtcggcactagtagtaccaggagtagtgatgctgtgtcaagtcatctcatatggattatcattgtcggcgctgatggt

SEQ ID NO: 93564 - DNA, 419 bp, Zea mays
  Clone ID: MRT4577_185317C.1
agtgggataggctctcctatgtggcctatccgggatcctcgtcgtggcggtggtcgtcagtgtggtcggcaacgtcacccgctccggcagaaatgccggcgacaacttcacggtcccgatggaggcttcgcttgacacgtccggcaagtcagtcaagtccctgtgcgcgctcagcctatactaggagtcgtgcgataagagactgtcccaggccaccaatcggaccgacaaccgcaatgaggtgttccagatcctggacaaggtggaactgcgctcagtccagacggaggtcgagcagtcgacgtctatcagctaggccaaggctaccgactcgatgaccgacagcgcacgcgaggactgcaataagctcctgtaggatgctgccgacgacctgatgggcatgctcgagatggccggcg

SEQ ID NO: 93565 - DNA, 236 bp, Zea mays
  Clone ID: MRT4577_185318C.1
tagctcacgcgatcgcccacccatccgtatcccggtagactaggtgaggcgaggacaggttgcccaccagcttctggtattggtgcccttcaaattccattatcaccaaatcatggggcgcgctatcccaactcccagctactagcaccccaagatctaccgactgaagaaaccacccaccaacaaaggccatcccaagagcaagttcggatgctttctgaggccaccataggagg

SEQ ID NO: 93566 - DNA, 322 bp, Zea mays
  Clone ID: MRT4577_185319C.1
ttttccaaagactcatcacacacaaggacgacaagatttagctgctgatcctacatatgggcaacagggtcggcatgcgggagccatgagcaccttggagtggggcgagagagaaggcgcacgcaggacatcgtgggctgaggcgggagctttgatctggagaggaggcacgaattcgtctgtggagaaccggcacggccgcagaacatcgtcgcatagattgcagtgtgaatcggcatacatgccacgagataaccgcgcaagcgatggacgcaatcaatgcgacacctgcatctgaacgtcaacaatctctttagagaag

SEQ ID NO: 93567 - DNA, 338 bp, Zea mays
  Clone ID: MRT4577_18531C.1
cttgcggggcccccggggccccctgggttcttttaagggggccccccttcccccccgaagggacaggggggcacccggccagaccaaaacccaggggcaccggaaaaaaggaaacgggctggttgggaaaagggcacggcaaaaacccatcctaagggtaacctacagaaacccgggtaccaaggaaacgatccccaaaaacaaaaagggaaaggggctactcgggacaagggggggcgaaaaacccatcccacaaaaaaaaacacaaaaaagtggcaaggacccaagaaaaaaaaagcgaccaaaagataccagacaacccaaaaaagctgtcaaaa

SEQ ID NO: 93568 - DNA, 1260 bp, Zea mays
  Clone ID: MRT4577_185320C.1
gggtacctcgaggccggccgggcccgtgttggcctggcagcacgacctcatcacggcacggcgtccttaagcttcccttccggcctgccgccgcctcccacccgcgatctccgcgaccgcaagcagctcggcaggcaggcctccaccgctccaccacctccactcggtctacgtgctccgtcaccaaacccacccgggccaacgccgaagcaacccctccctccgtcctccccagatccggcgccgcctccgccctcacttacactagcacgcacggcggacacgtcgcctcccccgcgcgatctgatgcaggcgcacgcggtggccagcggcgatgcggtggaagcttaactcctccgtctacaagcgcgtgccgtccagggaaaccgccatggaacccgacgtcgagacgccaatgagaatgacggacggcggcggcagcggcgcggggccgtcgtggcgcatgtcgttgccgcatgtctgtgtcgccacgctcacctcgttcctctttggataccactccggggtggtgaacgagcccttggaggtcatctccgctgaccttggcttcgccggcaacactcttgctgaagggctcgtggtgagtatctgtttgggaggagcttttgttgggtgcctcttcagcggctccatcgcagatggtattgggcgacgccgtgcgttccagctcagtgcgctgcctatgattattggtgctgccataagtgctctcaccaatagtttggagggtatgctccttggaagatttttggtaggaacagggatgggattgggtccaccagtagcttcactttatataacggaggtttctccttctacagtgaggggtacatatggtagctttgttcagattgcaacctgccttggaattatagtatcactactcattggtacacctgtcaaagatattgatagatggtggagagtgtgtttctgggttgccgttatcccagcaactttacaagctctcggtatggagttttgtgctgagagccctcagtggctttataagtgtggaaaaataagtgaagcagagatgcaatttgaaaagcttttaggtccccttcatgtaaaatctgccatggcagaactttctagatatgaaagagtagatgatggagaaagtgtcaagtactcagagttgttctatggtcgccacttcaatgttgtttttattggcacaacgctctttgctttacaacagttatccggcataaattctgtgttctatttctcatc

SEQ ID NO: 93569 - DNA, 311 bp, Zea mays
  Clone ID: MRT4577_185321C.1
gcagctggctccaaactgcttgccaacatggtgtatcagtacaaaggcatggggctgtccatgggcaccatgatctgtggctgggataagagaggccctggcctctactacgtggacagtgaagggaaccggatttcaggggccaccttctctgtaggttctggctctgtgtatgcatatggggtcatggatcggggctattcctatgacctggaagtggagcaggcctatgatctggcccgtcgagccatctaccaagccacctacagagatgcctactcaggaggtgcagtcaacctctaccacgtgcg

SEQ ID NO: 93570 - DNA, 409 bp, Zea mays
  unsure (1)..(409): unsure at all n locations
  Clone ID: MRT4577_185322C.1
gccgagggnngctgcttcccgcgtttccttcgcagggccacgtcgccgggatctgcagagagagaaagagagagtccatgaaactccacaggaaacctccatccattcatccgcctgggcggcggagtgacgacctgtgctatcgcttcttggacttgcacacgaaagcagcgggagcaagggaacgcagtgcgtcaccgttttcgcgacttgactgggcgtacacggataaagaagggcgatacggcacctcatctcttcccgaatctcaaggacttggggtggctttcttcggagggcatgctctacagcggagaagcctggggcgccttgaatgctgagcttgggcacattctccctggggcttatgaacttgagaatgtgggtgaggtgctccacgggcacgatc

SEQ ID NO: 93571 - DNA, 3100 bp, Zea mays
  Clone ID: MRT4577_185323C.1
ggcttgctgcgtgtcacccccgtgttggcctggcagcacgacctcatcacggcacggcgtccttaagcttcccttccggccttcccccacctccgacccgcgatctccgcgaccgcaagcagctcggcaggcaggcctccaccgctccaccacctccactcggtctacgtgctccgtcaccaaacccacccgggccaacgccgaagcaaccccccctccgtcctccccagatccggcgccgcctccgccctcacttacactagcacgcacggcggacacgtcgcctcccccgcgcgatctgatgcaggcgcacgcggtggccagcggcgatgcggtggaagcttaactcctccgtctacaagcgcgtgccgtccagggaaaccgccatggaacccgacgtcgagacgccaatgagaatgacggacggcggcggcagcggcgcggggccgtcgtggcgcatgtcgttgccgcatgtctgtgtcgccacgctcacctcgttcctctttggataccactccggggtggtgaacgagcccttggaggtcatctccgctgaccttggcttcgccggcaacactcttgctgaagggctcgtggtgagtatctgtttgggaggagcttttgttgggtgcctcttcagcggctccatcgcagatggtattgggcgacgccgtgcgttccagctcagtgcgctgcctatgattattggtgctgccataagtgctctctccaatagtttggagggtatgctccttggaagattttttggtacgaacagggatgggattgggtccaccagtagcttcactttatataacggaggtttctccttctacagtgaggggtacatatggtagctttgttctcattgactcttgcccctgtatctccgggtcactactgcaaccggacgcgtgggaattatttttatggtctaatagcctgtggaattgctgaaacattgacttttttgactggaacaagtggtgttctcctgactggttgctggtctattggtgcttctgtagaattgaaaagttgaattgtgggtaaagtatctacatatgtttttaccagcacacggcttgagtcatccatgaattaatcattatgttttgcaatttaactttattaagacttaggagatgaaccatgaatatgatagtcctgacagctgtgttaggctacttcatatgaggtacgtggagtctacttgtcatggtatcatgtgggcacaggagctcctcgtccagccaaagaaacaatacattttttcttattaaaaaaagtaccgaacaatgctgttatgtaaaacagcagcagtcggttaaaatcgaacctcttcgaagcaaactgtgcaggaatgtttaatgatcataatgtgatggtcctgtaagaatcggcagttgttccaaatatgggttaaacttagtttaccgtacattgtcatgtggttgtgggcactgtgaaagctcttggccactcacagaagccctagaataagaatattgctaatgatgagaagtaactaaaacaatatcatacaattgcagtgctctccaatagtttggaggtagctcttggaaattttggtaggaacagggatgggattgggtccaccagtagcttcactttatataacggaggtttctccttctacagtgaggggtacatatggtagctttgttcagattgcaacctgccttggaattatagtatcactactcattggtacacctgtcaaagatattgatagatggtggagagtgtgtttctgggttgccgttatcccagcaactttacaagctctcggtatggagttttgtgctgagagccctcagtggctttataagtgtggaaaaataagtgaagcagagatgcaatttgaaaagcttttaggtccccttcatgtaaaatctgccatggcagaactttctagatatgaaagagtagatgatggagaaagtgtcaagtactcagagttgttctatggtcgccacttcaatgttgtttttattggcacaacgctctttgctttacaacagttatccggcataaattctgtgttctatttctcatcaactgtattcagaagtgtgggggtgccctctaaccttgccaacatatgcatggggatttctaatctatcaggatcaattgtagcaatgcttctaatggacaagctaggtagaaaagtgcttctttcagggagttttcttgggatggcttttgcaatggggcttcaggctgttggagcaaaccgtcagtatcttggttctgcatgtgtatatctttcagttggtggcattctgttgtttgtcttgtcattttcactaggagcaggccctgtcccaggacttcttttgcctgagattttccctaataaaatccgagctaaggctatggctctctgcatgtctgtacattggatcgtgaacttctttgttagtttgatgttcttgcgtcttctggagcaacttggtccacagcttctctacacaatattttcgtcagtctgtgtggtagcctcaatatttgtgaggcgccatgtgttggagacgaagggaaagactttacaagagatagaggtttcactcctgcaaccacaataaaggtacatatttgacgtggctggaaccttgggcaggctgtttgctgaacagaaacaagctggccctgcagaagttgattcctgaagtcatcggcaacgccctacaaatggtctcagggaagttccagatatgcgcctgcgacagctagggcggtgtttccatagagcatcatgtactgaagttatgcctgtatcgcccgccctagataggatattttcatacttgtgttgtcatctgttctatctatgagtcgtaatatcagaaaaaaaaggtactactgttttaccgttgatgagcacagttgaaaaaaggaactatcatcttcattttacatgtatgtactcagtaaccatactccgaataataacactgcatggagattccttgttagaaaaaaaaaaaaaaaaaaaaaaaaaaaaaaaaaaaaaaaaaaaaaaaaaaaaaaaggggggggccgttttgaaggatccaagttaacttacccgtgc

SEQ ID NO: 93572 - DNA, 572 bp, Zea mays
  Clone ID: MRT4577_185324C.1
cttcctgctccgctctctcgcgtccacctgcgcagacggcggccgtgcctcctcgagctctcttcgtccccacgcgatgtctgcggcggccgggccggtgtacgaggcggacgcggaggcggtggtccggcgaatcacgccgccgctcgaccgcgcaaggcacaagggtcaggcagggaagatagcaataattggtggatgtcgcgagtacactggtgctccttactttgccgctatctctgcattgaaagttggtgcagatctctcacatgttttctgcacaaaagatgctgcaacagtaatcaagagctatagccctgagttgattgtgcatccaatattagaggagtcctacagcgtaagggatgatgaaagagaatctgtttcttctagcattctcactgaagttataaagtgggtggagcgctttgattgcattgttgttggccccggccttggaagggactcatttcttatggattgtgtcagtaatataatgaggcatgcacgacaggctaatatcccaattgtcgttgatggggatggccttttccttataaccaataacattg

SEQ ID NO: 93573 - DNA, 867 bp, Zea mays
  Clone ID: MRT4577_185325C.1
cattgggtacctcgaggccggccgggtgggtacctcgaggccaaaaaaaaaagcgccttcttcccggactctccccagcatctcgctccatgacaaatcccaccgcgggtagatcacagcacgccatgccgcttcacgcgcgcgtgcgcgcagctagttagctagcgaacaaacccagcagaaacagacgccgccgccgacaacaagcgatctagaagagcacaggaaggagcaaggtgttgctgaggaaggcgacaatggccgcggagcaggttcagctgtgcatctccgccgacagcggcggcggcgaaagcaagcgtgacgccatgccggtggcggtggccgtgtccctgtgcctcctccacgacgcgttaggcgtcgcgctgttcctcgcctcccacccgctccacaccgtctacctcctcttcttcgcgcgcggcctcctcaccctggcggccttcttctgtccgctcctcgtctccacgtcgctcctcctcgctgtgttcgtcaccgtcgggccgtacgtcggcggcgccgactggtccggggtcaagtccctcggtaggacctgcggcattgccgtcgcagcactctgcgccgagctccggcccgacggtgctccagcggggcttgtcgcgcagctgtgctccttcgtccttggtcccaccgacgctgcctcccttctccgcgtcgaggagatcatgggtgttacagcttcttgctttgtgtctgaggaggagcagagcttgttgttaattggtgagcctgcatttgcgctcccagtaatagattacatttctgacagaagcatcttggattttgagagttttggtgatttgaaggacaaaattgacgaaaagttgtgat

SEQ ID NO: 93574 - DNA, 1787 bp, Zea mays
  Clone ID: MRT4577_185326C.1
aacaggcagcaagagctgcagatacccctaatttctcttctgaagtgccagaagggaaaggtaagaatgatgactttaagggaaaggacttggagataggtggccctagaaatttatatatggatcaccaatcttccccaaatgagagacccatcaaagcagcagatcatgaaaacaactccaaggagtcaatgatagaaaatttagaggagccaactgttcgagctgctgacctaattggttcaatggccaaaaacatggatacccaacaggcagcaagagctgcagaagatacccctaatttctcttccaaagtgccagaagggaaagtcaatgacgatgaacagcggaatagtgcattaaggcgatcgaatctctcggcttttacaaggtgcaaaacataatatcagtgtcattagtgagttatgaaagcaacagtatgttgggtactaacagttaccacttttattgcaaggtaccatacatctgcggcttccaatcaaggtgggacaggattggtaggtagctgttcgccgcatgataacagctcggaggctgtgaaaacggattctacttacaacatgaagtcaaattcagatgctgccgcaataaaacaaggctccaacggcagtagcaataacaatgacatgggttccactacaaaggatgttgtgacaaaacccagcacaaataacgagagggtgatgttgccctctgctattaaggctaatggatacacgtcaacattccatcctgtgcagcagtggatggttccagataatgcgacagcagggaaagcgaaggctgatgaagtggccaacaatgcaggcagaaatagtcatcctggtgacgtgcagagcaacctgacgcaacaacatcgtccaacccttcattacgtccattttgagaatagtggatcaggtgccctgcaatgtggttcctccaatgtatttgatcccccacttgaaggccaggctaccaataactatggtgtgaaagccgggagcaactcaggcagcaacaaggggcagaataatgggagtacagctggtgcgagcacggctgctgcaaatgctggacggacagatacagagatacgggctatcgataaaagtggacctggaggtggcagtgggagtggcaatgacacatatgtcagacggcttgctgcgagcatgacaccacgacaagaacagctaaagaaatatagagagaaaaagaaagatcggaactttgggaaaaaggtagcctgttttcaattgcatattaatatttattctttatttgttttcaattgcatatgtttaagaagagagagcattggatagaaggactggtttctttctgatggctgtctgccatttccaggtgcggtaccagagcagaaagaggctagccgaccagcggccaagggttcgtggacagttcgtgaagcaagctgtgcaaaatcaagagggagatggagagagatgacccccccccccctctggcttcagctcatggttgttagacgtggcggttgatgattcttccttctctggtgtgatctgatatgatcgacaacacaccatccttccttttcttcattggtttcttcacatctagaatttactgcctgaccgggaaaaaataagctaggaacttctatacatgtgtatgcatttctaatcatgtagaagaataagtgtgtcttgactctagataattttaggtagagtcatgctcgctctcctacattatgtgatgtaactgaagtgttgttgtgttgtcatgtatggtcttggatc

SEQ ID NO: 93575 - DNA, 3011 bp, Zea mays
  Clone ID: MRT4577_185327C.1
cactttttgcctttttcggaggccacgggtcaccgctaacctccatccatccatttgccgattcacctacacagcaggaacaaacgaggagccctccaaggatatgcgccccgccgcttatacattaaccaaagacttgcctccaatcaatcccaccactcgtgtctacctcttcgagttgcgaggatgcctgcgaatgaccaccatcccaacggcctgctccaggagtcagcccctggactccagcatgatgatatggaaaaccagcagcagcaagtctgctgggagcgcttcctcctaaaggacactctcaacgtcttgcttgtggagagtgatgattcaaccaggcaggtcgtcagtgccctgcttcgttgctgcatgtaccaagttatctctgccgaaaatggccagcaagcatgggcttatcttgaagataagagaaacaacatagatcttgttttgactgaggtttttatgcccggtgtatctggtatttctctgctgagtagaatcatgagccacaatatttgcaagaacattccagtgattatgatgtcttcgagtgatgctatgagtacagtctttaaatgtttgtcaaaaggtgctgttgactttttagtcaagcctatacgtaagaatgaacttaagaaccagtggcagcataattgaagacaacatcgtcacattctctcttgcgtgttcgagaaaaaaaaaatgttttcttatttggaacacagtcttgaggtagtggaagaaaaagtggcaatcagacgatgcagttctctcttaattatattaatagctaaaaatgttctcacagtggaagcccggtggaagaagctagtaagagacccaatgcaagtaacgagtgtgagagtattaataataatcaacagacgaactcattatgaaattacgtagtgcagatcgactgtccacaagctatatctctggaccagttatccgattcagccactaggaccggtgcaccagtaatccactcaaagtcagagatatgtagccacagatggctaccaggtagcagcaacagaaactgcaagaagcaaaaatacactaatgatgactttaagggaaaagacttggagatagatggtcctggaaatctatatatggatcaccaatcttccccaaatgagagacccatcaaagcagcagatcatgaaaacaattccaaggagtcaatgatgggaaatttaggggatgcaactgttcgagctgctgacctaattggttcaatggccaaaaacatggatgcccaacaggcagcaagagctgcagatacccctaatttctcttctgaagtgccagaagggaaaggtaagaatgatgactttaagggaaaggacttggagataggtggccctagaaatttatatatggatcaccaatcttccccaaatgagagacccatcaaagcagcagatcatgaaaacaactccaaggagtcaatgatagaaaatttagaggagccaactgttcgagctgctgacctaattggttcaatggccaaaaacatggatacccaacaggcagcaagagctgcagaagatacccctaatttctcttccaaagtgccagaagggaaaggtaagaatgaccagcatgataattatgttttgccatcacttgagctgagtttgaagaggtcgagatcatgtggagatggtgccaacgatacagtcaatgacgatgaacagcggaatagtgcattaaggcgatcgaatctctcggcttttacaaggtaccatacatctgcggcttccaatcaaggtgggacaggattggtaggtagctgttcgccgcatgataacagctcggaggctgtgaaaacggattctacttacaacatgaagtcaaattcagatgctgccgcaataaaacaaggctccaacggcagtagcaataacaatgacatgggttccactacaaaggatgttgtgacaaaacccagcacaaataacgagagggtgatgttgccctctgctattaaggctaatggatacacgtcaacattccatcctgtgcagcagtggatggttccagataatgcgacagcagggaaagcgaaggctgatgaagtggccaacaatgcaggcagaaatagtcatcctggtgacgtgcagagcaacctgacgcaacaacatcgtccaacccttcattacgtccattttgagaatagtggatcaggtgccctgcaatgtggttcctccaatgtatttgatcccccacttgaaggccaggctaccaataactatggtgtgaaagccgggagcaactcaggcagcaacaaggggcagaataatgggagtacagctggtgcgagcacggctgctgcaaatgctggacggacagatacagagatacgggctatcgataaaagtggacctggaggtggcagtgggagtggcaatgacacatatgtcagacggcttgctgcgagcatgacaccacgacaagaacagctaaagaaatatagagagaaaaagaaagatcggaactttgggaaaaaggtgcggtaccagagcagaaagaggctagccgaccagcggccaagggttcgtggacagttcgtgaagcaagctgtgcaaaatcaagagggagatggagagagatgacccccccccccctctggcttcagctcatggttgttagacgtggcggttgatgattcttccttctctggtgtgatctgatatgatcgacaacacaccatccttccttttcttcattggtttcttcacatctagaatttactgcctgaccgggaaaaaataagctaggaacttctatacatgtgtatgcatttctaatcatgtagaagaataagtgtgtcttgactctagataattttaggtagagtcatgctcgctctcctacattatgtgatgtaactgaagtgttgttgtgttgtcatgtatggtcttggatcactttctgtcaatatattactagcccacaactactattaatttgatgagatgtatataatt

SEQ ID NO: 93576 - DNA, 2705 bp, Zea mays
  Clone ID: MRT4577_185328C.1
cactttttgcctttttcggaggccacgggtcaccgctaacctccatccatccatttgccgattcacctacacagcaggaacaaacgaggagccctccaaggatatgcgccccgccgcttatacattaaccaaagacttgcctccaatcaatcccaccactcgtgtctacctcttcgagttgcgaggatgcctgcgaatgaccaccatcccaacggcctgctccaggagtcagcccctggactccagcatgatgatatggaaaaccagcagcagcaagtctgctgggagcgcttcctcctaaaggacactctcaacgtcttgctcgtggagagtgatgcttcaaccaggcaggttgtcagtgccctgcttcgttgctgcatgtaccaagttatctctgccaaaaatggccagcaagcatggagttatcttgaagataagggaaacaacatagatcttgttttgactgaggtttttatgcccggtgtatctgggatttctctgctgaataggatcatgagacacagtgttttcaagaatattccagtgattatgatgtcttcgagtgatgatatgagtacagtctttaaatgtctgtcaaaaggtgctgttgactttttggtcaagcctatacgtaagaatgaacttaagaacctttggcagcatgtatggagacaacggtgtcacagctccagtggtagtggaagtgaaagtggcattcagacccagaagtgtgccaaatcaaaaggtgtcaatgaatccggtaacaacagtggtagcaacgatgacgaagcaggcatgggacttaatgcaagggatgacagtgataatggcagtggcactcaagcacagaacttgtggactaagcttgctgtggagatcgacagtccacaagctacgtctctggatcagttagccgatccacccaatagtacctgtgcgcaagtaatccactcaaagtcagagatatgtagcaacagatggctaccagataagagcaacagaaactgcaagaagccaaaaaacactaatgatgactttaagggaaaggacctggagataggtggccctgaaaatttatatatgggtcaccaatcttccccaaatgggagatccatcaaagcagcagaccatgaaaacaattcaaaggaatcaatgatggaaaatttagaggagccaactgttcgagctgctgacctaattggttcaatggccaaaaacatggatacccaacaggcagcaagagctgcagaagatacccctaatttctcttccaaagtgccagaagggaaaggtaagaataaccagaatgataagtatgttttgccatcacttgagctgagtttaaagaggtcgagatcatgtggagatggtgccaacaacaaaaatacagtcaaagacgacgaacaacggaattgtgtattaagacgatcaaatctgtcggcttttacaaggtaccacacatctgcggcttccaatcaaggtgggacaggattggtaggtagctgttcgccgcatgataacagctcggaggctgtgaaaacggattctacctacaacatgaagtcaaattcagatgctgccccgataaaacaaggctccaacggcagtagcaatgacaatgacatgggttccactacgaaggatgttgtgacaaaacccatgttgccctctgctattaaggctaatggatacacatcagcgttccatcctgtgcagcagtggatggttccagctaatgcaacagcagggaaaacgaaggctgatgaaaatacagccagaaatcactacgtccattttgagaatggtgggtcaggagccctgcaatgtggttcctccaacgtatttgatcccccacttgaaggccaagctaccaataactatggtggtgtgaaagccgggagcaactcaggcagcaacaaggggcagaacaatgggagtacggctgctgcaaatgctggactggcagaaacggagatacaggccatggacaaaagtggagttggaggtggcaatggcaatgggagtggcagtggcagtggcaatgacacatatgtcagacggcttgctgcgaacatgacaccgcgacaagcacagctaaagaaatatagagagaaaaagaaagaccggaactttgggaagaaggtgcggtaccagagcagaaagaggctagccgaccagcggccacgggttcgtggacagttcgtcaagcaagctgtgcaaaatcaggacggagctagagagagatgaccgacatcccccctcccctgtggctgtgctgctctctggcttcagctccctactgactccgactccacctctgctggcatgcatggttgccgctttggactcaaaacacttgacagttagacgtgcggttgatgattcttccttctctcgtggtgtggactgatatggtcaacaacacagcctccttccttttcatcattggtttcttcacatctagaatctactgcctgaccgggaaagaataaacaaggaacttcttcttctatacatgtgtatgtatgtatgcattcctaagcatgtaatgtagaagaataagtgcgtggcttgactctagatggactttaattttagacagagtcttgctcgctctcctacatcatctagtgtaactaaagtgttgtcatgtatggtcttggatcactgtctatcaatatattatatcgtggcgttccttgata

SEQ ID NO: 93577 - DNA, 408 bp, Zea mays
  Clone ID: MRT4577_185329C.1
gacccgcagggacacccgccggcggcggcttttgttacggttctggcgcttttctcacgccgccggggccgcccggagcagggccacgcagaaggagaaggccccgccgacatcgtacaagccgggcaagcacggaggcaggaagcagaacaggaagaaccggagcacgggcaagcacaaggagaaggcgcacaacgctgggctgcgggaccagcccacctacgataagctgctctccgaggtgcccaaggacaagcagatcaccccatccatactatctgagcgcgctagggataatggatcctagccacggaaggccatcaaggaactgaaggccaaggggctccaaaggaaggcatctgttcaaggtagccagcagacatacaccacggcgaccaacacatgagg

SEQ ID NO: 93578 - DNA, 518 bp, Zea mays
  Clone ID: MRT4577_18532C.1
taggggccttttttttttttttaattgacaaactagaaccttttttcttgtaaatgatgaagtgaacaagtgtaaaaataataattagaaaattaagtgacacacattggaataattgaaacgacttggcagtcaaataggacacacaaattcatcagtcatccctggatcaatcagcactcgacagaaacatgcaagcacacacggtgtatttacgtgagctatcaggcggtggaatctgccgaccccttggctagctcgctcttgttcttgaactccttccaggcgtccacggcggtcttggtcatcttctcgatgtcgtcggtggtggcggtgtcaggggacagcatggcttccaccgctatcatcatgttgatcacagccaagtgaaggtacggcctcgagtcacgctggtagcggcctgtgatctgctggcaaacttccttcgccctctgccagtctctctggttgatcagaacgtcggtgagcagcagtccgaggtccccggcccggccggc

SEQ ID NO: 93579 - DNA, 331 bp, Zea mays
  Clone ID: MRT4577_185330C.1
ggaattcaggatgccgtggagtttcgcaagacaagcaaggcaccggatgtgctgctgaagacgcccgagaactctccaaatgcagcagaagtctgaagctgcactcgggtcacgcttactcgtcctttgtacgtgtcgaggaaggagctgagaaatactttctgttctgttattgcggaattcttaaagaatgtggtgtcatgacaggatgtcctgagttgtgtttgcatacggttccttggtgctgttttttggaacagtgggtagcgtgtcgaactttcattattacagtcataatcttagaatcctggagatgagactcgttagatct

SEQ ID NO: 93580 - DNA, 944 bp, Zea mays
  Clone ID: MRT4577_185331C.1
tttttttttttttttaaaagttaaaaacagataaatttccaacagaagatagcattacaacccgtgaaagctactcactctattaaacgtgatcgttaaaaagatccaattgacaaattcctatggtagctactctctttttctcaaatacacaaaaaggactactaatgtaattattttaacgacacgttttttatgaaataagatatctgtaccattcttcaagttttgatattatgcaaatggtagacatatatgtctggcaggttgcattgcatctccgcacgcctgaaaagagcgcagctacattggaattgttcagcccagtgtccaagagtccctcaatagccgagcgtcgaagctgttctctctaaatgatcgctgagaagagcatctggttggcatttttcttcttgtccaggtcctcgatctcccttgtgatgggactgacttgagcagtccagtcttggatcacctcgttgaggctgttgtggacggtctcgtcggcgtcggacaaggggggcagcccggacgcagagagcagccgctgcgtcatgccacgctgcgccatcaagctcacgcggatctggtcgatcagctcctgcttctgggtgaggaggtcgcggcacatctccttgagcgcggccgcctcttcctccaaccgcttcacccgcgccaccagcttcgccggattcgcatggtcagggtaggcggcgcggaactcaaggtcgagtcggcgctgcacgtcggcgagggtgcctctggcgttggtgagcgtcaacaggacgtcgttcaccgccggatggtactccggccgccgcctgctcggatccgccgccatcctgacgtagctttggtggcggtcctggcggaggatcaggatgcgatgtttgctcctattttttatctttctctgtcccggccggcccccgcccctcgagggt

SEQ ID NO: 93581 - DNA, 709 bp, Zea mays
  Clone ID: MRT4577_185332C.1
aaactatatattatacttgaacatagtactactaacttcatgtttttttcttttgctgctataagcgtaactgtatgtattactaacatgaagcattttattgttactagtaagttgtacattcacatagtctagtcggatgctctcaactctcaaacttctgcctcagaacaagtctccaagaactggattagtttcgagcgttcttcctccaacagctcagggtcttcgctcgatagtctctcccgagttgtaccatccacacttgttggatcgtccactactttagcgtaattgttggtatggccgtctttgttaggtcctataaacggttcggcctcattgtgtgtccattcaccatctatgatgtatttatattcaaactgtccttcaggcagttctctctttaggatccagaatcctgttcccttgtccagtgttagaggtatcctctgtccccatccaatgtcaaggccagaaatttctactctggagaaccccttatctttcagtgtcagagtaacagtcttcctcttgagtcctgtaagaatatcaattgttgcatttctgatagcatccagcttcggaaagcacgaccttttgctcataagtaatttatgagcttccataagcttatagccttgcacccagaacatgtatgtcaacgcaacagcaggagcccttccattccagcagtgcagtgcacata

SEQ ID NO: 93582 - DNA, 186 bp, Zea mays
  Clone ID: MRT4577_185333C.1
cggccggaagacggccgccatctcccctgcacggcttaaggagacctgcgccgcccctccgcccacgcgagctcgacgaaaaggccgcccacaggcacccatcaccaccagctggcggcacgcgcgcctgccgaccccgaccgatgaccacccccagacccaccgcatgaagctctggaccactaa

SEQ ID NO: 93583 - DNA, 159 bp, Zea mays
  Clone ID: MRT4577_185334C.1
ggtgtgttctgctttttgcctctctctgctatctatgtacctacccaggcggccggccgatgcagagtcccctgggcggtatgaccaatatcgtggggagggggttagtagagcagcccgcccggtgatagagatgcaaagcttcagcgcctggaagat

SEQ ID NO: 93584 - DNA, 1391 bp, Zea mays
  Clone ID: MRT4577_185335C.1
atttcatccttctgtatctaagctttccaccattttcccctttatcgaagcatcaagacccagaagcaagcctggtatacaagcattgtgttcactacatgtagctcttgataaagccaaagggcttcttcaacattgtgcagactgcagcagactctacttggccatcacttcggaaactgtgcttttaaagtttgagaagtctagaagccagcttcaggagagtctaaggcgcactgaaagcatagtaactgaagatattggctgtaagattgtggagattgttggtgagctggaggaaattgtttttacattagatagatcagagaaggaagctggtgatgagctgatcaaattgctccagagaaataataaaacaaatggttccagtgacagtggggagcttgaggtattccatatgtctgctcttaaattgggaattacatcttctagggcagcactcaccgagagaagagcccttaagaagctaattgagaaggcccgttctgatgaagacaagcggaaggagcttgttgtgtcctacttgtacaatctcatgaggaagtactcaaagttcttcagaagtgagactggtgatgatacagattctcagggatcgtctccatgctcgccaacagtattaggcatggatgatatgtatgggccgtacaacaatggtcgggcatttagtagacagctttcgagcattcagtctttcaattcaaggtttggatctttcaattctaggcttggatcattcaattgcagacgtgctgctgctggtggtccaaggtctgagaatatctcagtccctcctgaagaacttaggtgccctatttccttgcaactcatgtatgatccagtcatcatttcatctgggcagacttatgagcgtatttgcatcgagaaatggttcaatgatggtcacagcacatgtcctaaaactcagcagcagcttgcccacctgtcattgactccaaactactgtgttaaggccctgattgccagctggtgcgagcagaacgattttccacttcctgatggtccaccaggaacttttgatgtaaactggagacttgcttcctctgacactgaggctacaggttgtgtgtctgttgaaagttttgactgtaccagtgcaaagagcgtcaagattgtcccgatggaggatgctagaaaggaggagtcagcaaacagcgtatctggaacactggatgacggttcttgtaacgatttcgatctgaacgagggctatgggagcctgctgctcttgcttcatgaaagaagtaacatggacaagcagtgcaggctggtggagcagataaggtatcttctgaaagacgacgaggaagcaaggatccagctgggctcaatggctttgccgaggcact

SEQ ID NO: 93585 - DNA, 187 bp, Zea mays
  Clone ID: MRT4577_185336C.1
ttttattattaaaaaaacggaagtttatttttgacgggagggttcataagaacatcaagttagaattgaacaccagcgattacctaatgtaacacataacgattcaccccagctggggctcaaaagatgcatgattgcgcagaaaggtttctgtctctagcctacacagccaggacaggcatcaaaa

SEQ ID NO: 93586 - DNA, 359 bp, Zea mays
  Clone ID: MRT4577_185337C.1
ccgcccccctactttcaactcgctcgctcgcgcggcttacatcagtcttcggcgggcggcagactgcagcaacccagcgccgaagagcatgcaggaggcgtcatcgacgacggcggcgggggccgagcccggccgtcgggcggcacatcatcagttcgccagcgtggacctacggaggcccaaggggtacccggcgccggcaccggcgccgacgacgggcgagggggacccgtgcccacagagtgcatcacgagacaccaagttctgctactacaacaactacaacacctcccagccgcgccacttctgcaagggctgacgccgctactggaccaagggtggcacgctgagcaacgtcc

SEQ ID NO: 93587 - DNA, 212 bp, Zea mays
  Clone ID: MRT4577_185338C.1
gctgatacctcgcggcgggagtcgggctgagttgatttggcgagtttaggtgtgcggaaggaagaattccgggaagaacagttggttggtctgcgagagttctgtgggcggtagggtgggcggtcggtcgagcgggcgggcgacgtacttgcgacccggaggccgccgtcgctgcttcgggcaagcgatgatcgagcaagtcgtcaacttcg

SEQ ID NO: 93588 - DNA, 156 bp, Zea mays
  Clone ID: MRT4577_185339C.1
ccacgagcaaggcgctggttttgttcgcgtgggagcgggagtctttctggccgaggcgcatctgctggcgtctgctgtgcaagcgggccataacgccagccagattatgcgtaagggacacctccttaccaagaacgcgcagcacacagtccgggt

SEQ ID NO: 93589 - DNA, 522 bp, Zea mays
  Clone ID: MRT4577_18533C.1
ccaaacatactattaccctatgtataatgcctcccgattaaaatggtgcctcacatgtctaggcccacactgccacccatggggacgggagacactccgtttctcatcgcaccgttacctagtgaactacttatacaccctagttgttgctaccacctcatctccattgccttattactacagctcatagagcatctgaaattataaacaccggcgacaccttcgttgaacagacggcgaccaggcttttgatgattgagacccctcatacgcggcccatccttccctaccttagccagcatcagaggcggtagctcaacctgcggctgatgctgaatcatggactgaagaaccacaccgtgtgccccctgtgacacgcgcacttgatccacctgactgatctggcgatactattgcttctatacttccttggaatgtggttatacgtaccgaggaccccccggggcttaccggttcctgaggaactggtatcactggcccataaacgggctaacggccctt

SEQ ID NO: 93590 - DNA, 362 bp, Zea mays
  Clone ID: MRT4577_185340C.1
catgtttcgctgaaataaagaagacgcacgtttctatgcaaaaaaaaaaaaaaaaaaaaaaaaaaaaaaaaaaaaaaaaaaaaaaaaaaaaaaaaaaaaaaaaaaaaaaaaaaaaaattctcggaaaccctaaaccctccggaaactttatcccgccggggacattcccctccggttccaagcccccgccaatcccctcccgccctacgccccctcggttgaaagcgaaaaaagatgaaaggaaagggagatggccggaaaaggggaatggatgtaagaaggaccaattcttgggccgacgaatgtttgcacgacggggtggagaaaatcccgaaggaacagggtaaccgaacacaagggta

SEQ ID NO: 93591 - DNA, 774 bp, Zea mays
  Clone ID: MRT4577_185341C.1
aaagccgtcgcctactcgcctccggccaaggaactgactccacacacgacccaaatcttttcctcgccggccggccggtatatacgcaagaaagccaagaaaaacactgtctgcctcttcctccatatccaagaaccaaaggtagctagctagcgcgactcgttggctagacgattcaagcagcagcgcaggatggtggcgccggtggtgattgcgtcggccgggctgggcatgctggccggcgtggcgatggccaaccggtccctcgggaacgggctcccggcggcctccaggtgggacgcgcgcccgcgctgcgccacgtgcggcggctccggccgcgtggagtgcatctgcaaccgctggtccgacggcgactccggctgccggacctgcgctgggtcggggaggatgccctgccgcagctgcggcggctccggcacgggccgaccgctccctgcgcggctcaccgtccagcaccagaagccgccgccgcccccgcccggctacaactgatcgatggtggatgattaggtatccgtatccgtggattatatacttctcgcgggcgaggtgcgatgcgacccatacaagaaagaaatcagttaaactgcgatatgatgcgctctagctagttaatcatatatacatatatacacgtccgatccattcgtgtggatgacatccatgttgcgtatgtacaagtacatgtctcttcttcaagagtcaagactagctgtaattgagctgagcaaaaaaaaaaaaaaaaaagcggcc

SEQ ID NO: 93592 - DNA, 674 bp, Zea mays
  Clone ID: MRT4577_185342C.1
agaataaaaaactcttactcccgttattatgaaaatttcgggctttagatataaatattgtttttacaggagatttatatgacctcaaagaataaatatacctatgtggggttatctgattccaagtccgttcaggatgttaatgcacttctcacagcctacgttccaaattccgatccgggtattcgtgtcgcacatacaccgctgggagataaagctcccgatgaacttgtgcgaaccaattatcattggtcgaataaagtcggctcttccggtgcagtggaattatcatatcattttctagaatctgctccttccgtgatgccaagatttggcattgccggattcagttcctttaatgatgagcagaaagaggcagcaagattgtctttgcaatcgtggtctgatgttgccaatgtaaaatttaatgaagtcagcagtctttctaaagccaatattacttttggtttctttgattatagtataactgacgactatgcgtttgcgactttaccaaaagggcagaatacgacttattcctggtatagcgcggagagtcatactttcatagacaatgacattggcgtgaatggctatggccgccagacatttacccatgaaatcgggcatacgcttggtctggatcatcctgccgagtacgatgcttctgatgc

SEQ ID NO: 93593 - DNA, 917 bp, Zea mays
  Clone ID: MRT4577_185343C.1
cgggtcgggcacgcgtccgaccaaacgtccgcccacgcgtccgcccacgcgtccgccaagaaccaaaggtagctagctagccgcgactcgttggctacacgattcaagccgaggatggtggcgccggtggtgatcgcgtcggcggggctgggcatgctggccggcgtggcgatggccaaccggtcccttgggggggacgggctcccagcggcgtccaagtgggacgcgcgcccgcgctgcgccacgtgcggcggctccggccgcgtcgagtgcatgtgcaaccgctggtccgacggcgactccggttgccggacctgcgcggggtccgggaggatgccctgccgcagctgcggcggatccggcacgggcaggccgctccccgcgcggctcatcgtccagcaccagaagccgccgccgccgccgccggccggccacaactgatgatggaatatgattgtcgcaggcgaggtgaaagtgcaacccatccgagaaatcagttaaacgtactgcgatatttgtcatcctctagctagctagtttaagtatatatgtatgtatacgtccgatccattcgtgtggatgatatgcatgttgtatactatgtaagtacatgtctcttcttcaagactagttgtaattgagctgagcatacttggtgttgctgttgttcagttaatttgcaaaaacgcccaacccaagaaagaaggagaaaaaaaacagagtggaaatgtttcttttttttaatatctggagaacaacatgattgagaaggggagggcaggtgattctgagcacagttttgttggaaaggctgtagttaattctggtggttgtaatatattatatgtatatgcttagattcgttaatatatacgcatatgcacccacgcatccatatgatttacagagattatatt

SEQ ID NO: 93594 - DNA, 500 bp, Zea mays
  Clone ID: MRT4577_185344C.1
tcagcgttcggtttggttgaattagaagtttttgatttgtgtgtttgtatgacggggaccatgatcgtaacacctgtctcctaccaatatggtgagagaactgtggttccctatccaaaatttgatccggtccggattgtctaagtctgagattatgatttgagagagaactcctagagattgggcctcatggaagagctttataagtgttgattctcttcgatgctattacaatgggttgtgtttgatcgatactagctgtgatgtctctaaataaaaacgctgttgtgtgcaatatatgctgggttggaagattatgaccatttagaggctggcgtgatctataatgctgtactattagatgcggtgcttgaggtatatgctctttttgatgcatggataggctactggaactgaatgagagacatattgtgctcaataatgagattcctggtggaaagaacatgaaccgttctggtgctttgggagttttatgagga

SEQ ID NO: 93595 - DNA, 1248 bp, Zea mays
  Clone ID: MRT4577_185345C.1
acctcgcagccggccggggtggtcgtagctccttctcctacacagaaaagccgtcgcctactcgcctccgggcaaaaaactgactccacacacgacccaaatcttttcctctccacaggcgacttccaacgcaacagcagctcgtcgagcgagtcgtcgccggccggccggtatatacgcaagaaagccaagaaaaacacttctccctcttcctccatatccaagaaccaaaggtagctagctagccgcgactcgttggctagacgattcaagcagcagcgcaggatggtggcgccggtggtgattgcgtcggccgggctgggcatgctggccggcgtggcgatggccaaccggtccctcgggaacgggctcccggcggcctccaggtgggacgcgcgcccgcgctgcgccacgtgcggcggctccggccgcgtggagtgcatctgcaaccgctggtccgacggcgactccggctgccggacctgcgctgggtcggggaggatgccctgccgcagctgcggcggctccggcacgggccgaccgctccctgcgcggctcaccgtccagcaccagaagccgccgccgccgccgcccggctacaactgatcgatggtggatgattaggtatccgtatccgtggattatatacttctcgcgggcgaggtgcgatgcgacccatacaagaaagaaatcagttaaactgcgatatgatgcgctctagctagttaatcatatatacatatatacacgtccgatccattcgtgtggatgacatccatgttgcatatgtacaagtacatgtctcttcttcaagagtcaagactagctgtaattgagctgagcatacttggtgttgctgttgttcagttaatttgcaaaaacgcacaacacaagaaagaaggagaaaaaaacagagtggaaatgttttttttttaagatctggagaacaacatgattgagaaggggagggcaggtgattctgagcacagttttgttggaaaggctgtagttaattctggtggatgtaatatattatatgtatgtatatgcttagattcgttaatatatatgttatatgcacccacatgaatatgatttacagagattatattaatttgttgtgagaaaaaaaaaaaggcggcctgccctattcctggatgctatttttatttcttgttagttcttcagatctgctcagttggtgtggccggatcgcccttaataaaattgttgcccgcgttctggact

SEQ ID NO: 93596 - DNA, 799 bp, Zea mays
  unsure (1)..(799): unsure at all n locations
  Clone ID: MRT4577_185346C.1
ttctttcttcctgctactggtaacctacgagagggtgttggcccccaatggcgagggctccggtgcttcccgcgctcttgtgcctcgcggtcctcgcgctggccggcggcgccgatgcgaggaggaagatggtcggcgtgtacgagctcaagagaggggatttctccgtcaagatgaccaactggggcgccaccatcatgtcggtcctcgtccctgattccaaagggaatttggctgatgttgtgctgggcatggacaccctcgctgagtatgttaatgatacctcttactttgggccgctaaatgggagggtggcgcagaggatggccaggggccgcttcgtcctcgacggaaaagtgtaccatacctacatcaacgacggaaagaacgcaattcatggtggcaaaagagggttcagcaaggtcatatggacgggnaaagagtacgtcgccggcggcgactccccatacatcaccatgtactaccgcagcttcgacggagagcaagggttccccggagacctggacgtgtacgcgacgtaccagctgacgggcccgtacgagctgagcatccgcacgaacgcgacggcgctgaacaaggcgacgccggtgaacttcctgcagcacgtgtacctgaacctggngcggngagggcagcggcgacatcctgggccacacgctccagctctccgcgtcccgctacaccccgctgggacgggagatgctcccgtcgtccggccgcgtcgaccccgtggctggcaccagctacgacttcgcacgccgatgccatcggcgcgcgc

SEQ ID NO: 93597 - DNA, 392 bp, Zea mays
  Clone ID: MRT4577_185347C.1
gtgagacactgcggcttcgcccttccatcttcatccagctggggaaataaccctccgatccggcgcaggcatgcttaatctgtccaggttagtagtagatcttctcgacgcataatatgagttggtagccaatcaataattcattctacagccccccgcgtcgtcgtgagggacggcacgggcggttcccgcaacgccgccaccaaccctctcgctcctcatctccctcccctcgccgccgtccgagctcgctggcggaggtccgcctggcggcaatgaaggtggcggcggggcctctttcccacgggctctctccccacgctcgccatcaggcttgtcaccatggtagcgacgtcggtggtggctgacttttgagtggcgggtgctctcgt

SEQ ID NO: 93598 - DNA, 500 bp, Zea mays
  Clone ID: MRT4577_185348C.1
gcaaattgccatcgattagaaaggaacggacatggatgacaaccgcttactatcaatcccttgaaacaagctaggaacgtgggacacacaatgacggtcaggctagcctataaatacagacctgatgcagaaaatggagatcaaaggggcatcgaaaaaactaagacagcctgccaggtagaattttatttacgaaaaaatggcacccgccggtactaaaaattgtcatttgaagacagctgccaactcgaggttgttgccctaccactgttggcataagacgaggctgtaaaaggtatcattgagggaaactaaaccttccaatttaagttgttataggacctcttgccaattgatgccaagtttctacaaagtactttttacaccttccgactgggactcattttgatgaactgtgcataggatccggccatgggctatgaaggcacgcacagcttgtgcaatcatcggtttgaccgcgagagtttcttgagactgcc

SEQ ID NO: 93599 - DNA, 310 bp, Zea mays
  Clone ID: MRT4577_18534C.1
aagctcggaattcggcttgaggaatgtggagaacaaagattaggatgcttaaagactcggataacttaggtggttctttacctaagtcatgaagaagtccgagacctctgtctctctgtaacttttggtcacagttaagcagctagctgggctaccggcaataagttctgctaatatcttacctggtcaataagtacatctggatggcttgctgcgtctgccataacgagctgcatattggagattagtcatattgcttctgctgccgaagcccttgaggggagaatgacctcgtaacagacttgactat

SEQ ID NO: 93600 - DNA, 335 bp, Zea mays
  Clone ID: MRT4577_185350C.1
ggggggggggggttttcccaagaaaccagtttgttttggcctttatttgcacaaccaatacagcaaattctaatcaagcaaaatttgaaagttcacacccaaagtttctttttcaaatggaaaaaaaaaccaaagattgcattacgttgtacagtgaccttctgacatttgcacagttatatcaggaatactatgggtgttatcatgaaccaaagccaacttgggaacgacgcttttgggtttctggtaatttaccccaggaccatgggtttaaggggaggattttggtgagattgattttggggaggatggctttcttcttgtctgtggcattt

SEQ ID NO: 93601 - DNA, 337 bp, Zea mays
  Clone ID: MRT4577_185351C.1
cagcacacacaaaaaattcattaggatattagtgactagtaaaggaagcattaactcaggtcctagaataaccattcctcacgccaatacatctcgcgccccttcgtggtatcatgatcaaaatcctccccgtgggtacaaaaatgaacaaaacattcgttgctatatgtgctctccctctcatatcttcattcttatggtttttttccttttgaggtttggtcttgtctaaagacgggtataaacatcgcttgcatcatcattgctcggtgggggaatcgagctgtttcatcggggagggggaaagaaaaaagccattccctctttagtagtcacc

SEQ ID NO: 93602 - DNA, 543 bp, Zea mays
  Clone ID: MRT4577_185352C.1
cgcgggggtcatacccagctagccaccggcactacacgtgtacgagctcactgatctcatctcatctcaattctcacagcccgggaggacggactccgactctccgagtgcgcgcgttgatcgcccatgggcaactacctgtcgtgcacgctggccaaggcgccggggccgaggcccggcggcaagcgcgcgagggtgatactcccggacggcggcgtcaggcaggtggcgctgccggcgacggcggcggagctgatgatggacgcgccgggccacttcctcgtccacgtccacgcgcgcggcgcgggcctcggcctcggcgcgcgactcgccgcgctgcccgcggacgaggagctccagctcggcgccgtctacgccaccttccccatgaagcgcctgggcacgccgctggcggcgcccgacctggcgcgcctcgccgccgccgccgcccgggaggcgcaccggtccgccaaggtggccgtcgtcgccgcgcccccgccggaggacgcgcccaggctgcggctggaggagatggtggacgac

SEQ ID NO: 93603 - DNA, 501 bp, Zea mays
  Clone ID: MRT4577_185353C.1
aggtgaggatcgacagctagtcaaatgtacatatgatatggactaaaagaaaaagagatatatgtcttctttaaattgggcaggactacagatgatgtgatggaaagagtccataaaataatttctcatggtaaacacattaatgtataattatacttccaaaaaagactggtgagacttaaaatggcagttttaaaacatttggaatgcaactttcatgaaattaggcaggactatggatgatgtggtggaaagagtccataaaataatttctcatagtaaacacattaatttataacttccaaaaaagactaatgagacttaaaatgggagttttaaaacatttggaatgttacttccattaaagtttttagttacaaatagtgtgtcactgataaaacttagatggtaaattttgcagtaaatgaaataaaggattttcattcaaattcaacacttggatttatccaagtgccaggtagcttgcctgtctcgataggc

SEQ ID NO: 93604 - DNA, 296 bp, Zea mays
  Clone ID: MRT4577_185354C.1
aaaaaaggaatgcctgttacattatttttgggctcccaatacccatgggggaaaatggacaaaaggccccccctttttgttcttttaaatagggacctgatgattaaaaaaaacccaaaaagaacttttcaggggcgcaaaacacatttttttgccccaacgcaaaacacatttttttgccccacaggggggacagttttcaaggagctgatcctgctgggggtttcaacatcccattaaaagcaaattcttttctttaggcttaccaacatttcccatttttaaatccttggccc

SEQ ID NO: 93605 - DNA, 2231 bp, Zea mays
  Clone ID: MRT4577_185355C.1
ctgccgttcacacctctctcgctgcctttatttcctgttggcgacgctctcgccaggtcttcggcggcccgttcggcggcgactagcgcctccgtttgccaggtcttcgtcgtccgtttcgccgtcgactggtgcccagcaggtacatctggaagaatgggggtttaccttagcacaccgaaaactgacaaggtatccgaagatggggaaaacgataaacttaaattcggactttcatctatgcaagggtggcgtgcaactatggaagacgctcactcggctttgctagatcttgacaatgacactgcattctttggtgtttttgatggacatggaggaaaagtagttgccaaattcgtgcaaaatatctacacagagaagtctcgcccgcctctctcgctgcctttatttcctgttggcgacgctctcgccaggtcttcggcggcccgttcgtcggcgactagcgcctccgtttgccaggtcttcgtcgtccgttcgccgtcgactggtgcccagcaggtacatctggaagaatggtgatttaccttagcacaccaaaaaccgacaaggtatccgaagatggggaaaacgataaacttaaattcggactttcatctatgcaagggtggcgtgcaactatggaagacgctcactcggctttgctagatcttgacaatgacactgcatcctttggtgtttttgatggacatggaggaaaagtagttgccaaattctgtgcaaaatatctacacatagaagttctccataccgaagcctatgctgctggtgacctgggtgctgctgtccacagagcttacttaagaatggatgaaatgatgcggggtcaaagaggatggcaggaactccaagcacttggagataagataaatcagttcactggcataacagaaggcttgatttggtcccctaaagcaagtgattcaaatgatagacatgatgattgggctttcgaggaggtacttgtggaactggctatactcagaccacactctgactttactgggccaaattgtgggagtacagcatgtgtagcattagtgagaaatggcaactcgttgtggcaatgctggtgactcccgctgcgtcatctcaaggaatggccaggtcagttgttactcctaaaagaaaacaggagggattaccctctagtggcatataaagtttgtgggattgtctcattttgtacttcttccacataaaacaggcatacaatttgtcaagagaccataaaccagagcttgaggcagagagagaaaggatacaaagtgctgggggttacattaaaatggggcatgtaaatggaagtttaaacttgtcaagagctattggtatcatttttttacttgcttctttttgttcatacctctcaccttaactgatgtcttgcatatgcaaaatacctttctaggagacatggagcttaaacaaaacaagttcttgtcccctgataagcaaattttgaccgcaaaccctgacataaacattgtgcgtaaattctgcagttgcctctcgctcttgctatgtagactattaagttagcacttccttcttgttgatagttattgtaacgttattcttttgtacaggtcgagctatgtgacgacgacgaattcattgttttagcatgtgatggcatttgggactgcatgtcaagccagcagttggttgatttcatccgtgaacatataaacacatgcaggaggaaagcctttctgcagtatgtgaaggagtgcttgatagatgcctggctccatcgaccatgggtggcgagggatgcgataacatgacgatgatcttggtgcagttcaagaagccatttgctcaggtaaaggatgccagtgatgcggaacaactaactggagatgcgggatgctctgagacccatggggccgaggagaatgactctgacaagcagatatagcgaagacaggactcttttggagtcttggtacatggcctgacgctgaacctgggtaaaacaggagtacgatgttgcaatgtacataccaaccatgcgctgagttggcgtgaaggatatattcattgttccactgttgtctttaaccaaacgtgctgttttcttccggttgtgatttttggtgacctgatcatctgacaatatctaattatacatttgggaggaaaaaaaaaaaaaaactttttttaaaaaaacaaaaaatttggggggggggggggaaaaaaaataaaaa

SEQ ID NO: 93606 - DNA, 972 bp, Zea mays
  Clone ID: MRT4577_185356C.1
gcagcggaaatcttattaccaaattttacaagttacatcaatttttatgatgtacatgatcggagtgattacaaaaagtgattcaaagaaataactttgaactgttatagattattggtagttttgaaatatatgctagcttaagtgaccatcagaagaagtacttagacttataagaaggtcgagcccaccgacacttaacaccatcatcagcagcacaaaactataacctgaataacactaggttagtgtttgttaggcgaagtccatttgatgatcatccttgtcctagcacttgatcggcaggttcgtctaccagcaccaccaccatgcagagtagcccgcacttcgagtcgacttggttcgtcttccgcatcacgtgattaattatcataccatcaattaaatccgacttgaaaccacgaaatcgacgacgcctttcagctcagcatttcaccggaaatagagtgagtgctacgtcgaatcgcgcttcatctttatctgcatcgagtattctccgaccgcgtactgatttattttcttctgcgtctaatcttctcggatcttggcgtagatgaggatgacgatcgacgacttgttcgagtttttttgtcgagcacttggtaaatatcatgctgctagcttcgtcttcacctgacgcttgggatttcttgacgacgtatggaacgacgacgagatcgagtctggagcgagctggcgaggacacaaatccagtgagggagagggcgacacgagcttcagccaccggcaagcgcagtatcgatgacgatgaccgtggcggggttgactagcatgacaagcgcgtgcggggggcaagggcaagcagttgggagacggcagcacggtttgagaaagactgcgcgagcactggacgagaaaaacgacggtgcggcaatgaggtggcgagagaggatggcatccggcgatagagggcgacaaagcgcgaactag

SEQ ID NO: 93607 - DNA, 351 bp, Zea mays
  Clone ID: MRT4577_185357C.1
ccccgctccgtctccctcccccctcctcccccgctccgctccctccgccgccagatcccgtcgagcccccccgcgcccccgcgtcgaagatgagggagtgcatctacgatccacatcgggcaggccggtatccaggccggtaacgcgtgctgggaactttactgcctcgagcacggaatccagcctgatggacagacgaacggcgacaagaccatcggaggaggtgatgacgccttcaaccacttcttcagcgagaccggagccggcaagtacccgcaccgcgcggtattcatcaaactcacagtccaccgtgactgacgaggttcgcaccagcgcctacagccagctcct

SEQ ID NO: 93608 - DNA, 1229 bp, Zea mays
  Clone ID: MRT4577_185358C.1
cttttatttcctgttgtcgacactctgcactgttctatagatgcccgttcgtcggcgactagcgcctccgtgtgccaggtcttgggcttacgatctctgtcgactggtgcccagcaggtacatctggagagaatgcacatttaccttagcacaccaaaaaccgacaaggtatctgaagatggggaaaacgataaactcaaattcggactttcatctatgcaagggtggcgtgcaactatggaagacgctcactcggctttgctagatcttgacaatgacactgcatcctttggtgtttttgatggacatggaggaaaagtagttgccaaattctgtgcaaaatatctacacatagaagttctccataccgaagcctatgctgctggtgacctgggtgctgctgtccacagagcttacttaagaatggatgaaatgatgcggggtcaaagaggattgcgggaactccaagcacttggcgataagataacgatgatcctggtgcagttcaccatcagaagccatttgctcaggtaaaggatgccagtggtgcggaacaactaactggagcttgaggcagagagagaaaggatacaaagtgccgggggttacattaaaaggggcgtgtaaatggaagtttaaatttgtcaagagctattggagacatggagcttaaacaaaacaagttcttgtcccccgataagcaaattttgaccgcaaaccccgacataaacattgtcgagctatgtgatgacgacgaattcattgttttggcatgtgatggcatttgggactgcatgtcaagccagcagttggttgatttcatccgtgagcatatagacacagaggaaagcctttctgcagtatgcgagagagtgctcgatagatgcctggctccgtcgaccatgggcggcgagggatgcgataacatgacgatgatcctggttcagttcaagaagccgattgctcaggtcgaggacgccagcggtgcagaaccagctgaagacgcagggtgctgagacccatggggcccatgagaacggctctggtaagcaggtgtagcgaacgtggcatgcatggttctcggagtcttggactcttggtacatataggcctgacgctggacatggggaaaacaggagtacgatgtacataccaaaatgtgctgaattggcgtaagggatatatcctttgtttcaatgttgtcttcaatacaacccgctgttttgttc

SEQ ID NO: 93609 - DNA, 456 bp, Zea mays
  unsure (1)..(456): unsure at all n locations
  Clone ID: MRT4577_185359C.1
ctgacgcgtgggttaaaatggggcgtgtaaagggaagtttaaatttgtcaagagctattggtatcatttttttacttgcttctttttgttcatacctctcaccttaactgatgtcttgcatatgcaaaatacctttctaggagacatggagcttaaacaaaacaagtttttgtcccctgataagcaaattttgaccgcaaaccctgacataaacattgtcgagctatgtgacgacgacgaattcattgttttggcatgtgatggcatttgggactgcatgtcaagccagcagttggttgatttcatccgtgaacatataaacacagaaaggctttctgcagtatgtgaaagagtgcttgatagatgcctggctccatcgacngctggcgagggatgcgataacatgacgatgatcctggtgcagttcaagaagccatttgctcaggtaaaggatgc

SEQ ID NO: 93610 - DNA, 330 bp, Zea mays
  unsure (1)..(330): unsure at all n locations
  Clone ID: MRT4577_18535C.1
ggaacaaatattcccgttgtaataacccccancaagccaaagcgggggactttcactgccacctttttttatcccaaacacaccannacncaaacaacgccgntaaatgactcaactagctagctagccagcggctatactacaacacatagttccttcagtgggacacaccgccaacaaaaccggaggcgcaaggagtccaaacaagcaggccgcacatcgccgtcagttgctacgctatctgcgccaccaaccaacccctagacctggccacattacagatactctgcaagaatgactggaggaccaaaccaaccatccccaaattcc

SEQ ID NO: 93611 - DNA, 1556 bp, Zea mays
  Clone ID: MRT4577_185360C.1
ttttgctcaccattctgccgttcacacctctggctgccttcatttcctgttgacgactgagcgggcgagcgccggcgccctttgccaggtccgtcggcccgttagccggcgactagcgcctccctttgccaggtcttcgacgtccccttcgccgtcgactggcgcccagcagccagcagatccttttctatctgtcgtgttctgtctgcctggtacatttggaagaatgggggtttaccttagcactccgaaaactgagaaggtatccgaagatggggaaaatgataaacttaaattcggagtttcatctatgcaagggtggcgtacaactatggaagatgctcactcggctttgctagatctcgacaatgacactgcgttttttggtgtttttgatggacatggaggaaaagtagtcgccaaattctgtgcaaaatatctacacagagaagttctccataccgaagcctatgcagctggtgacctgggtgctgctgtccacagagcttacttaagaatggatgaaatgatgcggggtcaaagaggatggcgggaactccaagcacttggagataagataaatcagttcactggcataatagaaggcttgatttggtcccctaaagcaagtgattcaaatgatagacatgatgattgggctttcgaggagggaccacactctgactttactgggccaaattgtgggagtacagcatgtgtagcattagtcagaaataagcaactcgttgtggcaaatgctggtgactcccgctgcgtcatctcaaggaatggccaggcatacaatttgtcaagagaccataaaccagagctcgaggcagagagagaaaggatacgaagtgcagggggttacattcaaatggggcgtgtaaatggaagtttaaacttgtcaagagctattggagacatgaagttcaaacaaaacaagttcttgcccccccgataagcaaatcttgactgcgaaccccgacataaacattgtcgagctatgtgatgacgacgaattcattgttttggcatgcgatggcatttgggactgcatgtcaagccagcagttggtcgatttcatccgcgagcatatagacacagaggaaagcctctcggcagtatgcgagagagtgctcgatagatgcctggctccgtcgaccatgggcggcgagggatgcgataacatgacgatgatcctggtgcagttcaagaagccgattgctcaggtcgaggacgccagcggtgcagaaccagctggagacgctgggtgctgtgagacccatggggcccacgagaacggctctggtaagcaggtgtagcgaagacgtggcatgcatggctctcggagtcttggactcttggtacatataggcctgacgctggacatgggtaaaacgggagtacgatagatgacaccctctgttcctcaatacaacccgctgttgtgattttttggttacctgaccacctatctgtacatttttgtggaaatgatgttacagtaattattgtccggtcaagcggaccccttttgagttttgtcaaaaaaa

SEQ ID NO: 93612 - DNA, 282 bp, Zea mays
  Clone ID: MRT4577_185361C.1
gttctaggcatattggctatgattgacgaaggggaaaccgactgcaaagtcattgccattaatgtggatgatcctgatgcagccaattataatgatatcaatgatgtcaaacggctgaaacctggctacttagaagctactgtggactggtttagaaggtataaggtgcctgatggaaaaccagaaaatgagtttgcgtttaatgcagaatttaaagataaggactttgccattgatattattaaaagcactcatgaccattggaaagcattagtgactaag

SEQ ID NO: 93613 - DNA, 783 bp, Zea mays
  Clone ID: MRT4577_185362C.1
cggacgcgtgggcacggcagaaagatggaccattcgcacatggatcacggcggccacatgggccacgacatgcctggcatgggcggcgacgggcccaagtgcaacatgaacatgttgtttacgtgggacacgaccgacctctgcattgtcttcccctcgtggcatatctcgggcaccggctcactcatcttttcgctactcgccgtagtcctgctcacagctgggtacgaagctatccgagaaatatcaaggcgctatgaggcgtactcaaagggtatcatggagggacccagagacgacgcagatgaatctagctcattacttggcccagggagaaacggaggcgttgggcgtagtgccgagcagcagatgaagatgatcaaggctgtcttgtatgctgtgcaggttttctattcgttcttcatcatgctgcttttcatgacgtacaacggttggattatgcttgctgtcgcagtgggtgcattcgtcggatacctgatgttcagccagtcttcgtccaccaagtcggtcgcctgtcactaaggggaccggcaacggaaaacatctggcatgaggctgttcagaggactggagagtagtacaaggtcaggaaggcaaacaaatggttacacagtgttttgcttgccctcggtcggagctacggatttgcatgtcctgaaatatccgggcctaggatcctgcagcgccgacgggtcggacccgctattctcgtaagcttggctttggataccccagatatagagtaaacaggcagttcgcaat

SEQ ID NO: 93614 - DNA, 2640 bp, Zea mays
  Clone ID: MRT4577_185363C.1
cattggtacctcgagccggccgggaaacagaattcggcacgagggccgttcacacctctctcgctgcctttatttcctgttggcgacgctctcgccaggtccggcggcccgttcggcggcgactagcgcctccgtttgccaggtcttcgtcgtccgtttcgccgtcgactggtgcccagcagccagcaggtccggtcgccccttctcgtccttcctgcagttcgaaagcgagcatcgaaaccctaaaatccttttctatctgtcgtgttctgtctgcctggtacatctggaagaatgggggtttaccttagcactccgaaaactgagaaggtatccgaagatggggaaaacgataaacttaaattcggagtttcatctatgcaagggtggcgtacaactatggaagatgctcactcggctttgctagatctcgacaatgacactgcattctttggtgtttttgatggacatggaggaaaagtagtcgccaaattctgtgcaaaatatctacacagagaagttctcaggagtcctattcgctgcaccccactgcattctttgttttggcatgcgatggcatctgggactgcatgtcaagccagcagttggtcgatttcatccgcgagcatatagacacagaggaaagcctctcggcagtatgcgagaaagtgctcgataaatgcctggctccgtcgaccttgggcggcgaggaatccgattacatggcctttctcgtagggacctccctcgaactgtactggcaggtagtgtgggagtacggcgtgtgtaccgttggccacgcagagtcgactcgttatgggtcctgggggatcccgctgcgtcagctcggctctcggagtcttggactcttggtacatataggcctgacgctggacatgggtaaaacgggagtacgatagatgacaccctctgttcctcaatacaacccgctgttgtgattttttggttacctgaccacctatctgtacatttttgtggaaatgatgttacagccgccttcctttacttcatgttggcgacgctctcgccaaataatcggcggcccgttcgtcggcgactagcgcctccgtttgccaggtcttcgtcgtccgttcgccgtcgactggtgcccagcaggtacatctggaagaatggtgatttaccttagcacaccaaaaaccgacaaggtatccgaagatggggaaaacgataaacttaaattcggactttcatctatgcaagggtggcgtgcaactatggaagacgctcactcggctttgctagatcttgacaatgacactgcatcctttggtgtttttgatggacatggaggaaaagtagttgccaaattctgtgcaaaatatctacacagagaagttctccataccgaagcctatgctgctggtgacctgggtgctgctgtccacagagcttacttaagaatggatgaaatgatgcggggtcaaagaggatggcgggaactccaagcacttggagataagataaatcagttcactggcataacagaaggcttgatttggtcccctaaagcaagtgattcaaatgatagacatgatgattgggctttcgaggagggaccacactctgacttcactgggccaaattgtgggagtacagcatgtgtagcattagtgagaaataggcaactcgttgtggcaaatgctggtgactcccgctgcgtcatctcaaggaatggccaggcatacaatttgtcaagagaccataaaccagagcttgaggcagagagagaaaggatacaaagtgctggggggttacattaaaatggggcatgtaaatggaagtttaaacttgtcaagagctattggagacatggagcttaaacaaaacaagttcttgtcccctgataagcaaattttgaccgcaaaccctgacataaacattgtcgagctatgtgacgacgacgaattcattgttttagcatgtgatggcatttgggactgcatgtcaagccagcagttggttgatttcatccgtgaacatataaacacagaggaaagcctttctgcagtatgtgaaagagtgcttgatagatgcctggctccatcgaccatgggtggcgagggatgcgataacatgacgatgatcttggtgcagttcaagaagccatttgctcaggtaaaggatgccagtgatgcggaacaactaactggagatgcgggatgctctgagacccatggggccgaggagaatggctttgacaagcagatatagcgaagacatggactcttttggagtcttggtacatggcctgacgctgaacctgggtaaaacaggagtacgatgttgcaatgtacataccaaccatgcgctcagttggcgtgaaggatatattctttgttccattgttgtctttaaccaaacgtgctgttttcttccggttgtgatttttggtgatctgacaacatctaattatacatttgggtggaaatgatgttacactagttattgggggtgtttgtttgggattataatctgttcagattatataaattaaagtgtcagttcgaaataagttagattatataatctagtcagattataattccaaaaaaaaaaaaaaaaaaaaaagaaaaggcggtaccagaaaagaagcaagag

SEQ ID NO: 93615 - DNA, 385 bp, Zea mays
  unsure (1)..(385): unsure at all n locations
  Clone ID: MRT4577_185364C.1
ccgggncgacccagcgtccgcgnncgnggnnncaacaaatcctagagctgnngggggctgcagcagcaagagnncnnncatggagaaanagcnncaannaccnngaagagancaanaannggaaanagcanncngnagcgaancatacgcnnnggancngagngnacaanagnnannnnnnggnagnncngaagacgggggggggngagnnnngnnacngnnggaaacancancacaaacngncnggnncaancngnancccncnaacccgnganagnngnganangangacaagnnnangnacanaancnngnagcnannaacagnngacnnnanggngcnccnnanaaaaangcaanaaaagaagaacaanannnnnnganng

SEQ ID NO: 93616 - DNA, 1410 bp, Zea mays
  Clone ID: MRT4577_185365C.1
cccacgcgtccgcccacgcgtccgatcctaccccaaaggagattcttctgactgaaggtgaaatcatactcattgaaggcaaagaaggtgctgctaatgagatgccacaggctggtgagaccagtgaagaagatgaggaagattaccttgctgaattgaaagaaggggctgctgatcaggtgctgcaggctgagctggcagacaatgaaacaagtaaagaagatgaagatgacctaagtgaaaagagagaagggactgctgctaagatgctgcagggtgaactgacggacgatgagaccagcgaagaagacgatctcgatgaagatgaggaatgggtttcagatgatgatgagaacaccgaggaagattaccttgctgaattgaaagaaggggttgctgatcaggtgctgcaggctgagctggcaaacaatgaaacaggtgaagaagatgaagatgccctaagtgaagagagagaagggactgctgctaagatgctgcagggtgaaccgacagacgatgagaccagtgaagaagacgatctcgatgaagatgagggatgggcttcagatgatgatgagaacactgaggaaattggctctactgacgagaccgatgaagatcctgatgagaccaatgaggagagttacacctctgatgcagtccaaatgatgcagggatctgggatagctgaagatgccaacgaagatgcctctactgaagatgatgatttcagtggcgacctaccaccagagtttgaaaatatcatgatattcagtggtgctgaaaccgagagtgacattgctcctccagtgctcgaggaaaacaaggatgctgttgtatctgcaacaaaaactgcaaagtccctggatgattctgccttaaaaacagggcaggaggaggagggtcctgaagaggttgacaacgttgtgaagtccctggatgaagaggtagaatcaaaggagatgcagaagcagcaaccacaggattataatagcatgagcctcaggaagcttaaagccacacacaagaaatatctcattgctgcaaaggaggaggtcaccgaagggaagaggcttcctctcgaggaggtggatgaaaacgcctgcatcgaccactgaacagaacaagcaggcgaaattttgtgtggatggcgtctgccacaaaaggattgaaacgcggagtgtgctctggttgtgaagtgataactaggctaccgcatgttcattttcaaaagttttcgtgtgtgatcgtgatcaggggtgaaaccatggtttcagccaacaaacttgcagttcctgttgcttctcccccttttttcctttatatatatattttgtatcggttacagaacatggtttatccagtgaagatgctaagtttcgcttaataatgtatatgaaggtcctggat

SEQ ID NO: 93617 - DNA, 454 bp, Zea mays
  Clone ID: MRT4577_185366C.1
ttgcgctcaagcgagcaggtccgctgcgttatcctgttagacatggtaaacgattctctgcaatagttccttcgcccgtacgaccattctttcgccggcggcggcgaaatgcgtgacggctccgcgtctgccgagtacaagttctacaccaacatcagtgggagcatttccttcaggcgtctacgcgaaaaccgcgccctcggcggcagtagactcggtcacaaattcggcaggtccgactcgagctgccccgggatcggtaccggtggaagggggcgaacaacaagaagagggaccgtctgtctactgcctccgccgcaagttcgccgcgggcagactactggcaggcggacgagaccacgcgggcgctgatcatggacctcgccggtgagtccgcgaggagccgagggtacgtcgttcttatgcgaggggccgttataccgctcgaggacct

SEQ ID NO: 93618 - DNA, 667 bp, Zea mays
  Clone ID: MRT4577_185367C.1
ccggccgggccgggactgcaactgtaagcttctgtctatcatattcatccgtgatacatatatgaaaggtagatagatagaatatgacgcgctacgaagacaactgtaggtgcggctccggctgtgagtgcttcacacagttggtgtaagctgccagacaagcatgtaaccggcacatgtctggaaaggggaccaccaccacccaggttctcatcatgtcagccgcaccatccaagggcaaccacgaagacggattctatgcggccgacgcagctgataactaccatggtaaacgcgaggcaaactgtcacagcgacccctgcaactgtgcatgatgagatatgtgctccaccctgaatggcaatcggaggaagctaaataattattataagataaataaagtataacttattgcactgtgtagggtgaccagacagacaaacaattatatgcatgccatggctggaatgctctgagtctgagatgatgatgatgtctgatgctggagtcgcgtcctgtagtcctcccctgccccctcaattgcttctgtgggcgagcagtgtgctgagctgtgttctgtgggagcatgacatcagcaggctagtcatgtgacctgctgtgctgagacaccatccatctataataatcttatatctataccccacct

SEQ ID NO: 93619 - DNA, 591 bp, Zea mays
  Clone ID: MRT4577_185368C.1
cccacgcgtccgcatagctctacaatgtttgttttcaacattgagcaaggtctccctgttctcccggagtggctaagcttcaaccgactgacagcacgcttgaggcagggctatgaaattggtcctgctaggcttcttctaagtgcctctggaggtcacatggagggaaattttccacctcatgaagcatttgcaattggtgggacaaatagtgtaagaggatatgaagaaggtgctgttggctctgggcgttcttatgctgtaggtagtggtgaagtgtcatgccgcatggtaaacttctttctcctctcgaccttactggctttttgttgttgtcaaatggactccacatggaagtatgacaggcacaactgaatggtaatttaccacagaatgccgtactggcaacaccgcaacaaggatttagttcaagaaaatcagaaaggaaacaaacaggtgggcatgctgccaaagttcaagactaatacagattagatatggaacgttttgcgcgcacacagtttttatctgtattgctgtatggaaccttctactcataggtgccaggcccagaagcagggcccaaaattc

SEQ ID NO: 93620 - DNA, 749 bp, Zea mays
  Clone ID: MRT4577_185369C.1
aatacgaagagagtgtcagtcgaagtcaacatcgcggctaccgagaattccccacccatggcttccgcctccgcgtcctcctccgtcgtcaccctcaacgtcggcggcgagctcttccagaccaccgcagccaccctctcccgcgcaggcggttcctcccctctcgcctcccttggcccctcgccccccgacgcgccacacttcctcgacggcgaccctcgcctgttcgccgccagcctctccttcctccgcagtggccgcctcgcgtcccatcctccctcccccgctctcctcgccgaggctcggcacttctcactcgacggcctcctcctcgcctccctctcccccgcgtccgccttctcccccctctctctgcgccccaccgccctcctcctcctcaccggccgcgtcgctccctccgcagtggccatacccctctccccgcacgcggcctccctcgtcgccgcgcacggcggggtcgtcactagctttaacgccgcgctcgcctctcgcaccagcgtcctaacgccgctccccaccatcgactcgctcgtcgcggtgtcccccgccctcgccctcgctggcgcccgcgactttcctggcgtccagctctgccggttcccgggcgacgcccctgccacagcttccgacgctctatattggccagactctccttcttccgtgctgtctatggccgcctcagaaccggcgtcacactgggctctttgccagcttcgagtcagcgcgac

SEQ ID NO: 93621 - DNA, 255 bp, Zea mays
  Clone ID: MRT4577_18536C.1
ttgttttgttttaaattatttttaatgtctaaacgaaccaatagttcaacttgagagaaaccctgccaccctgacagcgacgcgaacaactcggaacagttctctagaagtgccaatagcaagtcagtacccaagggttgtcaacacataagagcatgatcttcgaaacggcggactccaactcacagttcccatactcgtgaaccgatctcctccattcatgcaaatacaggatccgcctcaattgtctaaaac

SEQ ID NO: 93622 - DNA, 763 bp, Zea mays
  Clone ID: MRT4577_185370C.1
ttggagggaacacactatgttgtccatcccaatgggtcttcaatgtttataacgaggatgagtgagccatcaacagagccctttccgtggcagactgatggggagtttgatgtcgagaggagcttcgcaggcgagggcattgccaatgggtatggcttcagataccctagctcaaagcctggttcattgtttgtcctccagaatgggctacttgcatttgtttggagagaaaccggggccgtgcttaccttgcaaagactggatttggacgaactgctgaagaaaggggagcgtgtgcctgcattgcagccagtgccgaactttgcttacctgacaaagtcttactccaatgttttcaccagtttccctgtcggcgcggcttctcccaggtaaaaggtgtgagtggaggaggatgtatcaaatgatcacctgatgcagacaacggagaaacggtctccaggatcaagtttagctcttcttgcttgccatttgccaggtgatagtcacctggcgatgcttccataatacatactacctcgtggctgaaggagcatagcagcagccgtaatactttaggaattcaaatactttgtcatgaaggaaatagcaaccacaccccatattccttactacagctatttttcatgtttgtgctataaaatgaaaccaatctggagtgtaaatttgtatgagatctgtacatctcttcactataatgcaggcgatttatacgaagtctatactggaacagctttcaggtgac

SEQ ID NO: 93623 - DNA, 550 bp, Zea mays
  Clone ID: MRT4577_185371C.1
aaacgaattgaaggtttattgtaacaactcatctgcccatgtgttacagacaagatccatgtggaaccttaggacccatctaacatctactcaagtattacagtgatagcataagaacacgcggcatacacatttccacaccgtcgtccatatccagcctcaggaaacggaatatgcagtcctgcatgatggagaagatacagttcacatgcgcagaaatgactgatgtttctcaaggttgagttaatgattgtttcagctttgattcagaagatacatttttttttgtctcacatcacatggaaccatttgagctcatatcctgggagaggaacagacgactgcgcatgctgactttatgggagtaaggtatttgaaattaattgcattaattacactgatgaaaatcttccagattttaatgaacatagcacagtcagggtcaagtggccactaatggaagcagccgccaataactaacaagatgtttcatgtacttttggtcagaatgtcagatttaattggtgctcaaacagtaaaagttatgcac

SEQ ID NO: 93624 - DNA, 672 bp, Zea mays
  Clone ID: MRT4577_185372C.1
gcccttcctcgagttttttttttttttttttttttttttttttttttgtttttttttttttttttttttttttttttttttttttttttttttttttttttttttttttttttttttttttaaaaaaaaaaaaaggggggggatcaaatcctttttaccttaaaagtaaaaaaaaaaaaaaccccttttaaaagggtttggaaccccccagggaaaaaaaaaaaaatgggccccaacgggggaaaaatggaccggttccatgcccttgggggggggggaaaaccccctccccctttttgggaaaaaaggtaatcaaaaaccgttttaatgctaggccttttttttacggggggggtcccccaaaggaaaccccccaaaattttgccaataaccctggggaacttttccagcccggaaatttttgggaaaaaaaaatggggcccccccctttccttgttgaaaattggaccccattgggtaaggccaccccccccgaactgccctaaaataattcccccggccctcccccgggtaagattttcaatgaaaaaacccccaaacgcgaacacttcccctttaaacgggggggaaggtttgccccctttccccatttttggggttgggaccccaaccgcccaaaaaaaaaaatttgcccggggggcccctttgaaa

SEQ ID NO: 93625 - DNA, 493 bp, Zea mays
  Clone ID: MRT4577_185373C.1
cagagatttattgaccaatgaagagatcaaaattcaaggtgatgaggtaacaatcttgaggcctaaatcgcccgtacccgagccagtctgcatggaggttgaccgtgagaggaaccgtgtccgtgccgctgatgctatcgaggctgcaagggatgctgctgagagaggtgatctttccgatgccgtgtcaattcttgaggattgccggaggatactttcagaatctttttcaagccggagtggggaccggctctgcaatgcccttgatgcagagctgagggaaatgcaagagaggatggctaaccggcaacgctatgaggcttcggggcgggcatatctgctgtctggccttagctcacattcatggcagagagccactgcacgaggcgactccactgacagtgatacactttgttactcctaccaaacaccatccatgggtcacatgctacagcgctcacagaaccagggcccatcacaggtccaacaacct

SEQ ID NO: 93626 - DNA, 480 bp, Zea mays
  unsure (1)..(480): unsure at all n locations
  Clone ID: MRT4577_185374C.1
ccggccgggggaggagaagagttgagatcggtgtcggccctctcgatcccctgtttctgcaaagggggagcggcgacctgatgatgagatgcagatgaaggcgcaagagagaccgagaccgaggtgcgtagacatatccacaaatgtctcgccgtcgttcccgaacacccaataccgacaggcagcagcagcacgtgcaacaaggatccactccactggcactggcactgggccgcatccgcatgccaccgtggcttcattaaccgatcaataataataaaccgatcgaatcagatcgggcactggacagttcttctctccagtctttctatactggagattacattaaggaatgggctctgctaacgtttggctgcagagttctgttacttagtttggcccacttgttgctgataaaaccagctagctagaaatttacatancnnnnaaaaaaaaaaaaaaaaaaaaaaaaaagcggcc

SEQ ID NO: 93627 - DNA, 275 bp, Zea mays
  Clone ID: MRT4577_185375C.1
cggactcgtgggaaaaaaatttaaaaaaaaaaaaaaaaaaaaaaaaaaaaggaaaaaggtaaaattaaaaaggggggccgatttaaaaaaatccaaacttacatactccttcattcaaaatcataactatttttttatttcacctaaattcaatttactttcccccgttttacaacctcgtggcttgtaaaaaccttgccttttccaacttaatcccctttcaccacattcccttttttccagctagcctaataactaataggcccccgcctttt

SEQ ID NO: 93628 - DNA, 778 bp, Zea mays
  unsure (1)..(778): unsure at all n locations
  Clone ID: MRT4577_185376C.1
ccccttctcttgttcttccaggcggcgaccctcgttcgccggcggcgacccatctccttcaccgccgacgggaaacaagctgcgctatctgagcttatttcctcctccacgctagacctctcccgccatgtagcagctgccttctcctagtgcagatcactagaccgcagccctccctgcagtgtctttggttccttttttccctttcagtggcagtaagttaacataaagacatggaccaagacaaggaagtcactgctgctaggttaaccgatgatctagcagtcggtatcctctcccggttgacggacaagtctttctgccgctgcaaatgtgcctataaggcctggtccgccttctccgctgatccagactactgcaagaagctgcccaaaaaagtaaccactggccttttgtaccaaggccacaataagtctgcaatcccgcttgttagcctgtcccaagatgatggagaaatcgatggaattctttctgatgtgccacaatatgagcatttagaatttcctgactgctgcaatggtcttgttctccgtaagtacaggagcagctatacttctccaggcatttgtcgctttgttgtgtgcaacccagcaacacgagagtggaggatacttcctgacactcatactggaactgatagccatcgtgatgcaactnatttggcatttgatccttcatgatcaccacacttctatgtcttcaactttaatcagcattaccacaatccgatgagcaaacttgagatcttttcatctga

SEQ ID NO: 93629 - DNA, 468 bp, Zea mays
  Clone ID: MRT4577_185377C.1
gccaccgctcgagatagatagacagggagagtgctagcgagcatccatgtaccaaactacactatggaggggggataggaaggtggatactcatggttccacatctagctggtggccctccatggttgactggggccccgtggacatctccacggatctgtacgcgctggtcacgcatcacctgctggttcagctgacggcgcactctcgagctgccggcttcggcaccatgcacacgatcggcctctacatcctctgccaccccgggctgtacttcgggctcataaccatcttcctaatcaccataggcgtccacatacacgccggctagctagggtgtgttctagaccacaccccatatgtgtcttcacctaatcataggactctagcttaatggcgatgtactactaaactactactactagcaggctactactactactaacaaacatggtgtgccggataccc

SEQ ID NO: 93630 - DNA, 354 bp, Zea mays
  Clone ID: MRT4577_185378C.1
cccttctctggtccttcacaggcggcgacccatctcgttcgccggcggtgacccatctcctttgccgccgccgggaaataagctgcaccatctgagcttatttcctcctccacgctagacctctcccgccatgtagcagctgccttctcctagtgcagatcactagaccgcagccctgcctgcagtggcagtaagttgacataaagacatggaccttcacaaggaagtcactgctgctaggttaaccgatgatctagtggtcgatatcctctcgcggctgacgtacaagtctttctgccgctgcaaatgtgcctataaggcctggtccgccttctccgctgatccagactactg

SEQ ID NO: 93631 - DNA, 210 bp, Zea mays
  Clone ID: MRT4577_185379C.1
gctcttgaggattcgacagatcgcttcaaaatacttccgtgactcttggtccagcccatgtggaagagaaaagagagacactatatttcagagatgacctccttatctgtcctttagaaggtcaacctaacccaaatttgtgaggtggctgcaagcaaaaagacagtactgtacactgcaaaacgccagaaaaatctagattaatctaaa

SEQ ID NO: 93632 - DNA, 292 bp, Zea mays
  Clone ID: MRT4577_18537C.1
aaagcgattgggtacctccaggcggccggggaatttgtctctctaatagataggtgtttacggtctcgcctagctcagtgggtctaaagttcccgcttgtacagttcacatggtcgtgtcgctcgtactaactgtacgactacaccatgaagtagtgcatttgcatccacatcggtggagcgacgacatccacgcatataaacgagcgcagcgagctgcatggtcttgaacatggaatcccggctgacgagtaaatgaccggggccaaactcatcgggagaggtgatgatgc

SEQ ID NO: 93633 - DNA, 339 bp, Zea mays
  Clone ID: MRT4577_185380C.1
gaaggatctatcatgtgtctatctggggagaaaaaaagaaaccgggtgcaaaggaaacctgggggactgagacgaggtaacaacggataacccaaaaagcggaaagggggccaataaatggatatcccaccgcccgggtttagaaactgaatagaaagccatgcccagggtggccctacagataagaggcgccatctacactttggaaaaaagaaaactaactgtccaccaacaagagcccttaattattaggaccccgaggggaaaaaacggccttagggggaatgggacaatttaagacaggaaccctcgggaccaaggaaaacaaagggcaaaatg

SEQ ID NO: 93634 - DNA, 278 bp, Zea mays
  unsure (1)..(278): unsure at all n locations
  Clone ID: MRT4577_185381C.1
gaatgctganaaccattganactggnnaagtgccnagngaganccttgaattccaagcttaggntganaatantanccgagtcatcacaaaacaccttggggctntgcttggctatngcattctggagcaagangctgctngctatgagttntnccaatacncattggaattccanttactcnaaaggtccaccacaatggntgcctgctaaataaagatcagttggtnttcccaaaggngttactatntcatgaaaaatgcttccaggacatcctgg

SEQ ID NO: 93635 - DNA, 378 bp, Zea mays
  Clone ID: MRT4577_185382C.1
tcgattccaaaccgacctataccggaccgtgggggtccttcgggtgtctgaccgcggtagctaaagaacatcacgaggagctgctaaggggccttgaagagagcggccgggcgtacctctgagatattttgaaggacaacataggtgtacttgcggatgccgtgacaaagggctacgagaaggtcaagaacggaataacattggatgggtgcgaccagctgctgttgctgacgaacacgatggtcggacgcttagtgacacactctcgatgtaactcgatgctgtacagactggcagcaatagtgccacatggtgtgcatgcccagtatgtcgtaccatcgcgccaacactcaacttgtcatgcgccagtgacgcgtc

SEQ ID NO: 93636 - DNA, 379 bp, Zea mays
  Clone ID: MRT4577_185383C.1
ggcccgatcggataagtatttctatgtaattaatttattcattggagataagcgatccatctccttataattcgtaaacgaagtactgtatttcaagggaaaaaactttaaagcaataactatgaaaaaaaccaaacagacacttttttaataaaaaattaaaacaaccccagactcctggacaggtaaaacaaaaaaaattaaaggggggggcggctttcatggatcaaaaagtccttccctttggatgcatccaaacaactgctctaacggcgacattaattaaattatagtccccatgccctgagattgtgcgtgggcgatccccttaacaccacccaaccttcgttcggcattttttaccccctgtttatataat

SEQ ID NO: 93637 - DNA, 667 bp, Zea mays
  Clone ID: MRT4577_185384C.1
actgccctgccgttaaacagtacttgaagagcgaatgaagctcccggcgtggctcaccgccgtgccgccggaccctcgggcgtacggccacctcatccagctctgcgcggacaccggacacctcgctgctggccgccagctccacgctcgcctcgtcgcttcctccgttaccccgtccaacttcctcgcttccaagctcatttccctatactcccgcggagcccaccttgacgacgcacgcagggtgttcgacgccatcccgcggcccagcgtcttcgcctggaacgccatcctcatcgcactctcgcttcactcggccgatccctccgacgcggcccgcctcttcgccgcctccggcatctctcctgacgagatcacgctctccgcgctcctcaagtcgctcgccgactccggaccgaggttgtccgcactcgtcgcggaggtccacgccgtcgcggtccagcgcggctttggggacgacctgttcgtgtccaatggtctcatcaccgcgtacgcgaacgccggagattcacgctccgctcgcgcggtatttgacgaaatgccgcggcgagacgtggtgtcctggaactcgctgatatcgtcttacgctcgcgcagggtggtaccggcagtgcctagagctgtttcaggagttagcgagcgttcat

SEQ ID NO: 93638 - DNA, 213 bp, Zea mays
  Clone ID: MRT4577_185385C.1
cgcaggcgagggctctgctcaccagcaggatatcggtggctgtcgcccgatggaacagcaggatctgaggcagcgtattctgcggctgctccatgagggcaacggtactgtccaagagcacctggatggactgctacatcacgggaagttaaccatgcagcacgcatacttgaggacgtacatatggattgctgatagccgacgaccgactca

SEQ ID NO: 93639 - DNA, 395 bp, Zea mays
  Clone ID: MRT4577_185386C.1
gcaatttgaactctacaagctatctatcctacacagtacaaacattcatgccccacgcagagcgagatacaatgggtgagcctatggtcaacggcgaaaagcctcattctcaattcatctctcatctcacctcctaccccgttatatccgactccatcactaccttcaagaacaacaaatacggcgccacctcgatcaaatacgccgaccaaggctacgagcgtctcgcaaaaccactccttccctatctctccgctccttacacctacgtcgctccgtacgtcgccaaagccgactctctcggcgaccagggtctacacaaagtcgacgaacgattccccatcgtcaaagaagacactgaaaagatcaaaaataccatcgtcgacactgcattc

SEQ ID NO: 93640 - DNA, 299 bp, Zea mays
  Clone ID: MRT4577_185387C.1
tataatttcaattatgattacattgactctcctacctctatagatgcagaactttttaactaatcataattgaataatcacaataattaaattaataataaaaatactaactttttgtaatcccatcataacaaatatgaatatgatattcttcatcttgataactcattgtttgattccctttatgctccactggagttttacacttaggtatggtctgcaatatctcctgacctatatgcgcctttgtttttcacaaataggtctgctggttgttgcatggattattttcctacata

SEQ ID NO: 93641 - DNA, 218 bp, Zea mays
  Clone ID: MRT4577_185388C.1
attcggctcgagggcagatttctatcgagaatttttcaacatctcgggcagtctgagccgcacggccaggcttgagtatgtctagagggaaatgtttgacgctcggctattggccctcatgtgaaccaccaaactcggcctttgtggccaaactgagaactctcggggcattatgaatccatcataagctagtgttccggtgcccactttacatacct

SEQ ID NO: 93642 - DNA, 505 bp, Zea mays
  Clone ID: MRT4577_185389C.1
gctcgtcccaagctctccttgtttctctcgtttcttcactgctgccaactgtgctgtagttgcaagagctgattggtagctagctactctaggcaagtaggcatggctcccaagcggcgaggaaacaaggtggtgggctccgtggtgaagaccaaactagtgcaggagaccgtggaggtcatcgtcgccgacgacgatgggttgcatgcggagaagcagcaggtcccggacccggaggctctggccctggcgcaccccaccgtggacgtctctggctccacggtggtgcatgtcgtcgaggtcactgccaaaagaggccgtggtggtggtggtggtggccggcgcgcggaggggaagccgccgccggaggaggattctgcagcagtacccgtgccgcagagccaggagacgcaggaccccaacgaggagctggagctggaggacgaggaggagaagcagccggagactccgcgcgtggcgtcggagaagaggaagaagaaagcag

SEQ ID NO: 93643 - DNA, 351 bp, Zea mays
  Clone ID: MRT4577_18538C.1
tttagcgcacaacaggagttctaagttctcaagttaaagatacatggatgcataataaaagctaaaacatgacatgaagctggttcacacttaggtttcatccatctcatactcatcctcatcttcatcaaactcttcttcttcggactcaaactcttcttcattgagctctcttacccttgcacttctacgcagctctagttgttcttctgctcccactgcatctccaagcacagaccaaagtatccctgtaccttccatgacttcttcctcatctctagcttcaaactccgaaggtctaaaggatcgataggccacgctttcacggttcgtattcgtactggaaatcag

SEQ ID NO: 93644 - DNA, 168 bp, Zea mays
  Clone ID: MRT4577_185390C.1
tgttcaaatctacgggctgacgcccgtgttgattgtgttctactgagaccttgtagcgaaggattatactaaggatgaaccagatttatctgcttgcttgttggattcaatcagcattgtccagggattgtttcgacccttggcgagcgacatcttggcttttaacac

SEQ ID NO: 93645 - DNA, 684 bp, Zea mays
  Clone ID: MRT4577_185391C.1
attgggacctcgaggcggcaggatccaagcgccccgcggggttcgttaggaaaggaaatcgattcccccggatccgatctcttcggtgctagagaagtatatggcgccgcctcctcctcattcgatgaaaggtgagcggttagggtggcgagatctctggactcacgataccagcatgataattctgcgagggccgctgggtgttgcgagagcgccgacgctttctggggatctctgcaaatccgcatagctctaagtgtagatgcatacgctcgttcaatcaagcagagatcgtagctagataaggcagttaccatcctctgcactgtcaccgaagtctcccctatgtatcctcacatcgagagatatccagcctcgtgcacctgacgtcaccaattgctccagctcttacctctatctggcctaggtcacccatcctgataactgctgacgattgcgccagcctacaatggtgcagaccacctggagtctgattcagatctccctaatacctccctgtagctggttacgagagaccggaacctatcaaagaccacttcccgcctcactcccggggctgaatgacagctggctctgcttctgtggcagaactgcgagtatactgctgctgcccctctccctgtctctgtgattgaggaagagggaattgtgaatgacttgaga

SEQ ID NO: 93646 - DNA, 424 bp, Zea mays
  Clone ID: MRT4577_185392C.1
ggggacggtaccggcgccgctcctccagctgcggggcctgcgcacgctcgtgctctcgcacaacgccctctcgggcgagatccccgcggtcggtccgggcgccgctgctccacctggacctgcgcgggaaccggctgtcgggcggggtgccgccgctgccgggcacgctgtcgtacctgtcgctggcggggaaccgtctctcgggccccgtggacggcgtgctgcggcgcctgccgaggctgacgttcctcgacctcggccggaactggctgtcgggcgaggtcccgggcgaggtgttcgcgttccggcgcatcgcgtacctgcagctgcggaagaacgccttctcgggcgagctccggcccgcggggcgcgtgccggcgggcgccacggtggacctgagccacaacgcgctgtcggggcgcgt

SEQ ID NO: 93647 - DNA, 217 bp, Zea mays
  Clone ID: MRT4577_185393C.1
actgaagctttctcagtgcactttgcctcagttgagcatctaggaagtattaaaactgtgaagctttctcagtgcactttgaacctggaaaacaatcccaacaggcccgtgggaccatgacttagggattcgggacccacccacccccatccaggaaccgtgacgtccaaggaaccaaacccagacgcagaacaataaaataaattccgtactcccc

SEQ ID NO: 93648 - DNA, 464 bp, Zea mays
  Clone ID: MRT4577_185394C.1
ttatagaagccctcgtaagcaatctttgctaagtagatgccattaggagcaatactgaaaacatgtttatcctcaacctcaggctgcagctgccaatctgaagtcatgtcccacaactgaagatactctgttaagactcccactgtcagaggacctttggtcaatgcatttattggagagggacaatgcaagtcatcagattttgactacagttgattcaattaagtgtcgtataaacaaaccgcaaaactgtcatttttaaatttttcttgcagacaatagctattggtaccaaatgcatgcttacgaaattctgttgtgcaggactcaaattgcttgggcgtccaactaattctccattaagatctttgactggttatggctacggctttattgtccggaaggcctgtgctaatgaaacctggatcaatggcctgaactgctatagacagggaagaggcccc

SEQ ID NO: 93649 - DNA, 468 bp, Zea mays
  Clone ID: MRT4577_185395C.1
gggaccctcgaggccggccggggcattatgatgatcaaggtcgagcatcgagctcgatcgcacatgtctaagacaaaaatggcgaggaaccagatctcgcattgcattcccctgctggcgatcctactcgccctactaccgctgacgacgaacgccgccctgggcctggaccaaccggcgctgctgaggcagctcatggagtctcgacgatcagcacggcggagcgtgggcgtgtccgacgagaccgacggcggcacgtggaccgacccggtcagcagcttcggcaagctgcccacgtactgcgagtcgcccgagcagcagggcagcaaggaggcggacaggatcgcggcgctgccggggcagccgcggcgcgtgaacttcgagcagtacgcggggtacgtgacggtggacgaggagcacggccgcgcgctcttctactacttcgtggagtccccctacgacgcggcc

SEQ ID NO: 93650 - DNA, 573 bp, Zea mays
  Clone ID: MRT4577_185396C.1
cctcgagccggccgggatccctttcccgactagtcacgtcagatgaatgctccccccaccttctcctcctgctcctgacctcgaattctgatcagctgaatatggaaacccgcggaggctccctgctgatcctcgcggagatgctgctccgcaaggagctcctccccgcctcgacagagggcttggtgcgggtcgagctgaacaagctagacgtggaccagaatggtcgcgtgaacgcgcgcctctccggcgagaagagacagcgcctcctccaccgcaaagccaacgcgatgagctcaagcggcgacaacgactccgacatcatcgcgctaaaaaactacatgaacgcgcagtaatttggggagatcccagtcggatcgctgcaatagaagtacaccgtcatcttcgacaccgacagctccaacctctgggtgccgccagccaagagctagttctcgatcgcttgctacttccacgcgcgctacaaaacagcgcagacaaggactcgctataagaacggaaaacctgctgccattcgctatggaactgcatccattgctggctcttccagcg

SEQ ID NO: 93651 - DNA, 917 bp, Zea mays
  Clone ID: MRT4577_185397C.1
gggtacctcgaggccggccgggggggccgggtgacccagtgaccatgatcacctagccgagctccgtccctccatctgcctctctctctttcttcccgcggcctgtgcccccagattgccgcggcctccggctccgcccctctcctccagcaccagcagtccatctccggctctcttcctccctctcgctaggcgctagctaggctctagcccctagtctggtcctgcccgctgtgcctgtgcggctgtgcgtgcacagcgaaggcgcacagctagcggcttctggccactgggcgtcgccataaacagtggagattcccgcccccattttcccaattatggatatccagcggcgaccgggggagcactgctgaggccgctcgctcgcccgcacgccattgctcccgccgagggtcacaacttatcctacacatcgtagctccgcgacctgttcggcaaaatgaggccttcagatggcaggacacagctttcaggctttgcacagtcagatgaatcaacacttgatgtggaggggcattgctaccaccagcagtcattcccttcctctccatcgatgcaaccgattgcttctggctgcacacacacagagaacagcgctgcgtacttcttatggccaacatcaaacctgcagcattgtgcagccgaggggcgcgcaaactacttcgccaacctttcaaagggactgttgcccaagtctggccggttgcccaagggccagcaagcaaatagcttgcttgacttgatgactataagagctttccatagcaaggtgttgcgttgctttagccttggaacggcggtgggcttccgcatcaggaaaggggctctgacagatatccccgcgattcttttgcttgttgctcgcaaagtcacgagaagtggcttaatccgaccat

SEQ ID NO: 93652 - DNA, 540 bp, Zea mays
  unsure (1)..(540): unsure at all n locations
  Clone ID: MRT4577_185398C.1
gcgatgatcacctagccgagctccgtgcgtgctggtngctctctctctttcttcccgcgggctctgcccccagattgccgcgggctccggctccgcccctctcctccagcaccagcagtccatctccggctctcttccctctcgctaggcgctagctaggctctagcccctagtctgggggtgcccgctgtgcctgtgcggctgtgcgtgcacagcgaaggcgcacagctagcggcttctgctcactgggcgtcgccataaacagtggagattcccgcccccattttcccaattagggcttgtttggttatttccaatccatatggattggaggggattgatacggattggaggggattttgacttactggggattgaaaccccctcaatccccctcaatccatatggattggggtagaaccgaacaagcccttatggatatccagcggcgaccgggggagcactgctgaggccgntcgcctgcccggacgccattgctcccggcgagggtcacaacttatcctacacatcgtagctccg

SEQ ID NO: 93653 - DNA, 165 bp, Zea mays
  unsure (1)..(165): unsure at all n locations
  Clone ID: MRT4577_18539C.1
ccctcaagggcaaaggcccaaacccagccggccagtcccccacccgccagcagccatggagttcggcttccgcgcaggaaaccgcacgcagcgccgcccttcccccgatcgacgcttcacagnacagnaagccggacccttccacggnnaccacccgcagncctc

SEQ ID NO: 93654 - DNA, 715 bp, Zea mays
  Clone ID: MRT4577_1853C.1
gtaccctcgggctcgccgggtattttaaaatattaaatttatccaaacaatttggatatccactttcatccctaagtgtgtgtatgccaattcttagttgaattttaaattattttttatacaatatcatattttggtaaaaggatcggttgccatgttgtgctgttctttttgtgttccttagcacggggtagcattagtatttgacgcccttttgtgttgttggaaacacaaattagtttgaatgggaattacatatcttgttttactgttttagggttccttctttgctactgtgctcctgtgggtcggtactgcatttatgttttttttttctggtctgatgtaatttgtgccactattctgttggcaaaggagttcaggattattttggccgtgtatagcaatagcaactgacatctttgtgttcattgaaagtttttgttcaagagtgtgcagtgttgcaggtcttaactgttgtcaagaaagtaatgtgttcaacatgattgtaaactgaatgcaattctttggctaactgtgtaattataagtcaatgataattgaacattctttgtgaagcatcactgtctgaactgtgcaaatgctacaaccatttcttgtgtccttgtaaatatcaaaattcatatattgcaaaaatactgcattgcatcccgtcgtctgttctaaatcagaattgacgattgctctggtggct

SEQ ID NO: 93655 - DNA, 416 bp, Zea mays
  Clone ID: MRT4577_185401C.1
gaacaagcagaacagtttacagtgatacgaaattgttcacagattcacataggtaacaaagttacaactctgattattgtcatacatgttcaactcgaatatgtggaaaactgtttcaaagcgaaaatgatactaacgaaaactgagacgacaggactcattacgcagacacaactcacatactcaacaaatacggctgaaggtgtccgatgacaaacacaaccaacgataatagtaaacatgtacgactcagttgtccgacgtccacctgctagttgctctttttagtttctaactcgtaagcattgcgaagccaagcgattcttccttcctttgtctccaagtttgcaaaaacatttctatacttcttatgaatcagaagatgcgtggcaaacaaatgtatttcgctcccttca

SEQ ID NO: 93656 - DNA, 1469 bp, Zea mays
  Clone ID: MRT4577_185402C.1
cctcgaggccggccgggaggcgctgcttattgctggaagagagctatagaagaagagaaacagaagaggcacagcttatacccatccactgaccgcgaagtgcacagaggggggaaggaaggagagaccacgtaccgtctgcgaggaggacgacgaagaaggagaagaggctgattcgatcgagcagcatggcgcggcggccacggccgtgtgcccacctgacggccacgctccttctgctcgccgtcgccgcggcggtcgccagagccgccgacggcgacgagaagtgcggcagcccgtgcgggaacccctgcggcgagccgtgcgtgtacgcgagcccgccgccgccgccggtctactacccgccgccgccgccgcccgtgtactcgccaccaccggcgccggagtactacccgccggcgaccccgaccccgaccacgccctactgcccgccgccgccgtcgggcggcggctacgagccgtcgcccggatacacgcccgggtacaacccgacgccgccgtccggctccggctggtacacgccctcgtacaactcgccgccgggcacgctctacccgcaggaccccgggttccggcccaacgccgcgccggcccgcgtcgccgcgccgtggcgcgcggcgctcttcctcgccgccacggcgtcggcggcgctggcccgcgcctgcctggccttgtgacgcggtcggaggccgccggggataggatcacgacctccgccgatcggtgtcgcgtctacatggcgccgcgcacgcgccgtggtgggagtggccgagtgggagggagatcgtcaagggcgtgcatggcgcgcgggtttagttccgcctccgtgtcaataataagattatcagaggaagggttacgttgggtgagatatctctctttcttcttttttttgcacctcagttcatccgtgtgtcgttcgttgggttagtgaattcgtcgtatacttatgtcgttggaacatctgttctcgtggtaggaacacaagttcatccacctatcatcagactctgggaaacattcaaacatgaaacatatatatgttcgtcttctgatcaaactcaaaaaaaaaaaaaaaaaaaaaaagggcggcccccctttttttttttttttttttttttttttttttttttttttttttttttaaaaaaagggtttttttttttttttaaaactaaaaaccgcccaatttgaaccaaaaataaaaacccgggcctgcctttttttttttttttttaaaattaaaaaccgccaaattttatcggaacacacaaacacctccccctggggggaaaacaacccctaaaaaaaaaacctgcttccccaccgggatttgggcgggggggacccacaaaaaaaaaacacacctaccagggggttttttttctccaaattattggcgccctaaccggtgtgcttccacagggtattgttcaaggttcaccccc

SEQ ID NO: 93657 - DNA, 755 bp, Zea mays
  unsure (1)..(755): unsure at all n locations
  Clone ID: MRT4577_185403C.1
tgggaccctcgaggccggccgggccgggctgtatccttacattgtttaattcctcgctgaccgatgaccagacatggagaactcgctcttccttctctgtttgctactctccgcctcctggccactagtcgtcaccacggatcgagaaatccggctacgtgtcgcatgtccagatcggggtcaagtacaagccgcaatcatgcatgattgaagctcactgaggagacgatgatatagctgcactaccgtcgctgaaacttcctgatggaacgtttgttgatgccagctagtgaaagaggcgacccgattgcatgttgaagtgagcactggacaagtgatcaaaggcatgtgatcagggtctcctgccaatgagcgttagagaaaagcgaaagatgtacatcccatcacaacttggatatcgttactcacgggtcgccacctactattcctggtgcagcaacctctcatattctgacacggagtcttgtcgctgtcactgctagcaaccaaccaagcaatgctgacgagctttagattcatcaaacaaatgaatccattcgcctttttactcggaactcagcggatgtaatactttccaagaaatgagccttcattccctgccactttcatagtgtctttcgctgttccacctgacatctatgatttttggagcaactctgatctgttttgactagtttacacgtttgtgtgtggaatctgaagagctgttctgnaatgttactttccttttttaa

SEQ ID NO: 93658 - DNA, 1171 bp, Zea mays
  Clone ID: MRT4577_185404C.1
gtgcggcgctcgaggcggccaggccgggatcattgcttgcttgcggccgcagattaggtacgctagacaacttgagcagggtttattaggccgcggcttattgctatcacgaaccaagctatagaagaagagaaacggaagaggcacagcttatacccatccactgaccgcgaagtgcacagagggggggaaggaaggagacaccacccagatcgagttaccgtctgcgaggaggaaggagaagaggctgattcgatcgagcagcatggcgcggcggccacggccgtgtgcccacctgacggccacgctccttctgctcgccgtcgccgcggcggtcgccagagccgccgacggcgacgagaagtgcggcagcccgtgcgggaacccctgcggcgagccgtgcgtgtacgcgagcccgccgccgccgccggtctactacccgccgccgccgccgcccgtgtactcgccaccgccgccgccggagtactacccgccgacgaccccgaccccgaccacgccctactgcccgccgccgccgtcgggcggcggctacgagccgtcgcccggatacacgccctacacgcccgggtacaacccgacgccgccgtccggctccggctggtacacgccctcgtacaactcgccgcctggcacgctctacccgcaggaccccgggttccggcccaacgccgcgccggcccgcgtcgccgcgccgtggcgcgcggcgctcttcctcgccgccgcggcgtcggcggcgctggcccgcgcctgcctggacttgtgacgcggtcggaggccaccggggatcacgacctgcgccgatcggtgtcgcgtctacatggcgccgcgcacgcgccgtgctgggagatcgtcaagggcgtgcatggcgcgcgggtttagttccgcttccgcctccgtgttaataataagattatatcagtggaagggttacgttgggtaagatatctctctttctttctttcttttttttttttttttgcacctcagttcatccgtgtgtcgttcgttgtgttagtgaattcgtcgtatacttatgtcgttggaacatctgttctcgtggtaggaacacaagttcatccacctatcatcagactctgtgaaacattcaaacatatatattttcgtcttatctgactcccccccccccccc

SEQ ID NO: 93659 - DNA, 924 bp, Zea mays
  unsure (1)..(924): unsure at all n locations
  Clone ID: MRT4577_185405C.1
caaacgcctctctctctctctctctctctctctctctctctctctctctctctctctctctctctctctctcggccgccggccctccgtcgcattcaacacgtacgccatggcgcgcctgctccgcgccgccgccgtcctggcgctcctggccgtctccaccgccgcgctgtcggcgccggcgtgggcgggcggcgtgtccgccggcgacctggcccatctgggcgccgccgtcgtgattcggcgcggcggcgggcgggcgtgccgcggcggtacgacggtgggcgagtgcatggagtacctggacgtggacgccgagggcgaggccgacgtcgccggcatggccacgggcggcagcaagcgccgggtgctgcagggcggctccggctacatcggctacgacgcgctgcgccgggacaacgtgccctgctcgcagcgcggcgcgtcctactacaactgccagcccggcgccgaggccaacccctactcccgcggctgcagcgccatcacccagtgcaggggctgatcgatgcatgcatggtttcacattccattctccggcagcagggtaaatcggttgctgctagcttcattcatgcatgtgtgtggtgcttgattttcttttttggggtctttaattgtcgtccgtcgattattgtggtgcagtggagatgtgtctgtgctgttgctagcatccttttcaggatgaatctaaaagtaataataataattatatatgatgatcctgtaataattctggtgtcgatgatatttacagccaacgtataatttgcaaaaaaaaactttcaaaaaaaaaaaaaaaaaaaaaaaaaaaaaaaaaaaaaaaaaaaaaaaaaaaaaaaaaaaaaaaaaaaataaaaaaaaaaaaaaaaaaggggggngccctttttaggggtttccaagt

SEQ ID NO: 93660 - DNA, 376 bp, Zea mays
  Clone ID: MRT4577_185406C.1
agcgggccatgcttctttaaaaccaacgctgttggaacaacaaaccaatgttgcgcgggccagggagcactcactaagctataacagttttttttgactaacaggcactcaaccatgtttttgaaagcactgggagaaaataaccctacctaaacaacctacgtccgcataattacaggtcggactttacatgaggttatacaggcatcacagcggttcctcattaagggtcgaactggaactggattggtactccaacacccgataatggtgttgctccaagacccgtccattattttttccatgggctaatcaagaagccctaattcacctttttcttttaataagaactacgaactcgttcacgggaacatgc

SEQ ID NO: 93661 - DNA, 218 bp, Zea mays
  Clone ID: MRT4577_185407C.1
gcgtctgctgcggactccgcctccagttgggttcagggggggcctggtgggcgagagggaagagatggcggcgtcggacgttgagtaccgtggctttcttggcggactcgcctgggccacctgcgaccactcccttatcatcgccttgcgcacctacggagaggtcctcgtttcgaaaatcatcctggatcgggggggggggagggaccgcggcttat

SEQ ID NO: 93662 - DNA, 1016 bp, Zea mays
  Clone ID: MRT4577_185408C.1
gtcttacccgccttctttctcgccttgcatcggccgccggccctccatccaccgcaccagctagcaacgacgacacgctagccaggtagcgtagccgaccagcctccgcgcgcgcgggcactcagttcgccatggcgcgcctgctccgcgccgccgccggcctcgcgctcctcctggccgtccttgccccggcggcgtcggcgggcggcgacctggcccagctgggcgccgccgtcgtgacgcggcgcggcggcgggcggacgacgtgccgcggaggcacggtgggcgagtgcatggagtacctggacgtggacgcggagggcgaggccgacgtggcgggcatggccaccggcggcggcaagcgccgggtgctgcagggcggctccggctacatcggctacgacgcgctgcgcagggacaacgtgccgtgctcgcagcgcggcgcgtcctactacaactgccagcccggcgccgaggccaacccctactcgcgcggctgcagcgccatcacccagtgcaggggctgatgcctgcctgatgatttccgttccgtttcgtccccagctattagtcgggtcttcaatttaaagaagaagacatgcatggagcgatgtcgtcgtctttgctgtgcgcgctatagcctttctcgtccgcctgaggcacgcatgactcgtccgtcgattattgtgctgcagtggacatgtgtatgtgctcctgtttctagcatatccccttgctttcaggaagaaagtgaaagtaattatatatatgatgatcgtgtaatattaaaatttcgtctacgagggagaacgaccttgtcatgcagaaaagatcaattcaagtggctcagcgttcggattattggtttagatatactctttaagactagtcattattagttcatgccaccaactgtggttgggctgtcatgtttcatcatatgtggagattgagtcaatgtacctagctaggagcgttgttgttggcataaataaaagcagattcgtttgcttttc

SEQ ID NO: 93663 - DNA, 500 bp, Zea mays
  Clone ID: MRT4577_185409C.1
tttttttttttttttttttttctttttttttttttttgaacatacgattgtttttttttggttcgaatgaatcatgacatcccgcttttttcaaaaaaaaaaaagacccagtacgaaattgtctaaattgtaaaaccgctggtaaatagttccaagggtcctttttgactcaaagcaattttttcaaaatccttcatgactttctgccgttgatttctagcaactcgaccttaaaaaaaagtgtggaattgggagggatgacgttttgacaacctgctgcgccataagcgattgagggaggacatttgaagtaggcttcttgcccaatgctcaattggacgacgccttggtcccaggctttgatcacttttccgacgccgatttggcactcgaatggcttgccgcgatcaccccaagaatcaaattttttaccatccttggattcgagtgtaccgacgtaatggatcttcaccctgtcaccggcgacggggaagttttta

SEQ ID NO: 93664 - DNA, 223 bp, Zea mays
  Clone ID: MRT4577_18540C.1
ccttcttttttttttttttttttttgtgtttcttttttttttttatttgtgattttgccagtacgaattaaaaccggctccttcagttttaatccataaagacaaagtgctgtaaaaggagtccaatccagtgcttattaaaaccaaacgggcaggttggtcctctccagaaggccataaaaagggaaggtcaaccccggggccctggtggccggttttgggt

SEQ ID NO: 93665 - DNA, 971 bp, Zea mays
  Clone ID: MRT4577_185410C.1
gccggccgggctgcggaaaaaaaaatttggcctttctctctctccccatctcctcactacccccagctcaccgctctctcccgtctccaatggcggccgccactcccacctccccttcctccgcccccgcctcccgcaagccccaaccctaggtaggtcgctccactccccacccccacacttctatggctgccctcctcgctctcgttctcctgctgctttccgggggcgctgccggcgacgacgtggcggcgctcctcgagttcaagaagggcatcgcggaccgagaccgggaccagttgctggggtcctggtccccgccggcggcgacggaggccgttatttttggcggcgcctgccccgcctcgtggcgaggcgttgtgtgcgacggcggcgcggtggttggcgtcgcgctcgacggcctcggcctctccggggagctcaagctcgggactctctccggcatgcgcgcgctccagaacctctccctcgccgggaatgccttctccggccgcctgccccccggcatcggctccctctcctcgctacgccacctcgacctctccgggaaccgcttctacgggcccatcccgggccgcctcgccaacctctccagcctcgtccacctgttcctcttttttacaacaacttcacgtccggcttccccaccgacgggatccagcagctgcagaacctgcgccgcttcgacgtccgcagcaacaacttctggggcaatgccaccgatctgctcgccaagctcccgcaagccgagcacgtcgaccccctcgacaacctcttcaccgggaccatcgatctggacatccaaagcctcgccagcatcgggaacacggtcaagtatctcaacctcagccacaacaagctggacggcggcttcttccggaatgagacggtggccgcgttcaagaacttggcggtccttgatttgagcaacaacgggcttggtgggatag

SEQ ID NO: 93666 - DNA, 529 bp, Zea mays
  Clone ID: MRT4577_185411C.1
gggtgcttcgacggataccgatactacctttcatgatagcttcatatgcattaggggttggtatgtgattcgtgtttgggcgattgatcgtccggttggcgatcggtcatacatctttctaccaaacggaactttcccgctataaaaagcctttcagcctaaaaaaaaaaaaaaaaaaaaaaaaaaaaaaaaaaaaaaaaaaaaaaaaaaaaaaaaaaaaaaaaaaaaaaaaaaaaaaaaaaaaaaaaaaaaaaaaaaaaaaaccaaaaaaaaaaaaaaaaaaaaaaaaaaagggggggccccccccacaagaaacccccccccccggaattttttttgggcccgtacccttgggagcacccacttttcctttttggggagggtttaaaaggggggggtttaagggggcaaatatgttcccggggaaaaatgtttttcccttcaaaattcccaaaaaaataacccgcggaaaattaaagtttaaacccggggggccccataggggggccacccccccatttttgggggg

SEQ ID NO: 93667 - DNA, 266 bp, Zea mays
  Clone ID: MRT4577_185412C.1
tcgagctttcttcctcttctatctccttctatcgcagcgtcataaaagttgcaccggcttagaaaaaatgccagagctcttggactttgataagcaacagaggcaactggaagatgatcttagcaagctgcagaatgccctgaagcattggcagacctggcatgttgagtatgagatgctcaaagaagaggtcgaagccgtttgcaagaatagcgagacggagcttaaggctattcctggcgtctccgaaggagagctgctgaaag

SEQ ID NO: 93668 - DNA, 551 bp, Zea mays
  Clone ID: MRT4577_185413C.1
agtaccaagttgcccggttaacggttcaatcctccatgctcaaagctctaaactttgctttgaatctaaaacgggcacagaaaatgcaaaaaaaatatattgaatcacagggttttttttttcacccccaactgcatttctgactaggggcctattaacagcccccatttttcttctgctgtggtgattcaggaattcaatttgtttgcacttatatgccgtcatctggttcactacttaaaatcctaaaggatctgcctccccagaaatgacaattcccagaagaatgctggaataaaatacgcttccgtagagcgacacagcaatgctcttgttaaccgcctgtgctaaagacacccatgatcggcagactgaacatgctggaagcacactatttggtacgactgcctagggccagtgccggcggtcgattggctctgagcaggctgcttggcgccgtttgctggggctgcagcgccttcttctttggcgccatcctttccacacaaccttggccctgccattctttgtgccctttttaacagcaagtg

SEQ ID NO: 93669 - DNA, 565 bp, Zea mays
  Clone ID: MRT4577_185414C.1
aacccgttggggggcaaaacatatcccaataaacattgctttccagggggcatttaaaccccaaaaatttgaaaaacaaaaacccgggtttaatttttgccatataaatctccaacaaccattttttataacccgggggggcccatgttttttttttaacccccagggggccaggcaaaaaaaaacctgggggtaaaaaaaccggtcccccccggttttatccctaaaaatcctgtctcgctcctccttaattttgttcaaaaaaaaaaaaaccttggggttatgcaaacggcccatgaaaaactttttttcctccgcctgtatttcctttatggccctcgggtatggattcggggggggtttcctcctttcggtgggggggatttttttaagctccttgaacccttttttttttgcctttttttttggccgggacttgttatttgctacagccattgaaacattttaatggactccttgttttttaaactccaggacaccccaagaaaacactcgagctggggggggatcaaacccacttattttgattgcatcatggaaaagc

SEQ ID NO: 93670 - DNA, 603 bp, Zea mays
  Clone ID: MRT4577_185415C.1
ttagtggtcttttatctaggttttttcaaagtttaggactaaagaaacacttataactagcttgttctctgaaaaatgtcaaacaacagatttaataattttctaggttcttcttatcacaagagcaatcatttctaaagttagaggtatatctcttcagggatgattttccatgattttctaaagttatccttgttttggccaaaataaaaggtttctattctttttcttcctagaccagggtggtttgtatttttcctaggttttacatcatctacttagtctatgaaaaatagtgagttctctggttttacttatttatcatttttctttatttttatttaggtaagcccctaaattgttttaagtggttaaactctatcaaaagtcctagataagagggttatataattttgtacagtgataaatcctacattgctacttgaaagggaaatagggtcaaacctttttctaaatgaattttggtggttgaattgcccaacacaaataattggactaactagtttgctctagattataagttctacaggtgccaaaggttcaacacaaaccaatacaaagtcaaaagaaagggttcaaaac

SEQ ID NO: 93671 - DNA, 2055 bp, Zea mays
  Clone ID: MRT4577_185416C.1
cacaagcttcccattcttcggtccttctaatgtttaggactcattaccctcttataattatctggatttatgatatttgtcaaacaccacatttaataattctctaggttcttcttatcacaagagcaatcatttctaaagcaagaggtatatctgttcagggatgattttccatgattttctaaagttatccttgttttggccaaaataaaaggtttctattctttttcttcctagaccagggtggtttgtatttttcctaggttttacatcatctacttagtctatgaaaaatagtgagttctctgggtttacttatttatcatttttctttatttttatttaggtaagcccctaaattgttttaagtggttaaactctatcaaatgtcctagatgagagggttatataattttgtgcaggtggtgaatcctacattgctggtgatcaaattgatcacaagcgtccgatttcaaattggtataccctcttcaaaattaatatctaaaaccctcttgaacactaagaggaggatttcattaagggggagttttgtttagtcaaatgaaaagcatttgaaacagggggagaaaatttcaaatcttgaaaatgcttctcaaaatcttattcatatacctttgactatttgcaaaagactttgaaaaagaatttccaaaagattgcaaaacaaaacaagtggtgcaagcgtggtccaaaatattaaatatgaagaaagcatccatgcatatcttgtgaaatgtatattggtttaattccaagcaacctttgcacatatcttatgcaaactagttcaattctgcacttgtttatttgctttggtttgtgttggcatcaatcaccaaaaagggggagattgaaagggaaataggcttacaccttttcctaaatgattttggtggttgaattgcccaacacaaattaattggactaactagtttgctctagattataagttctacaggtgccaaaggttcacaacaaaccaataaaaagaccaagaagggttcaaaatagaaagagcaaaagactactgaagtgtgccctggtctagcgcaccggacagtgtccggtgcaccagggaacccgactccgaacttgccaccttcgggaattcaaggagccgctccgctataattcaccggactgtccggtgtagcaccgaactgtccggtgtgccagcggagtaacggctacacagcgccaacggtcgactgcaacgctatagtgcaacgctacagtgcgcgcctgcgcgcgcagaagtcagagcagcaccagaaggcgcaccggactgtccagtggcccacctgtcagaagctccaacggtcagaacccaacggccgggtgacgtggctggcgcaccggacaatgtccgtggcgcgcagaacaatgtccggtgacgcaccggactgtccggtgctccttgcaacagcagcctcaaccaacggtcaacttggtggttggggctataaataccccccaaccaccacacttcaatgcatccaagttttcagccatcaaacctcacacaagggctatagacttcattcaagacacaaacaaagagatcaaatcctctcccaagtccggagatcattccaatcaaatagtgactagtgagagagagatacttgtgttcatttgagctcttgcgcttggattgcttttcttcttccttctttcttgtgttcaactcacttgtaatcaaaacaagagacaccaagttgtggtggtccttgtagtggacttagtgtcccatttgattgaagagaaaagctcactcggtctaagtgaccgtttgagagagggaaagggttgaaagagacccggtctttgtgaccacctcaacggggagtaggtttgcaagaaccgaacctcggtaaaacaaatcaccgtgtcatccgctcttattcacttgtgatttgtttttcgccctctctttcggactcgtttatatttctaacgctaaccccgacttgtagttgtggcttaaggttgagatttcagatttgcctatttacccaaaaaaaaaaaaaa

SEQ ID NO: 93672 - DNA, 319 bp, Zea mays
  unsure (1)..(319): unsure at all n locations
  Clone ID: MRT4577_185417C.1
ctcttacaccccccccccacaaacnccgcgggccacctccaaccaataatgcatacccacaacaaaacccacacttcaaagacaatcacccccaaaacgcattcaaccaacaccactaacaacaccaaatccaatacccaacacaacgactgcatacccccccaccaaacaacagcacacaacatctggcaagcaacaataggaccaactcacaacttcctactacaacatccacaatgaaaacaccctccaacaactcacccgactaaagaaaaaccttcttaacaacaccaagaccctcactaacaacactaacacc

SEQ ID NO: 93673 - DNA, 383 bp, Zea mays
  Clone ID: MRT4577_185418C.1
gtcctgtactgaccacctttcctccaactccgatcctctaagccatggggctactctaggggaactggtgctctaaacacccaaaccctaaccgcctaacctctgcgctaccggcgtcaccaccgtcagagctgcggccatgaacgccttgctgctcctcggatacatcacccacctcttctcggtcctggggctcctcctaaagatctacgccaccaattcctgctcacgcgtgtcgagggagactcatgagctgtacatgttggtcttcgcggcgagctacctctacctctgcacggactacgtctcgctctacaactgactgatgaagatagtgttcatcaccagctcggccgctattgtcatgtgcatgcgccaccacc

SEQ ID NO: 93674 - DNA, 2751 bp, Zea mays
  Clone ID: MRT4577_185419C.1
atggctgatcgggtgaccatcatctccccgcgcgatccgtggcccttttccacggtgacggcgagcgatctggaggagctggtcggcgaaggtttgcttcgccccctcaccgacgggcagcaacctgagtggattcctcccatgggcggagtcgctccatccccaccgccggggtacgtcgtgagcttcgtctccttccacgagcggggattcggcgtgccgacgggccgctttatgcgggcaatcctgttccactatggggtggagttgcacaacctcacccccaactccatctcgcaggccgctatcttcgtagcggtgtgcgaagggtatttggggatcgccccccattgggatttgtggacccatcttttcctcgccgagcctttcgccttgccgacgggggagaggagggtccgtgcagcggtgcgggccggcgactgcactctcttgctgaggcagtcgcgggcgtcgcagtacattcctgccatcctcgcgtcctcgaacaaggggtggcagcgccggtggttctacctccggaatgacggcgagttgctcccaccgttctcccagcgagtagtcaccgccgccaccgacgcctggcgtcacgggaccccgcacgagagacagaaaaatctcgaaccccttctcgaggccctgaaggcgttgcgggaggggggactcaccgctgcgggagtggttgccgccatccaccgtcggagggtgcttcccttggcggagcggcggctgccgctttgggagatgaccccggaggccgactgggagggctcgcgaatgtcccctgatcctcttcccttcgatgcccttcaatggcgggtgtcggctgcgatggggaagccggactcccacgcctactcccagcttcggatgcgccccgaccaggggtgtgtaactttggaggtggggtggcacaagccctccctgccacgggtcccggaggacgcggtggaccgtgcagcgcggcgggtcgccgcggaggagaagaagaagaagaaggacgcggagaaggcccgggcccgtgagcggaggcgggctcgagacgccttggagaagcgtcgtcgccagcaggagagggaaggactcccgagggagccgtcaccggagacgcccgacgacgacgatgacgacgatgatgaggaggaggacgacatggccgcccgtctcggcctcagtcccggcttggggtgtggccaggagccgtcgagccagcccccgagcgggccgacaccatcagtccccggagttggggtgtcggggtcccggcccgaggcacgggggcgacccgagagcaagcgaagccatggccagaccgacctggcaccccggaaggcccttaagacggcgccggactgtgcggccagcgccgccccgggccttgtcgttcagccgaccctttcgcggggtatttcaccgcagggggctcgggcgtcgcctgtctctggggagcgggctcccgaggccggctcttctgccgaggcggccatcgtggttggggaggcggctgacgccgacgtggtcccgagcccgcctgtcgtgccggccatgctggcgcccgccaccgccgaagttgccgctgtccctgtcagggagcgaccggttgccgccagcgtcgggatggctgatgcgtcggcgcccagcgcctcagaagaggtgggcgcggacgcgcgatccgtccagccgggtggtagcctcatcgctgtgcggcgaagccccgtggcccggcgcccgttgctccgattccggacccgcgaggcctcggaccctgtctttgttctcgacgatgaacatgaggaccagtcctgggacgagctccgcgagcgtgctgaagcaacggtggggtcgctccggtcgtcgctggaggttttctgcagagacgtccccaaaatcctccaggatctgacggaccggagcgccgccaagtcgtcgttcatccgccgcgaggtcgatgtctggggctcgctgcgatccctgaggacctcgctcgccggggctactgcgcgcctctctcagcaggatgccaaggtagcggacctccagttgctctgtgctgacctgagagccgaggcggcagcagcgcgtgcggaggcacaacggcagcgatcggagttcgtccaggtcgtcgaggagcgggaccaatctcggggtcgggctgccgaggccgaaagccgagccaagaccctcgcggccgacctagccgcggcccaggtcgcggcctcggagcagcgtgcccgagccggagagctcgagtccgcccttgacgagtccgccaaggcgctcgccgaggcgcttgccggagctgccgagcagagggaagctgacctcgcggccatgtccgaggccgtctcagacgtttatcgtatcctcggctccggcgacgtcccttcaggaagctcccctcaaagctgccttcaagccttgggtgatcacgcgcgcgacagagtccgcgaggcgctacaccacggcgtcaggcgggccttcgccgtgctcgcttcccactacgttgtggacctggaacgagttagtgaggggtactgtcttcctgacaaagacgaagctaccctggcagaagtccagcggctcgacgcggtcgccgcgggtccgagcgcggcgctggcgaccacctttgaggcggagatccttccccctgcgccgtcaccggaggccgagatggaccttaccgacggcggggacggagctgagggcgcggctccttcccaaggcggcgcctaa

SEQ ID NO: 93675 - DNA, 2123 bp, Zea mays
  Clone ID: MRT4577_18541C.1
cttggtaaggcttttcctccctatttttaattcagcgcacaacaggagttctaagttcacaagttaaagatacatggatgcataataaaagctaaaacatgacctgaagctggtccacacttaggtttcatccatctaatactcatcctttttttcatcaaacggttgttcttcggactcaaactctgctttattgatttctctaaccctagcacttctacgcagctataattgttcttccgctcccactgcatctccaagcacagaccaaagaaaccctgtcccttccatgacttcttcctaaacaagtcaaaaaaaggcaacaacggaaaacaaaagaaaacagaacatacaaaccaaaacaaaaaaaccaaaggaaaaaaaagaccaacaacgaaacaaaagaaaaaacaaaacaacagaaacgacaaacagaaaaggaaaaaacaaaacctgtccggtacaaatacccacacacgtccctattggtggtcccctccaacacttggtgttaaaaaaaaaaaataggaagccgacatcgaagcacgaatccgtgcgacgcggggctggatctcagtggatcgtggcagcaaggccactctgccacttacaatgccccgtcgcgttttaagtcgtctgcaaaggattcagcacgccgcccgttgggaagggagcttcgaggcggcccgccgcggcgcgtcggccgggcgggctgagccaatgcgcacgggcccttggggcgcgcacgccctaacgtgggtcggggcgggcggcgagcaaaggcgccggttgctagcttggattctgacttagaggcgttcagtcataatccggcacacggtagcttcgcgccactggcttttcaaccaagcgcgatgaccaattgtgtgaatcaacggttcctctcgtactaggttgaattactatcgcggcgcggtcatcagtagggtaaaactaacctgtctcacgacggtctaaacccagctcacgttccctattggtgggtgaacaatccaacacttggtgaattctgcttcacaatgataggaagagccgacatcgaaggatcaaaaagcaacgtcgctatgaacgcttggctgccacaagccagttatccctgtggtaacttttctgacacctctagcttcaaactccgaaggtctaaaggatcgataggccacgctttcacggttcgtattcgtactggaaatcagaatcaaacgagcttttaccctttttgttccacacgagatttctgttctcgttgagctcatcttaggacacctgcgttatcttttaacagatgtgccgccccagccaaactccccacctgacaatgtcttccgcccggatcggcccggcgaggccgggccttggagccaaaaggaggggcggtgccccgcttccgacccacggaataagtaaaataacgttaaaagtagtggtatttcacttgcgcccggaggctcccacttatcctacacctctcaagtcatttcacaaagtcggactagagtcaagctcaacagggtcttctttccccgctgattccgccaagcccgttcccttggctgtggtttcgctggatagtagacagggacagtgggaatctcgttaattcattcatgcgcgtcactaattagatgacgaggcatttggctaccttaagagagtcatagttactcccggcgtttacccgcgcttggttgaatttcttcactttgacattcagagcactgggcagaaatcacattgcgtcagcatccttgaggaccgtcgcaatgctttgttttaattaaacagtcggattccccttgtccgtaccagttctgagtcggttgttcgacgcccggggaaggcccccgagggggccgttcccggtccgtcccccggccggcacgcggcggcccgctctcgccgcgcgagcagctcgagcattccgccagcagccgacgggttcggggccgggacccccgagcccaaccctcagagccaatccttttcccgaagttacggatccgttttgccgacttcccttgcctacattgttccattggccagaggctgttcaccttggagacctgatgcggttatgagtacgaccgggcagcggccgcgaattc

SEQ ID NO: 93676 - DNA, 265 bp, Zea mays
  Clone ID: MRT4577_185420C.1
ctcgccgcagaagccatgtacctctacagcctgacgctacagcgcgcgacgggcgcggtgtgcgccgtcatcggcagcttcagcgggcgggactcgaagaagtccgccgcctccgggtccggctccacgcaagagatcgccgtggcccggggcagcacgctcgacctcctccgcccggacccggagacgggccgcctccgcacgctcctctccgtcgacgtcttcggcgccatccgctcgctcgcgcagttccgcctcaccggcg

SEQ ID NO: 93677 - DNA, 2961 bp, Zea mays
  Clone ID: MRT4577_185421C.1
atggagcccttcggggggctggccttcgaacccctgaccagtatgacggcgagcgatctggaggagctggttggcgaaggtttgcttcgccctctcaccgacgggcagcgacctgagtggattcctcccacgggcggagtcgctccatccccaccgctggggtacgtcgtgagcttcatctccttccacgagcggggattcggcgtgccgaccggccgcttcatgcgggcaatcctgttccactatggggtggagttgcacaacctctcccccaattccatctcgcaggccgctatcttcgtagcggtgtgcgaagggtatttggggatcgctccccattgggatttgtggacccatctcttcctcgccgagcctttcgccttgccgacgggggagaggaaggtccgtgcggcggtgcgggccggcggctgcactctcttgctgaggcagtcgcgggcgtcgcagtacattcctgccatccttgcgtcctcgaacaaggggtggcagcgccggtggttctacctccggaacgacggcgagttgctcccaccgttctcccagcgggtagtcaccgccgccaccgatgcctggcgtcacgggaccccgcacgagagacagaagaatctcgaacccctcctcgaggccctgaaggcgttgcgggaggggggactcaccgctgcgggagtgattgccgccatccaccgtcggagggtgcttcccttggcggagcggcggctgccgctttgggagatgaccccggaggccaactgggagggctcgcgaatgtcccctgatcctcttcctttcgacgcccttcaatggcgggtgtcggctgcgatcgggaagccggactcccacgcctactcccagcttcgaatgcgccccgaccaggggtgcgtaaatctggacgcggtggaccgagcagcgcggcgggtcgccgcggaggagaagaagaagaagaaggacgcggagaaggcccgggcccgcgagcggaggcgggctcgggatgccttggagaagcgccgtcgccagcaggagagggaaggactcccgagggagccgtcgccggagacgcccgacgacgacgatgatgacgatgatgaggaggaggacgacatggccgcccgcctcggcctcagccccgactcggggtgtggccaggagccgtcgagccagcccccgcgcgggccgacaccatcagtccccggagttggggcgtcggggtcccagctcgaggcacgggggcgacccgagaggtcacctgttccctcggccggaggagctgaggtggctccgaagggccaggtcagggcgtctgctccccaggggccgtcgctcgtgccggtggcgcatgggggtgaccctcaagtcatcgcggccgtgcccgggcaatctgctccccgggcgtccaaaacgagggtggcgccgaaggtgccggcgaagcggacctcgacggctgtttcgggagccgggacccaagaaggcttcccccaggcgcagtggatcatggcccgaagtggcaagagaagccatggccagaccgacctggcaccccggaaggcccttaagacggcaccggactgcgcggccagcgccgcctcgggtcttgtcgttcagccgacccttccgcagggtgttccgctgcagggggctcgggtgtcgcccgtctctggggagcgggctcccaaggctggctcttctgccgaggcggccatcgtgataggggaggcggccgacgccgacgtggccccgagcccgcctgtcgtgtcgaccacgtcgacgcccgtcgctgccgaagtcgccgccgtcccagtcggagagcgaccagttgccgccagcgtcgggatggccgacgcgtcggcgcccagtgcctcagaagaggtgggcgtgggcgcgcggtccgtccatccgggcggcggcctcgtcgccgtgcggcggagccccgaggcccggcgtcagctgctccgattccggacccgcgaggcctcggaccctgtcttcgtcctcgacgatgaacaggagaaccagtcctgggatgagctccgcgagcgcgctgaagcaatggtggggtcgctccggtcgtcgctggaggttctctgcagggatgtccccaaaatcctccaggacctgacggatcggagcgccgccaagtcgtcattcatccgccgcgagggcgatgtctggggctctctgcgatccctgaggacctcgcttgccggggctactgcgcgcctttctcagcaggatgccaaggtagcggacctccagttgctctgcgctgacctgagagccgaggcggcagcagcgcgcacggaagcgcaacggcagcggtcggagttcgcccaggtcgtcgaggagcgggaccagtctcggggccgggctgccgaggccgaaagccgagctgagaccctcacagccgacctagtcgcggcccaggtcgcggcctcggagcagcgtgcccgagccagagagcttgagtccgcccttgacgagtccgccaaggcgctcgccgaggcgcttgccggagccgccgagcagagggaggctgaccttgcggccatgtccgaggccgtctcggacgtttatcgtaacctcggctccggcgacgtccctttaggaagctcccctcaaagccaccttcaagccttgggtgatcacgcgcgcggcagagtccacgaggcgctgcaccacggcgtcaggcgggccttcgccgtgctcgcttcccactacgttgtggacctggagcgggttagtgaggggtactgtcttcctgacgaagacgaagctgccctggcagaagtccagcggctcgacgcggtcgccgcgggtccgagcgcggcgctggcgaccacctttgaggcggagatccttccccctgcgccgtcaccggaggccgagatggaccttaccgacggcggggacggtgctgagggcgtggctccttcccaaggcggcgcctaa

SEQ ID NO: 93678 - DNA, 2832 bp, Zea mays
  Clone ID: MRT4577_185422C.1
atgagcagcggccagaatggattcctcccgtgggtggagtcgctccatccccaccgccgggggtacgtcgtgagcttcgtctccttccacgagcggggattcggcatgccgacgggccgctttatgcgggccatcctgttccactatggggtggagttgcataacctcacccccaactccatctcgcaggccgctatcttcgtagcggtgtgcgaagggtatttggggatcgccccccattgggatttgtggactcatctcttcttcgccgagctttttgccttgccgacgggggagaggaaggtccgtgcagcggtgcgggccggcggctgcaccctcttgttgaggcagtcgcgggcgtcgcagtacatccctgccgtcctcgcgtcctcgaacaaggggtggcagcgccggtggttctacctccggaatgacgatgagttgctcccaccgttctcccagcgggtagtcaccaccgccgccgacgcctggcgtcatgggaccccgcacgagagacagaagaacctcgaaccccttctccaggccctaaaagcgttgcgggaggggggactcaccgctgcgggagtggttgccgccatccaccgtcggagggtgcttcccttagcggagcggcggctgccgctatgggagatgaccccggaggctgactgggaggggtcgcgaatgtcccctgaccctcttcccttcgacgccctccaatggcgggtgtcggccacgatggggaagccggactcccacgccttctcccagctccagatgcgccccgaccaggggtgcgtaaccctggaggtggggtggcacaagccctccctgccacgggtcccggaggacgcggtgcaccgggcagcgcggcgggtcgccgcggaggagaagaaaaagaagaaggacgcggagaaggcccgggcccgcgagcggaggcgggctcgggacgccttggagaagcgctgtcgccagcaggagagggaaggactcccaagggagccgtcgccggagacacccgacgacgatgatgacgacgatgatgaggaggaggacgacatggccgcccgtctcggcctcagccctggcttggagtgtggccaggagccgtcgagccagcccccgagcgggccgacaccgtcagtccccggagttggggcgtcggggtcgcggaccgaggcacgggggcgacccgataggtcacctgacccctcggctggaggagccgaggtggctgcggagggccaggtcagggcgtccgctccccaggggccgccgctcgtaccggcagcgcatgggggtgaccctcaagtcatcgcgaccgtgcccgggtcatctgctcctcgggcgttcaaagcaaaggtggcgccgaagttgccggcgaagcggacctcggcggctgtttcgggagccgggatccaagaaacctccccccaggcgcggtggatcatgccccgaagtggaaagcgaagccatggccagactgacctggcgccccggaaggcccttaaggcgtcgggggctcgggcgtcgcccgtctccggggagcaggttcccgaggcgggctcttctgccgaggtggccatcacgattggggaggcggctggcgccgacgtggtcccggccccggctgttgtgccggccatgctgacgcctgccgccaccgaagtcaccgacgtcccggtcggagaacgaccggctgctgccagtgtcggggtggctgacgcgccggcacccagtgtctcggaagaggtgggcatggacgcgcgatccgctcagccgggcggtagccttgtcgctgtgcggcggagccccgaggcccggcgccagttgctccgattccggacccgcgaggcctcggaccctgtcttcgttctcgacgatgaacaggaggaccagtcctgggatgagctccgcgagcgtgccgaagcaacggtgaggtcgcttcggtcgtcgctggaggttctctgcagggacgtccccaaaatcctccaggatctgacggatcggagcgccgccaagtcgtcgttcatccgccgcgaggtcgatgtctggggctcgctgcgatccctgaggacctcgctcgccggggctaccacgcgcctttctcaacaggatgccaagatagcggacctccagttgctctgcgctgacctgagggccgaggcgacagcagcgcgcgcggagacgcaacggcagcggtcggagttcgtccaggtcgtcgaggagcgagaccaatctcgggcccgggctgccgaggccgaaagccgggctgagactctcgcggccggcctagccgcagcccaagtcgcggcttcggagcagcgtgcccgagccggagagctcgagtccacccttgacgagtccgccaaggcgctcgccgaggcgcttgccggagctgccgagcagagggaggctgacctcgtggccatgtccgaggccgtctcggacgtttatcgggcccttggcttcggcgacgtcccttcaggaagctcccctcaaagccgccttcaagccttgagtgatcacgcgcgcggcaaagtccgcgaggcgctacaccacggcgttaggcgggccttcgtcgtgctcgcttcccattacgtcgtggacctggaacgggtcagtgaggggtattgtcttcccgacgaagatgaagctgccctggcagaagttcagcggctcgacgtggtcgccgcaggtccgagcgcggcgctggcgaccaccttcgaggcggagatccttccccctgcgccgccgtcggaagctgagatggaccttaccgacggcggggacggaactgagggcgcgactccttcccaagacggcgcctaa

SEQ ID NO: 93679 - DNA, 2005 bp, Zea mays
  Clone ID: MRT4577_185423C.1
gctcttcacacgtacgaagcacgccatcactgtgctaaagattgccccatggcagctccttggcatggagtttgatgttcttgagcctctcaagaagagttatgataacctgcccagtgacaagttaaggctctgcctgctatattgctcattgttcccagaggagttctctatttccaaggattggatcataggctactgcatcggtgaaggtttcatagacgacttgtatactgagatggatgaaatatacaacaaggggcatgaccttcttggtgatctcaagattgcctctttgctggagaaaggtgaagatgaggatcatatcaagatgcaccctatggttcgtgccatggctctgtggattgcatcagatttcggcaccaaggagaccaaatggcttgtccgtgctggagttgggctgaaggaggcaccaggcgcagagaaatggaacgatgctgagcggatttctttcatgcggaacaacattcttgagttgtatgagaggcctaactgccccttactgaagacattgatgctgcaaggaaatcctgggctggacaagatatgtgatggattcttccaatacatgccatctctcagagtgttagatctgtctcatacctctatcagcgaattgccttcagggatcagttcattggttgagttgcagtacctggatttgtataacacaaacatcaggtcacttccaagggagctaggatctctatcgactctgcggttcttgcttctctcgcatatgccgctggaaacgatcccaggtggtgttatatgcagcctcacaatgctgcaagttctgtacatggacctcagctatggagattggaaggttggtgcaagtgggaatggtgttgattttcaggagcttgagagcctgcgtaggctcaaggcgctggacatcacaatacaatctgttgaggctctggagcggctgtcacggtcatatcgcctcgctggttccacaagaaacctactgataaagacatgctcgagcctgacaaagatagagcttccttccagcaacctgtggaagaacatgactaacctgaagagggtgtggattgtcagctgcggcaacttagctgaggtaatcatcgatagcagcaaagaagctgtgaatagcaatgcgcttccccgttccatcttgcaagctcgggcggaacttgtcgacgaagagcagcctatccttccaaccctgcacgatatcatccttcagggactgtacaaggtaaagatcgtctacaaaggcgggtgtgtacagaatctagcatcactgttcatctggtattgccatgggctggaagagctgattactgttagtgaagaacaagacatggcggcaagcggtggcggaggacaaggttcggcagcgtttagagtcatcacacccttccccaacctcaaggaactgtacctccatggcttggcaaagttcaggaggctcagcagcagcacatgtacactgcacttccccgcgctggagagcctgaaagttatcgagtgcccgaatttgaagaagctgaaactctcagctgggggactcaacgtgatacaatgcaacagggaatggtgggatgggcttgagtgggatgatgaggaagtcaaagcttcttatgagccattgttccgcccattgcactgaactcagttttggttgctagagattcttctgttattttagaggttgctcttccccgtgcatgcagtagatcgcgtgaattcagagatggccagtctgcactctgcagtgggtgtgattgtttgtattgtccatcttgcaagtacaagttgggcgattctttcttttttacccagctcgtgttctatagaaagaccagtcagcatgtgtggcagccaggaaactggcagatgtaactgtcgaaatctcctgaacagaatggctggtggataccggtacaaccattttctctaaaaaaaaaaaaaaaaaaaaaaaaaaaaaaactcgaggaaggggcgcggtacc

SEQ ID NO: 93680 - DNA, 399 bp, Zea mays
  unsure (1)..(399): unsure at all n locations
  Clone ID: MRT4577_185424C.1
gagggctagaccaattcaagtatgctcttgggagtgaacttgcacagggcatctgtaacttgaactgtgtctgctgtctttatttagttgctattgctagccacgatgctancggttacactatcgtcgtcagccaaccctccgtctggcccgtcttacgtcgctatggcancctgagtgtcctaatgccctgtacgcacgttatgctaaaacgattcncgagtcttcccgtgcttagcgtgggtacttgcgtgcccgtggtacggactcttgtatggactgcactgggtanccatgttacggcttgggcccatgtgccgccgggcttgcgcagtattgttaccacaaggaccttaagtgccgacagcgtggttggcctattggccttctcggtgcact

SEQ ID NO: 93681 - DNA, 2772 bp, Zea mays
  Clone ID: MRT4577_185425C.1
atgggcggagtcgctccattccccccgccggggtacgtcgtgagcttcatctccttccacgagcggggattcggtgtgccgacgggccgctttatgcgggccatcctgttccactatggggtggagttgcataacctcacccccaactccatctcgcaggccgctatcttcgtagcggtgtgcgaagggtatttggggatcgccccccattgggatttgtggactcatctcttcttcgccgagctttttgccttgccgacgggggagaggaaggtctgtgcggcggtgcgggccggcggctgcaccctcctgttgaggcagtcgtgggcgtcgcagtacatccctgccgtcctcgcgtcctcgaacaaggggtggcagcgccggtggttctacctccggaatgacggtgagttgctcccgccgttctcccagcgggtagtcaccgccgcctccgacgcctggcgtcacgggaccccacacgagagacagaagaacctcgaaccccttctccaggccctgaaggcgttgcgggaggggggactcaccgctgcgggagtggtcgccaccatccaccgtcggagggtgcttcccttggcggagcggcggctgccgctttgggagatgaccccggaggctgactgggaggggtcacgaatgtcccctgatcctcttccctccgacgccctccagtggcgggtgtcggccgcgatggggaagccggactcccacgccttctcccagcttcggatgcgccccgaccaggggtgcgtaactctggaggtggggtggcacaagccctccctgccacgggtcccggaggacgcggtggaccgggcagcgcggcgggtcgccgcggaggagaagaaggacgcggagaaggcccgggcccgcgagcggaggcgggctcgggacgccttggagaagcgccgtcgccagcaggagagggaaggactcccaagggagccgtcgccggagacacccgacgacgatgatgacgacgatgatgatgaggaggacgacatggccgcccgtctcggcctcagccccggcttggggtgtggccaggagccgtcgagccagcccccgagcgggccgacaccgtcagttcccggagtcagggcgtcggggtcccggcccgaggcacgggggcggcccgagggatcacctgacccctcggctggaggagccgaggtggctccggagggccaggtcagggcgtctgctccccaggggccgccgcttgtaccggcagcgcatgggggtgatcctcaagtcgtcgcgaccatgcccgagccatctgctccccgagcgtccgaagcaagggtggcgccgaagttgcgggtgaagcggacctcggcggctgtttcgggagccgggatccaagaaacctcccctcaggcgcggtggatcatggcccggagcggcaagcgaagccatggccagaccgacctagcaccccggaaggcccttaaggcgtcggtctgtgcggccagcgccgccccgggccttgtcgttcagccgaccctttcgcagggcatttcaccgcagggggctcgggcgtcgcctgcctctggggagcaggctcccgaggcgggctcttctgccgaggcggccatcgtgataggggagacggctggcgccgacgtggtcccgagcccgcttgtcgtgccggccatgttggcgcctgccgccaccgaagtcgccgccgtccccgtcggagagcgaccggttgctgccagcgtcgggatggctgacgcgtcggcacccagtgcctcggaagaggcgggcgtggacgcgcaatccgtccagccgggcggcagcctcgtcgctgaggaccagtcctgggatgagctccgcgagcgtgctgaagcaacggtggggtcgctccggtcgtcgctggaggttctctgcagggacgtccccaaaatcctccaggatctgacggatcggagcgccgccaagtcgtcgttcatccgccgcgaggtcgatgtctggggctcgctgcaatccctgaggacctcgctcgccggggctaccgcgcgcctctctcagcaggatgccaagatagcggacctccagttgctctgcgctgacctgagggccgaggcggcagcagcgcacgcggaggcgcaacgacagcggtcggagttcgtccaggtcgtcgaggagcgggaccaatctcggggccgggctgccgaggccgaaagccgggctgagacccttgcggccgacctagccgcagcccaagccgcgacctcgaagcagcgtgcccgagccggagagctcgagtccgcccttgacgagtccgccaaggccctcgccgaggcgcttgccggagctgccgagcagagggaggccgacctcgcggccatgtccgaggccgtctcggacgtttatcagaacctcggccttggcgacgtcccttcaggaagctcccctcaaagccgccttcaagccttgggtgattacgcacgcggcagagtccgcgaggcgctacaccacggcgtcagacgggccttcaccgtgctcgcttcccattacgttgtggacctggagcgggttagcgaggggtattgtcttcctgacgaagacgaagctgccctggcggaaatccagcggctcgacgcggtcgccgcgggtccgagcgcggcgctggcgaccaccttcgaggcggagatccttccccctgcgccgtcgccggaagctgagatggaccttaccgacggtggggacggaactgagggcgcggctccttcccaaggcggcgcctag

SEQ ID NO: 93682 - DNA, 494 bp, Zea mays
  unsure (1)..(494): unsure at all n locations
  Clone ID: MRT4577_185426C.1
tttttttttttttnnnnnnnnnnnnnnnnnnnnnnnnnnnnnnnntaataagtctaaataacaaccacatctaaatcatgaacaagccaaaaaaacagagtatggtatatacacactcctgaatttgatgcatatctacatctatctcagtgtaaaaaaaaggatttcctagaagagaggagaaacgagattctacggcatcgtaagtgccatgagattggagcgcatacgccacgagttcacgatgcacgcacgtcccaaactcgccatggatgctgattggtgaattgatgatcctctgctccggtgatcaccacctgacaaacttctgcacgccttcgaagaagtccagcatgtagcactcgaggtcgtcgaggctccacttgacgtgtctcgccgggtgccgggtgccctgcccgaggaacgcccggtacgccgggatcagccgctccgacaccgcgatgcgcagctcctcacggagctgggcgtccgcc

SEQ ID NO: 93683 - DNA, 368 bp, Zea mays
  Clone ID: MRT4577_185427C.1
aaaaaacggggaaggaccccttcgaacttatttaagaacagttttaggggtatttcgggggccaaaataagagggaagggggggggaaaaccaccttgccaaagggctgacagagcactttggggggcacctgaccaaaccatacctggcttttacaaccacaaacatttacctttggtgggaaccagggcccaagggaaaaataagatccggctgcaagctgcatttgctttaacatcctaagggggggccctccacaaaatttacaacccttatttgtgggacccgaccacccttttggggggaaaccccttcccttttggaaagaaaaaaaccgggttgaggcacaacccgccttttgggggcgg

SEQ ID NO: 93684 - DNA, 373 bp, Zea mays
  Clone ID: MRT4577_185428C.1
tagtgagtggaacatggtggtcacacactgcagggggctgcttcacacacgtaggacaccaggctggctttttggaacggttgctgggcagttactgtggaggcatctgcatggcttgtgtggctatcgcgaagtggtatcacaccatacatgcactgctacagactgcacaacatgggatgacggtctctggacagggggttttagtggatatgacccgtgaccctgactgggcatttgaggatgctggtctggaaatgagagagggctaagatactgcatatcatgctggtctttattaaactgatgctcatagagtagcatttgaggtactgcttcaagatctttcaaaattcaggctgaaagctgttac

SEQ ID NO: 93685 - DNA, 791 bp, Zea mays
  Clone ID: MRT4577_185429C.1
cattactctcaggaacggatatctcggctctcgcatcgatgaagaacgtagcgaaatgcgatacctggtgtgaattgcagaatcccgcgaaccatcgagtctttgaacgcaagttgcgcccgaggccactcggccgagggcacgcctgcctgggcgtcacgcactagctcgttccccttctagccttaaaccttcttcccccatctcacgaaaaagggcaacatctaggcggcggcggcgggcggtgatcatggcggagctgaagcggctgtcggagagccgcgacctaacccgcatcgagcggataggcgcgcactcccacatccgggggctggggctggactcctccatcgaggcccgcgatgcctcggaggggatggtcggccagctccccgcgcgccgcgccgctggactcatcctccagctcatccgccaggggaagatcgccggccgcgccgtcctcctcgcagggcagccggggaccggcaagaccgccctcgccatgggcatcgccaagtcgctcggcgccgagacgcccttcgcctccgtcgctgcctccgagctcttctccctcgacctctccaagaccgaggcgctcacccaggcgttccgccgcgccattggcgttcgcatcaaggaggaagcggagatcatcgagggcgaggtcgttgagatctcaatcgaccgccctgtctccgccggtagctcgggcataccttcagtgctaccgctgccggcaagactggaaggctcacgctgaagactacggacatggagacggtgtatgagct

SEQ ID NO: 93686 - DNA, 624 bp, Zea mays
  Clone ID: MRT4577_18542C.1
gttgatcaattattctgtgcatctgctcctcatcccaccggatgagtaagcaaggcgcagtagcacctatcgggctgccgccgcaaagaaggaacgcgaggaaatcagcctaactgattacctgctatagttgccactcctctatgcgcaaatgaccccgaccgcgactcctccggcgccgccgggcacctcgtcgtcgtactactacacctcgcgtgtgagggtgtcgaacttggccggaaagcagcaaggcaatacaagaaaacacgaatagagccacgccacatccagattgttgtgcggcaacgaggactagctgactgatatggtagcggctgccaccatctggagcagagcgggtatgcataaaatacatcagcagctgttccacaagaaaagatgcctcctccaaagacaatgccgactacaaccacaaatgtaactgcttgctgcagaagtgatacgatcacctgctatgtacttcgacgaataggatgcatcggtgtctgtccaatgcccaggagaatgctatgttgggatatacagtgacaatataagctgtgatgatgcatgtgatgagaacgtcgaatgactgatctcacgatggcatgctcggtgagaaag

SEQ ID NO: 93687 - DNA, 247 bp, Zea mays
  Clone ID: MRT4577_185430C.1
ctgcatgcaattatgtatgtttttctcagaaattgtagttggaacccatctaaatgtgtataaatataaccattaccatttcctctacctacagcaggatggaaatactgtccttacaccatcgttttctttcataataaatactgtccttataccatcaattcctttcataagtctttgggcatgttgctattaactaatccttctctgtctaacataccttttcctacttgatgagatcttgata

SEQ ID NO: 93688 - DNA, 1346 bp, Zea mays
  Clone ID: MRT4577_185431C.1
gatttttcagtttctaagcagggctaagcattatgagttctttttataaaactaggattaaggagtttccaaggaatggtaatgcatcaattgtttatcacacaactcctatcacctaatgcatcagataaggtgaaaaagcacttaaaacacaaggaaggggcaaatgcaccggggcttgcctggaataacactaggttagtgttgttaggcgacgaccacttgacgagtatccctcgatcgagcacttgattgatttaaccatcttcaagttggtccatcagcttcatcttgcggattagcccgtgcttggggtcgacttggcttgtctttcgcatcacgtggttaattcacgtactgtttccatagctgacacgaatccgcgagattggtagtgattttccgatccaggcaatatgtcgagcgcttggggaataccactcggctagcttcgtcttcactcgacgtttgggatttcttggggatgcacgaacgacgacgagatcgataaagtcgaggaaccagcggacgagtagcacgctgacaaatccaatatagagctttgggtacgatcgagggcgctggtgttgcagctaggacatcccgacgatgacactacggatggtgaagacaaagtgatagtgtgaagcggtgtccgtgaagacaaccacgtgtggatagttgcgtggcatcgacgaccaagacaacgcgtggcatcgacgttcaagacaacggcgaggtccgtgcagctaggcgaaaatatttacgaaggacacggcgagctagagcagacagccatgggagatgtagagccgagctgggcgacaaagcgaaatccgggctggggcgttgacgagcaaagagcttcgcgcgcgcaagaataacataacgctatgcgcgcgacgcaaaggcgagcaggacgcagctatcaggggagcttcggcggcgagcaactgagaacggctcgactatggcgaacagacagctcatggcctgcgcgaggggatcgacggcggacggtgacacgggcgcagagaaggatccaggggacgcaaggggaacagggagcaggagagcgtgacgaatggacacgcagggagccatggagatgggcgccgagccagaggagcaagggctaaaggacgcgcacaggacgcgagcagggaaaaggcaacgaccatggcgacgagctccaagcagagggaggccgatggtctggccgagcagggaggaagctggagcaggggcatcccggcgagctcgccatgggagccgctcggccatgggcgcagcaagccagggatgagcagccggcgcgcataaaaaggagtcaggggcggtccggc

SEQ ID NO: 93689 - DNA, 335 bp, Zea mays
  Clone ID: MRT4577_185432C.1
aaaaaacattttcgcattaaacggatcatggttccatggctaggctttcaggttccaacgaggggggataggcacttttcccttttccaaaagataaaaccccaattccacttccacccggaccccaaaaaaaacccaaaaaaaatttttctttgattaaaggtaaaggccctggttgcactgacgggcaccaatttagcggataaacatcaatttttttggaacttcctgtaatcccaactaaatttgggggcccccccaaaagattccctggttacttttttatttttaaaagttgacttaacccggttacaagtggtgggctccccattttt

SEQ ID NO: 93690 - DNA, 351 bp, Zea mays
  Clone ID: MRT4577_185433C.1
cgaactgtgtaccgggctccccgcttacgcgagcgctatattcggctcgagcaggagtctctagggggctaattgaaaaagtacaatagacgtgatctttgcgaaaggctcgtctctatatgattcttcatacatattgtcttttatctgcatttatggtctagagtctctaggttgtattgtatagtttgttaattgtcccttgtatttagaaaactggaccactgtctaaaggttgtacgtgcccttagttgtcttttatggttggagaatcgttctgatgtctctcgactatacatgccttaagaccttaagagccatcaatctttgcctttgtccatgttcttagtc

SEQ ID NO: 93691 - DNA, 485 bp, Zea mays
  Clone ID: MRT4577_185434C.1
gcgaacaaaaaccttgctcattcttttctcgtcttgtttcatagcgggagcaaccaaagcgaacaacagggttccaacacctaattctttggttgaacccccacggagaaaaaaacatgtgccgcccgaaacacaaaaggggggattgttttgacaacaagaaacattgtcaacccaggcccacacatttgtttaaaaaaacgacaaagtcaccggcggcgtttttggaaacgccaccatggggccgaccgaagtacccgccaccggcttcgtaaacggcgaccccaccttgggggcgaccgacgtagccgtcaccgtcgtcataaccggcgccacggcaccagacaccataaccggcggcggcggcgaaaccgccgccggagccaccgtcggcaccgccaccgccacgggactgggcctggataacggtgatgttacggccggcgagctccttggcgttcatgttctcgatagcggcaaacatg

SEQ ID NO: 93692 - DNA, 1202 bp, Zea mays
  Clone ID: MRT4577_185435C.1
gggacctcgagccggccgggaaaaatgaaactcgaccccgcgaccgcttcctctgctcctcttcctcctctcctctcctctaggctctagtcctctcgcatccgcagcttccccagccagctagggtttgcagatgacgaccgcggcgcgccccacctgggcgccggccaagggcggcaacgagcaggggggcacccgcatcttcggcccctcccagaagttctcctcccgcgacctcgccgcgcacacctccctcaagccaagaaaagacggtcaacagacccaagaggagttacagaagaggaatctcagggaggaacttgaggaacgtgagcgcaagcactactcttccaaggataagtcctatgccgaagaaagagaccggcggaaaagctctagccatctactcttagaaggttcaaagagagagacagaggataagatagttccacgagaaatcgatgctgatgactccgatgtggagcctaaaagcgatgacgagagcgatgaagatgatgatgacgacgacactgaagctctaatggcagagcttgagaggattaagaaagaaagagccgaggagaagcttagaaaggagcggcaacaagcagaagaggaggccaagatgaaggaggctgaactgatgcggggaaacccgttgattaatatcaacaatgctggctccttcagtgttaagagaaggtgggacgacgacgtggtattcaagaatcaagcacgaggagagaccaagacaccgaaacggttcatcaacgacaccatcaggagtgatttccaccgtaaatttcttcagaggtacatgaagtgacgcttccgtcgttcacaattcagcctggagcccctcatcgttatcatgtttgtgtatgagcgaaagatcattattgtgttgttgtatgaaacaagagtgtaaacatatgtctactacttaacaaagttatgctgagcaatgcatatcctagttgaatgtgacaatgctatgttttctatattttgacgttatttggttgtaatcatatttaagtttgactaggaaagatgagctcagagaccagcacagatggattgagtaagggtgtgtttggttgagtggagaacggttgtacgaaagaggggcgaactctataaattattgggatgttcttgctccaaaaaaaaggaaaaaaaaaaaaaaaaaaaaaactcga

SEQ ID NO: 93693 - DNA, 670 bp, Zea mays
  Clone ID: MRT4577_185436C.1
cattgggtacctcgaggccggccgggcggtccttgtgcggtgcgtacacgtactgatcacgaacgcgtcaggccttgctactgcaacgaagcgaacgaaccatgtcgcctgcccatggaacgagggctccacaccgtgcgtgccgctgacatcctcatcaaaggcgcaggaccatcgccgaaggaggcatactggtcggacgcctgactcccgcatcatctcgcaatgcacacaccaggagacagcgcactacacgtcctggacccccctgaccggatctgtctccgagcaaacaacttcaccgagtcagacaggtcgttactcctgactgctcttccgtgtgactctttgtcacactgatgaagaattgaatagagaggtatatcacagaccctgcctggacgtcacatatgcactctctactagggagcactcccacctcgtgtacactgacagcgggggacacatcatcctgcggactgcctgaggaggtgatcacactggcctctcgtgctttcaaatagagcatatggagatctgtgaaaacccgcatttggatcgccgctgcgagcatgagatccactcggagcgaacagaaatcatgtgtgacgacacggtagaaacaccatttatgcttagactgcattagtgatgatgcagcgaactcctg

SEQ ID NO: 93694 - DNA, 695 bp, Zea mays
  unsure (1)..(695): unsure at all n locations
  Clone ID: MRT4577_185437C.1
aattcggcacgaggcgcatttcgaagcctgagtgcccgacttgccccctccgcctgcccccacgccgccccgtgaaatcaatcagtccaccgctgctcctcgccgccacgccggagcggagctacctgtgtggccgcgccgaactgcccgcttcccgctctcctcattcgtcacctccgtctcgcgtccccgcgcttatcagagaggcaacagccgccgctgcgtgccccgttcgcggagctatacggggaggccggggtccccggcggccgccgcccgttcccaagctaccctgggcggattggtttctgtgaatctctgaggcggagaagaccaccccagggcccaacacggtccgggaaccgactggggcgccgctcggccgacgatgtcgtcgagcaggttctcgccggcgctgcaggcgtccgacctcaacgacttcatcgccccatcgcaggactgcatcatctccctcaacaagaacacctgctcctcctcccgccgcccccagaatattgaagccggatggttgaagtggcgacaagctgcgggtgtcttatgcgaccaccgggtgccacgcaaactaaaaggcaaattctacaggacagncatccggccggctatgttgtatggagcagaatgttggcccactaaaagacacatgtccaacaactaagtgtggcagagatgcgtat

SEQ ID NO: 93695 - DNA, 742 bp, Zea mays
  Clone ID: MRT4577_185438C.1
aacccccgggtcgaccggacgcctccatcctgatcgatcgtttgattattggcgagcttcattccattccatcagttcctttggcggaggatgtcgtgctgcggaggcaactgcgggtgcggctccggctgcaagtgcggcagcggctgcggagggtgcaagatgtacccggacatggctgagcagcaggtgaccaccaccgccaagactctcgtcatgggtgtcgcaccatcgtccaaggggcacgccgagggcgggttcgaggcggcggccggcgccggagctgagaacgaagggtgcaagtgcggccccaactgcagctgcaacccctgcacctgcaagtgagctgtataataaccccctgcactgcactgcagcccggaggaaggacggactcccctagctagtatagcagtgtcgtcactgcagtgtgtgtgtgtttgagtcagccagtcagtcgagtgccatggcaccatatgctagtggttctggtactgatgggaaccaataataattgtactgggatgttggcgtcgtgtcgtccttcccgtgctcctccgggggctcatctactagcagtcggtgttgtgttgtgtgtttgtgggtgcagtgcagcacagcagcaggccatgccccctgctctgtgggcacgtcgatcgtgtgcgactttgtttgtgctctgtcaccatccatctattacctataatatcccccgtctttgtgtactgtgcgtacccttatt

SEQ ID NO: 93696 - DNA, 641 bp, Zea mays
  Clone ID: MRT4577_185439C.1
tacagtttcttgataggaattcacttttgtgatgacatctctgcctcaaagagggatcctctacttttactgcttctccaagtaagtcatggcttgtttgatctggaccttgacagggtcagatacctgttataatcgttgtgttgatccttaatcagagcgtttaatcaagagtgaatcatttcaaggtggtggcacaacagagctttgcttctcagatgatgcttttgatatggtacctgattgcagccggtatgttacagcattttatctagggatctatgctctgttgcaatttttatgtatcacatttgcatatcatcactgctgttaccggcatatcactttgctttatgtgatcttagaaattggatagtccattcacttcacctaccattttataatcgtcacagtttagttttttaataaactgagaatctaatatctataaactaagtcataaactagtatgtttggaaccacctcaatttctataaaccagtttcttagaaatttggtgcttccaaacagggccctagttgttcgcttatgtgtatcagagaatgatatttgcctcttctagttaaaaacatccaatgctccagacctcgaataatatagtttagcttgttctctaatgt

SEQ ID NO: 93697 - DNA, 436 bp, Zea mays
  Clone ID: MRT4577_18543C.1
gggacaaaaaggctttgttgttgttgttgttgttgttgttgttgtatgtaaaaaataatcccctaccctaaccgggcaaaaaagacctaatatgaactatgtggcattgccagtacgaagaaatggacacccaaattgaaagtcaaagaggacatgaacctgcaccttgcacaccaactgatatcagctcagttcctagtaaccttgtctattaaatggattaatcaaaactgaactgcaaagtgtgttaagtattgctgataaccttggctataatctaaatggttgattctactgtatcaccaaaatcttgaacctcatgaacccatggttcttttaacctaccgaacaccttcaattatcaccctttgaatgtattggagttttccagcacttcttttggctggagagaaatgcaccactggtcttttaactt

SEQ ID NO: 93698 - DNA, 809 bp, Zea mays
  Clone ID: MRT4577_185440C.1
ttgggatcctcgccggccggaaaacttgccaagaacatgacctgttcttaatagacacggatcccgaatccatggacaacgacagcaagacggacggtacaagaagctgattctttggccttggtcgattggattgcagagccaattagctaggtagcagtgatggcggcgcatttgccgtctttctgttctcgtcatgccagcatggcggtggcggcggcgctgatgattgtaatggcgacggaggctccggcaggcgtggcgctgctgaaggacgacattggattcatgtggggcccggaccacagcttcttctacgacgacggcaacgcgctcgcgctgtgcctggagaagtcccacggctcggggttccgctccaacgccgccaacctctacgcccgctacgacatcgacgtgaagctcgtcgccaacgactcggccggcaccgtcaccacggtctacctgacgacggacgacgtgcggccggggtaccatgacgaggtggacatggagttcctgggcaacgtcaccggcgagccgtacacgctgcacacgaacatcttcgtgaacagcgtcggcaaccgcgagcagcaattccggctctggttcgaccccaccaaggaattccacacctactccgtcgaatggacgcccaagaacatcatattcctcatcgacggcacgccgatccgcgtgtacaagcacgagccctcgctcggcgggacgttcccgacgcagcggcacatgcggctggacgggagcctgtggaaacgccgacgactgggcaacgcagggcggccctcgagctc

SEQ ID NO: 93699 - DNA, 772 bp, Zea mays
  unsure (1)..(772): unsure at all n locations
  Clone ID: MRT4577_185441C.1
acaactgcccagctcaggccgcctccatctcctcctcccagactcctccctctcctccggccgccgcacggagaaggacgagccatgcaggccgccgcagcgcgcgcgcgccgcctcctcgcgtcaccggcggcctccgggatccagggaatcctctccgcctctcaccgcgggtgcgcggcagccgccgagctcgcgctcctgccccatctcgagaatggcttccccgcctcgcgctcctctccagatcacaccaggagcttctcctcccacctacctcgtactttgctatcgcgaaccgtaacttctcactgccggtgtaagaaatcagtgtgcttgtgtagctatgcacactcaagcggatatcacatggccagagctcatttgtcgacagactcaagcggaatcgaccaacctaaagaatctgcagaggagctgtaccagaaaatgctgaagtctgttgaagcccagactatgccgccaaatgcctggttgtggtcaatgatcagtagttgctccagtgaggaggatataaaacttctctttcagattttgcagaagctaagaatattcaggctatcaaatcttcgcatcaatgcaaacttcaacgaccatctctgtatgaaagtttctgaggcttgtgctcgtgtgngtgtcgttgactatggngtgaaggttttatggaatcataatgtttatggaataacgccaaccattggttctgcccattatctactggcacatgctaaagagcacaatgatactaaactaa

SEQ ID NO: 93700 - DNA, 204 bp, Zea mays
  Clone ID: MRT4577_185442C.1
cccactcgtccgaaaaaaaaaaaaaaataaaaaaaaaaaaaaaaaactaaacaaaaaatgaggggggactctaccaatagaaggttataaacactctctcatgcaaggataatcaatactctagaacatgctctaattacattaacctttcgaattattacatatcatttactgttacaacacgatggattcacccattaataa

SEQ ID NO: 93701 - DNA, 854 bp, Zea mays
  unsure (1)..(854): unsure at all n locations
  Clone ID: MRT4577_185443C.1
ctgatgaattaaccagactcacaaacagcccagctcaggccgcctccatctcctcccacactcctccctctcctccggccgccgcacggagaaggacgagccatgcaggccgccacagcgcgcgcgcgccgccttctcgcgtcaccagcggcctccgggatccagggaatcctctccgcctctcaccgcgggtgcgcggcggccgccgagctcgttctcctgccccatctcgagaatggcttccccgcctcgcgctcctctccggatcacaccaggagcttctcctcccacctgccccgcactttgctatcgcaaaccgcaacttctcattgccggtgtaacaaatcagtgtgctatcacatggcaagagctcatttgtcgacagactcaagcggaatcgaccaacctaaagaatctgcagaggagctgtaccagaaaatgctgaagtctgttgaagcccagactatgccgccaaatgcctggttgtggtcaatgatcagtagttgctccagtgaggaggatataaaacttctctttcagattttgcagaagctaagaatattcaggctatcaaatcttcgcatcaatgcaaacttcaacgaccatctctgtatgaaagtttctgaggcttgtgctcgtgtgggtgtccttggactatgggttgaaggttttatggaatcataatgtttatggaataacgccaaccattggttctgcccattatctactgcaacatgctaaagagcacaatgatactaaattaatggagaagataatgcaagtccttangaggaattccttgccattacaccaggcactgctgatattgtcttcagtatctgctatacactgat

SEQ ID NO: 93702 - DNA, 340 bp, Zea mays
  unsure (1)..(340): unsure at all n locations
  Clone ID: MRT4577_185444C.1
tcgcgatcatatatcgtccgctctcatcgtctcatcgcaaaagccaaatgtggcgaacggccgtcgtgactgccgcggccttggcattggccgtgctcggcgcggcggcgatggcagcggcggcgccgcaggtgccctgctacttcatcttcggggactcgctcgtggacaacggcaacaacaacttcatcgtgtcgatggcgcgggccaactacccgccctacgggatcgacttcgccggcgggcccaccggccggttcagcaacggcctcaccccggnggatgtcatcgctaagctcctgggttttcgacgacttggtgcccccgttctccgaagcaa

SEQ ID NO: 93703 - DNA, 548 bp, Zea mays
  Clone ID: MRT4577_185445C.1
aaaaaaacctttttttttgaattttttttgggccttcccccccaaggggggacccccccccccgggcaaatggaaaattccaaaaagggagggctttttttaaaaccgggggggggtttcccttttccgggaaacttctttacccttcaaaacttctggacctttttttttggccccccccccctttttggtttctttaaccttttttttggtttcccgggggttttggttaacctttttaaacccccccttttttcggggttaaggttttcccccccttttttttaacttgggcccccgtttttttgccttgccccaaaattcggggggttttggggcctttaaggaaacccttgggtgtggggggccaaccaataacttaattttgggggaaccctcccggaacttaaaattggcccctgggccaaaattcttgaaaccgggggaacccctttttttaaaagcgcccccccccgggggggaccccaatttttttccccttttagggaggttaaatgcgcccctgggcaaaataaggacaaaaattt

SEQ ID NO: 93704 - DNA, 361 bp, Zea mays
  Clone ID: MRT4577_185446C.1
ctgatgactggacatgaaaggaatgaacttgaaggcgcaaaacatagctcagtgaccggggagatggctgatatgacaacttactatcaatgtgctgttattgatgaaattcacatggttggctgctaatgacggggttattcgctcacacatgcacttgtgggacttcgttcatatgaacttcatgactgaggtgaccacacctgatcgacctcttatccagcaaattctcgaagctactggtgatgtagataccgatcaatattatgagagactatctactgtggatcctctgaacatctcactagggtgtttctgtaacatcacagcatgagattgcttattatgattctcaatacgt

SEQ ID NO: 93705 - DNA, 1031 bp, Zea mays
  Clone ID: MRT4577_185447C.1
cactcctatgggcgattgggttcattggccggccggggtgctctccaaatcagctgagcaaccaggccagttccaccaagctaaggaggtgagaatctctgtaaaacgctaaagaagaaaaaaaaatgaaaggatccagcgagcctggcgagacctcgaagcaggcgcccctgggcagcaggggtgtcagcaaaggagtgtccgtgcttgatctaatacttcgcttcattgccatcatcggcaccctcgctagcgccattgcaatgggcaccaccaacgagacgctgcctttcttcacgcagttcatccggttcaaggcgcagtacagcgatctccctactctcacgttcttcgtcgtggcgaattccattgtctgcgcttatctcaccctgtcgctcccactatctatagtgcacatcattaggagcagggctaaatacagcaggctgctcttggtcgttcttgacgcggcaatgctagcactggtgactgcgggagcatctgcggcagcggccattgtgtacttagcgcacaaaggcaacgtcagagcaaactggcttgccatttgccagcagtttgactcgttctgcgagcgtatctctggatccctcattggttcgttcggagccatggtcatgctcgtactgctgctactactctccgccattgctctagccaggcgctaggcggtgcgtgttgcggttatcggactccgctatcctcgtgtaatcatacgtgtgtctattatacctctcctgctatgatcctctcatatatccccaattgttggcttgattctgcacttcttttcttctgatggtgtgcactatcatgtatatatataagctacgaaaaaaatgaatatacgtgaaccattatgttgtatagacgctccaaaaaaaaaaagaatatacgtgaactattatgtatggatcaccgtagtttctgaaagacttgttgggtattgtattcccttatcagaacaaaaacatgaaagattatcttacaaaaaaaaaaaaaaaaaaaaagtc

SEQ ID NO: 93706 - DNA, 201 bp, Zea mays
  unsure (1)..(201): unsure at all n locations
  Clone ID: MRT4577_185448C.1
cggccgaaaaacccgggccacgcccacccctccgccccttggggtnaaanataaaacgtccctgccatttccaaaaaacttacttttgtcaatgggggggggatacacatgtggggggatccacaaaaaaacaattgaaaaattttataaaaggacgcttgcccaaaatggaaaaggacttcttcaaaatttccttggtct

SEQ ID NO: 93707 - DNA, 420 bp, Zea mays
  Clone ID: MRT4577_185449C.1
acattatgacatttatggaatgaatttgcaattcttctactgtcaatatctgactacatcagtactgagtgggcgggggcatgatatgctacatattgaccctgcaagagcagcgacatgcgttgctcttgcagcagtgtgggtaaagaatggatgaatgatatgctctgacatgtgcaaaggagagcctcaccgttgatgacatacatataacttggctatatgataaagggcaatcctggtctttcattcgaattgaccagattactcagtgacagactgcagggtggctcaagagttgaggtcatgatacttcgagtcttatcaaggattggctgcgtcttatctagcactttctaaatgcaactatgcattattcactgcacgcgaggctatgaaggctatgcataagtctgcaga

SEQ ID NO: 93708 - DNA, 141 bp, Zea mays
  Clone ID: MRT4577_18544C.1
accactcgaccgagtactctcaataccacttgtttcagggccaaccacctcatccttgtggcggccttctagtgctgcgggggatcccaggtcaaggacatggtggtaatagccgcctgctgcttctgatagcagcaaagc

SEQ ID NO: 93709 - DNA, 283 bp, Zea mays
  unsure (1)..(283): unsure at all n locations
  Clone ID: MRT4577_185450C.1
atggcgcgtgggatggccaccaactagcgtcttagnaagctcaagttcgaaccgaccatggcggccgaaatttttgggcgagttatgcttcttgttgtttgtgtgagtgctgttacctcctacattttgaatgagtgctgacacgatactattgctgagattattcttgcggacctctcacaagcggcgttttaagcatgcgaaaacataatttttctatgctataggatgcaccaggccatcgagcttggcatcctaactttatcaggcttgatgctccaac

SEQ ID NO: 93710 - DNA, 491 bp, Zea mays
  Clone ID: MRT4577_185451C.1
aatgatggtataattaatataatataggtgagtaccaatcaatatttcatacataagtgtactctaaatcaaaccaaaacactgggataatcttgtaaatggattctacaacaatgtagcgtctaatctttttagcacgtttatttccacgagcaagtttttccaaagtgcttgcaagtgaagccacatcattgtgcttgaagtacacaacagtgcttcttgatagatggagaccattttgcactgcccaatgaacaccctcatcactggcaatctctaaataaccgctcgttcttgcagctgaacattattacatacaatagaaccttggatgtggcaaccatcttcaacaacaagattcatcacaaccgagttgacaatcttatagggtggttacagatgcatcaactactccgtctggtactggcttgcttttctgtactctgtgaagaactccatttccactgagttctttgaagctttttaaaaat

SEQ ID NO: 93711 - DNA, 297 bp, Zea mays
  Clone ID: MRT4577_185452C.1
gcggcgctcgagggccggcgggcgggaaacaatcagatagagagagcatagtcgatcatggagggtggcaagaaggaagtggccggtgcggtggtggccatactgctggttctgcagctcatggcagctccaccgacggccatggccgcccgctcgccgcgcggagcctttccaaatgggatgcgtctgcctaaaggcaagatccgactttagggtgcccaacattggcaagactctcgcgtccaggcaacagggcaacaggactgcctctgatggcctcaaccaccgaacctttga

SEQ ID NO: 93712 - DNA, 791 bp, Zea mays
  Clone ID: MRT4577_185454C.1
agcaaattcgattgagggttctaggcataccacctagattcacctttaacagggagggtgtgctgtggtcggtgaatcgcactgcaaatgcacaacacagattaaacgtcaaattctagccagatcagctcccttgagccgactatcatatttttcgggtaagtaatgattaaaatagtgaaagtaatagtgcattgaaagtgaccggcaagataaacaaatctgcttaaagcatgatttagaggattattgatcctagagcaacacatgccatgtgcatagccaaaagctcagaaacaggccaaaagtcatcattatcatccacacgtcaaccaaatctatggccagataaatggtaaaccatttataggaacattccagatccaatctatagtatgcaaatatgcagatcttccggtacaagtagtttgattcatcgaaaactatggcttgccaacgccacgctccatgtcgccttctcgaataaaaaaatagctaaggtggattgatccttaacccgctctgataccaattgagttattgaattgggcgacagaggaaggagaatgagagccaataaaaattattcgcaagggaaatcttggcttgcttcccaaatcttcatccagtcctccaaacactaaaactctcaaataagatgctcacgagccaacaagtatctggatattctcggtgatgatagaagagcataacgaagcactcaaacgatgaaaaacacttgtacgagtgaaactctccaaaaatcgaaacttgagctttttgctccaacg

SEQ ID NO: 93713 - DNA, 964 bp, Zea mays
  Clone ID: MRT4577_185455C.1
gctcctttcgttcttaaggttaagatctccaacatgtcaggcatgacatgagcttcacaaggaggaggcaacactagaaacttaggccctgtcaaatggttatggtttattaaataaacacaaaataatggtgatatgtttaaataatagtggttgactaaataatatcagactttttattgtaatttcaatcagttgaataatagtttagcttttttattattgtgctcttttgcagatgagtggagctacattgttcaacctttcactgctaacatctgacatgtgggcagtcgccattcgagttttattctatcagcaagagataaacaggttgtactacctagcattcacagttgtggccattggattaatcatctattcgttgaatgatagatcttcagatgatgaaacagctggaagtacagaagcaccagcccaatatcagcaacttccaattgaagacaattcaacaagaattggttctagttcaggaaaatgtttaattggctcaagaagctaagcaagatgaggaagagaatcagaattaattttctttacaagtcagtccagcagattattcacaagagcagaaccattgctgaaggctcccgcatcagtgagatctaaggaagggataatacatcgggttaaaatgatctttgactagggattgtgaacaatcacagctggtctgcaaagcataatagcaacagtatgaacatgtaaagggagttactagtcactaaagctctttcaagaattgcctatgaaggaaaaaagatatttttagatagcatatggatagcttacatgctttactggaatgcagagtgctaaagcgccacaatattttcttgttaggagaattatgatttaatgatattttctatattactcattgtaaaattctatgagaagtatcatgccccgtgaattggaagctaaggggtaagtgaaaaat

SEQ ID NO: 93714 - DNA, 517 bp, Zea mays
  Clone ID: MRT4577_185456C.1
aaggacacataaggaagaagttcatatctgttagtgggataataatgtattaatgtacgaagacacttcattgtcaatgcatggatttttaccaaatcaaatatggcatagagatatgcagagtaaaatgctggttgcttcatgtataggaaaacgtttaattggcccaagaagctaagcaagatgaggaagagaatcagaattaattttctttacaagtcagtccagcagattattcacaagagcagacccattgctgaaggctcccgcatcagtgagatctaaggaagggataatacatcgggtcaaaatgatctttgactagggattgtgaacaatcacagctggtctgcaaagcataatagcaacagtatgaacatgtaaagggagttactagtcactaaagctctttcaagaattgtctatgaaggaaaaaaaattctagatagtgtatggatagcttacatgctttactggaatgcagaattatgatttaatgatattttctatattactc

SEQ ID NO: 93715 - DNA, 830 bp, Zea mays
  Clone ID: MRT4577_185457C.1
cccctcccacccccttgctctctcctctcccgatctggatcaggagcttgtcggcgccgcccaacctgccttccccagctagccggccaccctctcctccttctcactgtcgcttcatctcctagcctccctccctactcccaacctccaccggccgccacatgattcaccccccttgatcctctccaccttccacactagagcccgtgggccgcggtacccactctgttgcctctaggaccctggcctccttcctcccaacaccggagcgcaactaccttcttcctcctggcgcaagaggtgccgcgcgcggccgcgctccatgtgtcccccgcaactcttcgatccccctgtcccgaccccagatccggcgaggatccaccaggcggtgcctcagccgtcaccgtcgggatgctttggatcgggcgacaggggagcccccgcgcggccatgcactggatcccctgtcttcctcgctggattcggcctccgccagcaacacctacgctcaggaggtcccaccaccgcatccccgacccgccactgtgactccgcgacacgacccgccaccgcgctcctcacctcgacttcctcccatccgtcatggagcgagggacccgacccctagatccgccaagctcagctccctcttccagccacgcgaccccacacctcccagcgtggacgggtctgtggcgctcacccacacaggatccctccccctccctggactccggcagtcccgttcccatggcgcgccagcaggttgctcttcgttgcaggttggttggattggtggtgcagtacccaaatcgctagtgttttcgcta

SEQ ID NO: 93716 - DNA, 133 bp, Zea mays
  Clone ID: MRT4577_185458C.1
aaggatcttttcctttttttataagatgcaccccgggccgtgggaaatttaatgggctagggagaaaccaatgtatagaaatgattttgtgtgctgctacatactaagactttagtatatacatttacgattt

SEQ ID NO: 93717 - DNA, 816 bp, Zea mays
  unsure (1)..(816): unsure at all n locations
  Clone ID: MRT4577_185459C.1
atgcacgccgtccaccagccggtcctgcgctctcgagtcgggactccaccttccattcatttcatctgctccatctccctctttgttcgccggcgtataataagcttcccctttctgcaactgatctgatccgggctgccgtgagctctgctcgccctgatggagttcaagagggatgtatggagcctgctcctcgtgctgctcctcgggcagctcgtcgccttctccatggccgcctcaagctttgcctcctccctcattgctaatcttggtattcaatctttcacctctcattgagctgaccagaatacacagacttgttggtgtccatggagtcgatgccccactgacacagtctttcttagcctacctgttgctgaccttagtctatgtaccaatcgtcctgcgtcgacggcagaagctgcaaatagcttggtactggtatctagctctggctttctttgatgtacaggggaattatcttgttgtgaaggcgtaccagtactcatacattaccagtgtgactttgttggattgctggactgttgtatgggtcgtcatgctcacctggtacgcactgggcacaagatattcactctggcagttcgtgggggcagggacctgtgtggcagggctcgcccttgtgctgctttcagatgcaaaatctcaagatgagcaagatccgaaaaaaataccancttttgngggatgcccttgttattgctgggacagttggttttgcatttagcaacgttgnggaggaatactgtgtcaagaaaaggatagagttggagttgttgcaatgctcggtctctt

SEQ ID NO: 93718 - DNA, 223 bp, Zea mays
  Clone ID: MRT4577_18545C.1
atataacttctttttaaacattgaagtaccatacacatgcacggaaaagcgaaccccaagcagtacgaaaaaaggggctgctgaaacagaagtagaacagagaacgaacaacagagacaaagggaacgggaaaaagacaaccaggggggcgaaaccaaacacggcaagaaccaaggggaagcggaaggccgacggcacacaagacggcagggaataggggaac

SEQ ID NO: 93719 - DNA, 379 bp, Zea mays
  Clone ID: MRT4577_185460C.1
ccgatatttttttcaaattcatgtgtcgagatttacaatgtttagtcgttgagttccctattattcatgctggcaagcctcccaatgcccgtgttatcagtttatagtgcactgatgctcagaagtttatcaacctgtattagttagtgcactaatgcctgtgtatcagtttagggcatcggtctgctgtcagcgcactagcaggattcaatgggttttatcagttgcaaatcgtatatccaacattgtatatagatctgcagtccgcgctctcgcttccacgtgatctgtagcgacgtacgttgtgcttgcattgcgtctacatgccgtgcttgccgctcgcctctagaactagtcggacgcgtgggcggacgctggg

SEQ ID NO: 93720 - DNA, 454 bp, Zea mays
  Clone ID: MRT4577_185461C.1
aactatccacacatacggacagagaccacttacgagctcgagatctcactctcctcacctcagctctcagagaggaaggatactgcgcgtcggctgatggctagcgtgtggggcaagagggatacagagctggacattggggccagtggtttcatcggatcgaccctcgtatgcctcctcctcgaccgcgtctaccacggccacgcaagtgtcctctatcccgatgactaggaggagacggagtacctggtcgacctgggcgtcggcgccggtataggaacgactgcgagtcgttccagggtgacctcctcgactgtgcgctcgctgatggtcggcacgctgcgctgatacgggagtgttctacctctgacacgacatgcaccgtctacgccgtgagcgacccacaagtctagatgatgacttcgatattagcaggagacgactcaacgtccat

SEQ ID NO: 93721 - DNA, 375 bp, Zea mays
  Clone ID: MRT4577_185462C.1
gggttgggaaaaagccaaggcggggattaccggtcccttttctaaaaagacgcctggttgggccagggggggaaaaaaaattaccgggggcctaccgaaccctttttttttcattccctcatgggggggggggggggccctttaccccctgccaggttttttcaagggggggtttgggcctaccaaacttgggcccccgggcccggacctaggcccacccccctttcctaagcgggtccccccccttttttggggggggggactcccgggggggggggggccaccccccgtttttctttttcgggggggagggcctggacacccattcccacaagccgtttttgaaggtgggggaggaaggcctctttttttggc

SEQ ID NO: 93722 - DNA, 358 bp, Zea mays
  Clone ID: MRT4577_185463C.1
aaaaaaggggcccaaagggatatggatagcccctgaatattagggggggccccgggcggaactagttccaagacattctttggtggggacagcctttattggcgccgccgccccaaaaaacccaaaccggggagccgggggcaggaaaaccaaggggggccctttttttcacctttaaaacccccttgttttggttagaaaaaaacctacattattttttttcccgggaacctttttgggcactaggcttttaaaaaaaacaccctggaccggggaacttaggatacctttaccccggggagtcacacttacctcacaggtgcttgtttatatgggcacccccttttggcacggggga

SEQ ID NO: 93723 - DNA, 346 bp, Zea mays
  unsure (1)..(346): unsure at all n locations
  Clone ID: MRT4577_185464C.1
attctttccatttttcccttaaaacatgtaagcgtccacacgcatgccaacgaatactcncaaaatgtatatcaattactaaattaacgtcagctgcatgaaactcttcgttatttttgctttcggttgttacggatgtttgcaacatgcttctctgtctactttttcatgaagaatgaaatgattacaccactaatgtaccttcgccgctattctgcattgtcaacgaaatactaatcgtccgtcaccacaaaatgaaggacagacgttcgcatgtcagcctcactttctcctgacaacgaaacacttaaacttacattactatgtaactatctataccactatt

SEQ ID NO: 93724 - DNA, 191 bp, Zea mays
  Clone ID: MRT4577_185465C.1
tttgtactctttggaacaagatcacaggttgatgccattaattgagagggctgaagcgttgctcgagctttactgacgggatgcactcaaagtagagttcgcaggatcgctttttcatgaataacctagcccatatgaggcgattggtagtttggtacggaccatgcatgccaacaagcactcttgacata

SEQ ID NO: 93725 - DNA, 664 bp, Zea mays
  Clone ID: MRT4577_185466C.1
ggatcacacaaaaaaaggagaccagttcattattgatctgtttgaggaaatgatatccgcaagaaagtgtaaattgggcgtcaaccacaaaacaattaacaaaccggcttttggtatatatagagagattagtgagctaaagctttaaccgctttctcagctgcatcatccaaatcatcagctgttatgagtttcattccactttccttgaggattctctttccctgctcaacattcgttccttctagacgaaccaccactggcactttcaatgcgacctcttttgcagcgttcacgattccactagcaatcacatcacatttcattatcccaccaaatatgttcaccaagattgctttcactttatcgtccgatgtcagtatcttaaacgcttccaccacctggtgctcagaagcatttccaccaacgtcaaggaaattggcgggtgttccaccgtgtaatttaatgatgtccatggttgccatggccaatccagcaccattcaccatgcaaccaatctctccatctaaaccgatgtagttcaggtcaactttagcagcagccacctctcgtggatcctcctgtgttggatcacgcatggcgaaaacctctttttgtcggaacgcagcattacattcgaagttcaatttggcatcagcagcta

SEQ ID NO: 93726 - DNA, 713 bp, Zea mays
  unsure (1)..(713): unsure at all n locations
  Clone ID: MRT4577_185467C.1
gggtacctcgaggccggccgggaaaaaaaaaaaaaacacaaagtcagaaacacgatgaaaggagactccatcatcgcgagtgaggcggaggagtcgagcctgccccttcttcttcctctgcatgccgcgccttcacaggagtatgaacaatttacttgcaatggatctgtcgatatcagaggttacccagcgtccaaacggcatacggggaactggagagcctgctactcaattcttgggggtgaattttgtggtgctatggcatactatggagttgggacaaacctggtgagctatttgaccaaggcgcagaagaaaagcaatgtcgccgcagcgagcaacatcgcttcgtggcagggaacatgctacctgactgccctcctcggagctttcctggcagattcatatctgggaaggcaccggacaattgtggtgtccctcatggtagttaccatgggagtgctcctactgacactttcagcatccataccagcaagcattcatgtaatggctacggcgacctcaaactctcaggaagccttgtcttctctgggcctcttcctgaccgctctgggtttgngtgggatctggccttgtgtccccacgtttggagccgatcagttcgacgacaccgacgcggccgagaaagagcagaagcagctctactaacactggtactacttcgctgtncacggaggcttcttgttcgcgag

SEQ ID NO: 93727 - DNA, 966 bp, Zea mays
  Clone ID: MRT4577_185468C.1
cccttttttttttttttttttttttttttgtcaaatttaaattttttttactttcttctatatttataacggagggagtatataaaaacaaaatcaaaatatgtgggaagacttgtatggggatgtctgcaacacattgcacaactaatgcatatatataccacgtttcacacacttaaatcataggagggggagacgtgaccatctaccagccaggtgatgcatgccgaattcaggagaaacatcccttgggacgttcgtcggggtctccaccctccagacgcgtcacgctgccgccggcaagcaaggcgaggcaggcctggcgccggcgcacacgccatcccattcttgacagggacgcgcacgccatcccaaaatctgcgtcggctgccatttcagtgtgcctcccaaatcaaatctgctgcttgcggcctcacattcaagtaaattcctcacaacaacatcaaccatggcgacccgacatcagtattgtattagccacaaaactggagagcacagcaacgcattcgcgattccgaggcaagcatgcatgccactgccaggcattcgcgattccgaggcaagctagctgtcacctgccctcctcgatgatggaggtgtagagcggcgacgggaccgcgggcgtcaggtccccgggctcagggctcgcctgggcgccgccgtggccgccggacgaagacgttggctgcgtctgcgtcgacgacgacccgacgtggctgctcgcgaagctgccgctgacgtcggccgccatcacctgccactccgtgatgtagctcggcttcgcaacgtcctcggccgcgtcggcgtccccgttgagcatggcgaccaccctcgacatggacggccgcttgtggggcgagccctgggtgcagtggagcgccacgcggatcacccgcagcacctcgtacgcgtcgtactccgtcagcttcgggtccacgaactcca

SEQ ID NO: 93728 - DNA, 764 bp, Zea mays
  Clone ID: MRT4577_185469C.1
actcccacacaggaaccgagcacaccatcactcactccccaccgccactcgtcagatccacacgccacagcgcgcggcatgggctccctccccctcccctccctcgccgtgctcgcggcgcttctctgctgcttcctggccgtcggcggcggcgccgtggagctcaacaccaccgacccctcccccttcgacgtcgacctgaacgccaccgacgccaccaagtactggggcccctggaccccggccagggcgacttggtacggccagcccaacggcgccggccccgacgacaacggtggtgcctgcggcttcaagcacaccaaccagtacccgttcgcgtccatgacctcctgcggcaaccagccattgttcaaggacggcaaggggtgcggctcatgctacaagatcagatgcaggaaggacatgtcctgctccggcaggacggagacggtgatcatcaccgacatgaactactacccggtggcgcccttccacttcgacctcagcggcacggcgttcggccggctcgccaagcccggcctcaacgacaggctccgccactccggcatcatcgacatcgagttcacacgggtgccgtgcgagttcccggggctcaagatcgggttccacgtggaggagtactcgaaccccgtctacttcgcggtgctggtggagtacgaggacggcgacggcgacgtggtgcaggtggacctcatggagtcgcgggggccgggcggcggcaagtggacgaagatgagggagtc

SEQ ID NO: 93729 - DNA, 275 bp, Zea mays
  Clone ID: MRT4577_18546C.1
cgtgtgtcgttctttcttaattcacttttttttatagcaatgaatacatacatacctatatatatatctatttataattttttcaatggccaaaaccacaaaacacgaattttaacattaaacactttttgactgtgaaaagaaatcttattttattcatgggggctgtatttaaaatatcttatccattgaaactgtcatatcaaggcgccatccttacagacagcatgttttgttaaaacaacactttgaacccatgtcaaccagactaacat

SEQ ID NO: 93730 - DNA, 361 bp, Zea mays
  unsure (1)..(361): unsure at all n locations
  Clone ID: MRT4577_185470C.1
acgcctacattttttccgagccaatcacctccggcatgcatccatttgctgagcttgcggagtatgaactctacgcttgactcccatcgattgaatgcacagtgcgcggatctgcttcaatcatggcttctcgagattacgtgatctacatngacttcatgaacaacaaggtccactgcctctcctgaatggagccgactggcatatccaaatggctgcatactatgacgcgcctgatgtacacacccttgcatgattcttttgaccagactcagatgacgacaaactattaactgttgaagccatgttatgggtacgtgtatgacaccatgggctagggactggacaagtgcttgacaag

SEQ ID NO: 93731 - DNA, 574 bp, Zea mays
  Clone ID: MRT4577_185471C.1
tcgaggccggccgggattatagctataatgtgtcggtttctagcttcgaagaaagtatggatggaatgatgctaccttgaccctgacaaaaaaaatatagctgattctttattgcctccattgcaaaagatgttgaacccacattggtcaaagaattccttgcatatgaccaatcaccaaataccactgacactagttatatttggtcagttacattttttttacacgacctcttaataattcacccttatttaattgaacttctccttttctgtttgcagagtaatggattaatgcattaagcaaggtaatgaaatgtaccaaaagtgacttatggaaaagaaacagagcttgttcactgctctgaatgaggaactttaatctgatgcagtctcaaaagagcagagttttgggagcaatgtcatcctctttgcctattctgccaaatcctttgaaagggagcttctcaaggcctcataacccccagcatattcctatgttgaggcagctgcctgatgactctatgcccttgtgtattgacacacatcagtctgctagtttgcacccaagagct

SEQ ID NO: 93732 - DNA, 306 bp, Zea mays
  Clone ID: MRT4577_185472C.1
aataccattaccaacttctactatagattgcacaataacccaccaacaacggcgacggggatattcttattccttattctccttgctcttactgcaagcgctacttccgcacatacaatcccacaatgctcacaggcatccaatcgcttcctttcatataccataccaccataccattgacacctccagtatacgaaaaccctactgttcatctctacacgaccgaacaggtgatcgcaccaggcaacctaccttaatcaccctatgtgctcccacaaccttatgtgctattacagccatatacat

SEQ ID NO: 93733 - DNA, 546 bp, Zea mays
  Clone ID: MRT4577_185473C.1
atgtcgaaggatgatcttgctgatagccttgcatacaacagtataaagggcttaattcttagcaatgccttgagggcacaaaagaacgtcgaagacgaaagctgcacaatagctctcagcaaccttcgctcagaggtgagtaaaatgaaagaagacaaagctaaatataatgctcaggccgaagcccaaaaatccgaggttgaagaccttcagaaacaacttgccgaagctaaagaaaattgtgaggttgcaaaggccagccaagaaataagtgaatggtggaaggccaagctagagaaaaatattgaggagcttcgcgaatccaaggaaagatgcttcgaaaaattcttggattgcgtgaaaaatttgaaaaacagctttgcaaaggttggagcttactcctccgaggagaacttcgttcgaggcgactccgaaggcatcattgagtggataagcggggaagccaaagcttttgaggaaattctgaacgatcgcggagatatttgcgctttctccgacgcccggggaattgcagctatactgtag

SEQ ID NO: 93734 - DNA, 2655 bp, Zea mays
  unsure (1)..(2655): unsure at all n locations
  Clone ID: MRT4577_185474C.1
gtacctcatccgcgcctccctctgctgccgtgtcgctgccgctagccatccccacttctcacccgccccctcttctctactgcagtactgccgccagccgcaacaaagatatggatggagcggccgcgacagccgcagacattatcgtcatgatcccatcgctctcgccttcgcctttgtagcactacctcctcgtccatccgcccccctatttcgtctcactcgggttgctagatcggactggatccgtccgcccgtttcttggagcagagatggccgaaatgaccgtgactgtcgcggccgccaaaggcaccctccggacgtgccccggcgcccgccgtgctgcggttcttggtcggtggatgcctcttgcaccagcggcgcccgccaacttgagattgttctctccagctgtgagggttccaagggctacttcccctgcggcggttgaggatgggagcaacactgatatagtccctatcccgaaagttataatagaccaagactcagatccggatgcaaccattgtagaaataaccttgggtgatcgtcttggcgatctccttgatacgatgagtgcgctaaagaacttggggctaaatgttgttaaagctagtgtctgtctcgattctactggcaagcatatcaagtttgctataactagagcgttcactggccgtaaaattgatgatccagagttgttagaagcagttcgactgacgatcattaacaacatgatacagtatcatccggagtccagcagtcaattggctatgggggcaacttttgggccagaagcccctacggaagaggttgatgtggatatagcaacccacatagatatctatgatgatggccctgaaagaagcttacttgtggtggaaacagcggatcgtccagggttactggttgaccttgttaagatcatctcggacatcagcattaatgtccaatctggagagtttgacactgaggggctcctggctaaagcaaaattccatgtcagctacaggggcagaacactgaccgaggctttacaacaggttctttgtaatagcttgcgctatttcttgaggcggccgacaacagaggacgccagcttctagccagatagatgatcatgaagcctcccaactttcttatgtggtggtattcacatgaattgaataccatcgtcaaagcatttgaaacacgcacaataatttgttaagatggggggaattgtacttgatgggcccccacaatattccatcttatttaccaccaaacggtgtatcccaagtagcaaaataataatgtgctattacatgattaagaatagcaatcttctgcacttggatacaacagattcccctgccttggaacaaaaaatacttcgaattggtgtggggccataacatcaagtacaattccccccatcttaacaaattattgtgcgtgtttcaaatgctttgacgatggtattcaattcatgtgaataccaccacataagaaagttgggaggcttcatgatcatctatctggctagaagctggcgtcctctgttgtcggccgcctcaagaaatagcgcaagctattagaaagaacctgctgtaaagcctcggtcagtgttctgcccctgtagctgacatggaattttgctttagccaggagcccctcagtgtcaaactctccagattggacattaatgctgatgtccgagatgatcttaacaaggtcaaccagtaaccctggacgatccgctgtttccaccacaagtaagcttctttcagggccatcatcatagatatctatgtgggttgctatatccacatcaacctcttccgtaggggcttctggcccaaaagttgcccccatagccaattgactgctggactccggatgatactgtatcatgttgttaatgatcgtcagtcgaactgcttctaacaactctggatcatcaattttacggccagtgaacgctctagttatagcaaacttgatatgcttgccagtagaatcgagacagacactagctttaacaacatttagccccaagttctttagcgcactcatcgtatcaaggagatcgccaagacgatcacccaaggtgaaatggaacaatacaggaattcaaaatcactttgatattatagagactagagtaggcatttttgtatatccatcattgatgtcgatgaaacaatagcagtggatcaagcaaggaaaacccatacatatgtaccaagtagatgtaggcaatgtgtttttttattcaaaggatacatataaaccatgtgaacatgttcttacgttaccttttgctggatgagatcaaatcctttggattgatgacaaaagagcatgtttttccttaaatttgaagaataatgcacaaggtaagaaaaatggcataccttctttcagggccatcatcatagatatctatgtgggttgctatatccacatcaacctacgaatgtacaagtgaacaatgtttatatccagtgaaggttttcaagtctccagaaccatacataattctaaagatgtacttggcagcaatttgatcactattgtaccatgggaagaccaataaagtctgttctacgataagaagatccagcatccagcaataaggcaataccagatacccggccgaactnggagggt

SEQ ID NO: 93735 - DNA, 332 bp, Zea mays
  Clone ID: MRT4577_185475C.1
ttccgtggtcgtaccacgccttcgctccgatggtatccatcacgacgacgcggctagctgcccggtctgcctggaagactacgcgcccggccagcgtgcccgtgagatgccctgcatgcacaggctccagcgcaatagcatcggcccgcggctcaagaggcacatctgctgccctgtgtgccgtctgcatctgacggctaccggctacaggagatcatgcagcgtccgagacggagtgtacctcaatgtcgatcctgatcgagacggccatgaccacggacggtgcgatggtcgggcaagctgtccgggcaacgcctatctagcatgcacct

SEQ ID NO: 93736 - DNA, 724 bp, Zea mays
  Clone ID: MRT4577_185476C.1
ggccgctttttttttttttttttttccatgccaacgttttctgatttttttctttatttgaggtcttcagttctcctgatcttatcttattcgtgtattccagacagacaggtacaggcgtacaaccaggagagtgggagaggcacaaaagcagggctccaatttctttttttcgatcgagaccagatacatgcttcttctgaaaagttttcaagcaagctcgaagctcctacgccgtcttggcctcgtcgggcggctgaatgaagcgcggaacttctccgttcatcaccctccaaggcccccagtagaacttgggcggcatgatcggcaccgcctcgccggggtgatcctcccagtacttctccttgtagagctgctcggtgacggcggccccgacgacgccggtgtagaaggcggcgacgtaggtgccgacgagtggcgcgaaggagcgcggcgggcggtagggctccaccatgtcccacagcaccgtcttctcccacttgtggaactgccggtccgcgtaccacctccagaaccggctcgacatcgcagtcacctccttcttcccctcctcccctcccagtaccacccctgcctgcgctcgcgcgacctcgccgccggtggcccggtgctggagacgtgaggcttcgcaatgggccgacgcgcttgttcattgaacccggccggcctcgagtgcgggcccacggtgcccgttcccggccgg

SEQ ID NO: 93737 - DNA, 492 bp, Zea mays
  Clone ID: MRT4577_185477C.1
gcgccggctcttctctccctagcctctcctccctacccgtaacgacctcgcctgctcggcgccgccgtcactgcgagctccccatcttcctccgttaaccatggcgacccacatcagcaagaacattgagctccgccgcgacctctggttctacgccgagttcaatgatatgctagtaggcgaccagctcgtgcagtacttctcatcgtccggtgtggaggtgtgtgacacaccgatgcgcactgcagatacatcatccgcgcaacgcgtcacgctctaacgcgtctctccgagaaggaccgcaggatcagggaggtcacgcctgtggaccatgagaggctcatgcttctcgcctagatcccaggcgagctcttagcgccgagcaggacgtgaaccgcgcgctctgcgtgctcgcgacaggctgcagaccctctcggtacaagctcctactggggcttggcggccggcagtaccctgctatggggtgcttct

SEQ ID NO: 93738 - DNA, 499 bp, Zea mays
  unsure (1)..(499): unsure at all n locations
  Clone ID: MRT4577_185478C.1
gcgggccgccagaggcaacncgccccccaccgaccccgaagcgnccgcccgcgaccgggacncccaccgccaagngcggaacagaacgcngcgcnccggggcgccgcccgaacccgccacgaagggccccaaacccaagggcgccgccaaggccgaagccaagccggaggagaagagcaaggcggcggagaaccccgccaagggcacgaaagggaaggccggcaaggaccccaacaagccgaacaggccccccagcgccccccccgngcccacggacgaaccccgcaaggagnccaaggagaacaacccaaagaacaagcccgccgccgcagcggcgaaagccgcccgccgacaggcgcaaacccccgagccagccggacaaggctccccacgcacccaaggccaaccagcccaagccccagcaccacaaggccaccgccgcccaccacaagggcgaagagcaccgcagccaagaacgcacccggccaggcaggaacag

SEQ ID NO: 93739 - DNA, 473 bp, Zea mays
  unsure (1)..(473): unsure at all n locations
  Clone ID: MRT4577_185479C.1
gctgctgctaccgcagcccctccgtgggcctccttaggccatgacatactcagatcaggatgaaatgtgttctcatacctttgtgattagagatattgtgtcctttattaatctgatctgtttttagctccattagcttgtccgcaaactttagttagagaaggtgttatgtcttttgtcaagattataacatttctgaacaattgtgctacacaggacgtggtaccatcctcatcatgtagcctaggatgagttatcactgttaaatatttcaagtggttaaatcatgcatctgcagaatatattattgttgcactctcaaatggtgggttgctaacttgctatgtcatgggagtttgggtgaaggccagaaagatgtgatagacgtcgattcgatgcaggtccatgggatgctctgtacggncttgttcgattattttcaatccatatggatcggaggggattgatacgga

SEQ ID NO: 93740 - DNA, 533 bp, Zea mays
  Clone ID: MRT4577_18547C.1
ccggggacaataccgagttctcgcgcgaagtaatccggattttcgctttcccgcacccaacccccgtcggagagagagatgggatatgtggtggagatgcagcccctcgcgccggcggggtaccatcgatcgccgctgatgaaagagaaggtggaggcggcagtggtggacctggaggccggcaccggctagactctggacccgtggatctcgcgcggtgagagcgtcctgcgatggggcttcggccaaaaggtctacagcatgctcgctgcgcaactgttcctcagcactggcttctctgacctgaccggtctccaccctaccttgaactcgctgctgtacgactaccaggacttcgagctcgtgctgcccgtgctgcccttcatcctgatgatcccatagtatcattatcatcacaagcacccacgcaatttcgttctcctgggtttgttcacattgtgcttgagctttagtatcgatgaggcttgtgctaacacccaagggagaatcgatctggaggctttagtgctcac

SEQ ID NO: 93741 - DNA, 543 bp, Zea mays
  unsure (1)..(543): unsure at all n locations
  Clone ID: MRT4577_185480C.1
gggcgcgttcccccgggggggggatcggggttcgcctcccccccggttttgggtgccccctttagggggggggggggggccgggcttttggtggggtccggggccctggcggggcacccgggggggggaacccccgggcgcttcaccgggggtgcattgtttaggccggggccgaacaaacaggcttagtttgccccggggtctgatgggcactattgctgggttccccgcgcccgggggggatgcgccccccggcccaaggcctgaaggcccccggcgggggcgggtgccgccttgcctaccagggggggttgggcccctgggnaacgccgggccggcgggagccccggctggggtgggcgtcccccccgttcattgggcgggggttgttcccggccccctcgggggcgccgttgcgggcccgggggggggccccgaacccctgggggcccacccggggccccgggttcctccaaaaccgagacccccccttgaccgccgcccccgggcccggcccccccctgccggggtccccgccccccg

SEQ ID NO: 93742 - DNA, 2877 bp, Zea mays
  Clone ID: MRT4577_185481C.1
cggacgcttggggaaatgtgttctcataccttattgattagagatattgcggcctttattaatctgatctgtttttagctccattagcttgtccgcaaactttagttagagaaggtgttatgtcttttgtcaagattataacaccgcctccttcgcctgctcgctagtcgctagccgctccccccaacaaacaaccctaatccgtgaccgtggactcgccgcaagctccatcgcgcgaatagattggggggattcaatagaggctacgcggggattggtcgcgctcgagatctcagcaccctcgcgcctgaaatctttctattgttgtcgtggttcaggtgatgagatcttggggagcgcgactcgctcggtcctgagatgctggcgggctacggcggcggtggccgcagcgtccatctctcctcccacaaggacctcctcctcggccgctgcggccggagcttcctcttcggcaacacgtggtttctcctctccacctacccggcgcgcctcctgcacaccacggaccgccgcgctccctccgctttcgtcgccgccatcaaccgggtcccctgcgtgcggtcgcactgcacggggcagggtctgctgcagagaggcagcattgtcatggctgcctgcggctatgttcttaggcgagctgagctgggtgctgccaagcgccagcagccggataaggacccatctggcggaacacgcgcctcccgtattgcagccatggggtcactgggcagtgctgcgcggccagaggtgtctttcaggtacagagggctggagcattgtaagaagattggtgcaagcttgaaatgccgtgagccatgggggaatagggcgttctggacaaatgccactgggccgggttggaagttgagctttacagttgagccatggactaaggactttagtacggcgtgtgcagcgccgtattctgctggagccacagaggatcaattgccgctcaatgagaagatgaatagctccactgttggaatgtccccagtttctgaaaaattgaagttgctctctggttcatgttacttgcctcaccctgctaaggaggcaactggtggtgaggatgcacatttcattagcattgatgagcatgtgataggcgtagcagatggtgttggtggttgggcagatctcggtgtcgatgctggactatatgctaaggagctaatgagaaattcaatgagcgctatcaaagatgagccagaagggaccattgatccaaccagagttttggaaaaggcttatattagtacgaaagcaagggggtcatctaccgcgtgtatcatcactcttaaagatcagggtatccatgctgtaaatcttggggatagtggtttcgtagtagtccgagatggccgcactgttctcaggtcaccctcacagcagcatgatttcaattttacttatcagcttgagagtggaggtggcagtgatcttcctagttccgcacaagtatttcactttccggttgccccgggtgatgttatcgttgctggcacggatggactatttgacaatttatacaacaatgagataagtggtgttattgttgaagctctccgggttggacttgagcctcagattgcagcacaaaaaattgccgccctggctcgacaaagagctacggacaaaaataggcagtcaccttttgcatcagctgctcaagaagctgggtaccggtattatggtgggaagcttgatgacataacagtcgtggtctcatatgtgaaaagcgctggagccccatgatctgagcctttcttttattagatgtaatgtacataaatcattgtcccgaactggcggcgtatgtatgcaccagggcatagaagcttattctcaaggtgtggaatcccctgatcctagaagcacctgtgctgggttcagtatggttgtgctttagccctggaacatgttagcaaaccattgcaccattttacttgtttgccactgtgagaaatcattttctctaattatctgaactcctgaagccagggtgggtttgtttccccccttggagttggaggataatgaccagctggaaccaaattttgttgtaaacagcgttgattgccgaatgatagttatagacatcttggactaaatggtgaaccagcgatgctgtttgatttgcacggcttaaaaattaaaaaaatgttgttaagcatttttctgaacaattgtgctacacaggacgtggtaccatcctcatcatgtagcctaggatgagttatcactgttaaatatttcaagtggttaaatcatgcatctgcagaatatattattgttgcactctcaaatggtgggttgctaacttgctatgtcatgggagtttgggtgaaggccagaaggatgtgatagacgtcgattcgatgcaggtccatgggatgctctgtacaggggtgggaatatcctagcgttcgccttggtttcggtcttctctggcagcaagtgtgctcccagttttcaagctgtcaaagctgtccaactcagttccttggggaaggcctcgattcgctcatctcctcggacccggaggactacaacaatatgaagcagtatgagaagctgaccgtcgcgtcaatttactttcttgtgatgagtgttgagcatcatcatatgattcatacaattgatatgcaactagaacccagattttaatgtgtacggttatgatttatcttttctcgttaaataatgtgagatattgaggtgtatgataaattatatgttcatctctatgtaatcattatacactaacattttaataacgagagcatagaacgataaaaaaaaaaaaaaaaaaaaaaaaaaaaaaaaaaaaaaaaaaaaaaactcgaggaaggg

SEQ ID NO: 93743 - DNA, 171 bp, Zea mays
  Clone ID: MRT4577_185482C.1
ccagtagaatccaaacaggaactttcggagctgggccatgcacaacagccaaggagcgattcaggttggctattgtcagttgctttacattaggaagaccaaggtagtagaacatgagatcagcgtcatcagggaaggtgatcgggggcccccggattgacggtccccatg

SEQ ID NO: 93744 - DNA, 452 bp, Zea mays
  Clone ID: MRT4577_185483C.1
gcaaagccgacggagaacgaagcccgcgcgaaactacgacgccccgccggggaccccccccaggggcgagggcgacgacacgcgcgagaacgccacgggggccgccacggccacgcgcgacaccaccgcgaccgggagcggggccgccgccggcgagacccccagacagggaccccacgcgccccgccaccagaccaagaccaccggaaagagcgcccccgaccaccacaccgaccgcgagggcggcgccgacaaggcccgcgacggggggaacaacaacgacgaggccacccggcggggcgacaaccccgagaccaccgacgacagcgcgcccgcggacggcgggacagaaaagtcccccgagcgccccaccggaggcggggggcgcgaccggaacaacccgcgcaggcagaagaagcccggcgccgccaccgccaagcggcgacagcggg

SEQ ID NO: 93745 - DNA, 736 bp, Zea mays
  Clone ID: MRT4577_185484C.1
gccggccgtttccgaaaaaaaaaaaatactttattcatttcgccaattatgcaatataatggtggctccgtagtagccatggtcggtaaagactgtgtcgctattgctgcagataaacgtttaggttcccaattcatgacagtttccactgattttcaaaagatttttaaagcaactgacaagactttcattggattaccgggattagctactgatgtactcacacttgcagatcgattccgttttaagacaaacatgtacaaaatgcgtgaagagagagaaattgaaccaaaaacactagctcacatggtttcctctaccctgtatgaaagaagatttggaccttattttgtcgaaccagttgttgcgggtttaggaaaagataataagccatttatttgtgctatggatttgattggatgtatcaactttgcaaaagactttgttgttagtggaacagctggacctaacttgtatggaatgtgtgaatctctttgggagccagatcttgaacctgaggatctctttgaaacaatttctcaagcattattaaacgcacaggatagagatgctctttcaggatggggtgctgttgtttatgtcataacacctactgaagttactgttcgcagcctcaaagctcgtcaggattaaacaataatttcatttcgcagatatataaaaaaataaaagctttattcatgaaaacgcaaaaaaaaaaaaaaaaaggccccta

SEQ ID NO: 93746 - DNA, 197 bp, Zea mays
  Clone ID: MRT4577_185485C.1
agatgcggccggactaaacacgacctggactctgcctaattgtgtggatgcttgacgagaatttgtgcaccacatgtttgcgatttaaattgtccccaagcatgcatatcaatattgactactgccgacgagaaattctccaccacatgtttgcaattgcaacttgcagcacaaaatgtactgtatttatcaacact

SEQ ID NO: 93747 - DNA, 348 bp, Zea mays
  Clone ID: MRT4577_185486C.1
ctccacacggtgttcagtgtagagagagagtatttttttatacctctgatcaaccatatgagcccgttctttttaaaatccggcgcggccctaaaaacatcatatacattttctttcttcgtaatgtatgcatctaatctttaatgtctgcaaatgtttaaattaacatttctcttcttctctctttattactttttgtattaaaccctttttattttatttctaaagttttagtttctcactctttttctcttataaacattcttccttataatttttacatcttttctattattctctcactattcgcttattccaataattttattcatttattcctttatctct

SEQ ID NO: 93748 - DNA, 807 bp, Zea mays
  unsure (1)..(807): unsure at all n locations
  Clone ID: MRT4577_185487C.1
ggtcacggatcacatggctttctcctatacgtacggtacgtacacagtagtgtacaagaacacgagaactactgaactagcatggcttccgaggagtgcacagggccagcagcaagataacaggcgcgtacgcgtaccagagagagagagagagaacaggctatagcgctagctagctagctagcttagctctatagccatggcggagacggccatcgcggcggtgctctccaagttcggagggctcgcggcgagcgaggccaaggtgctgctggaggtgggagacgacatgatgctgctgcgtgaccgcctcgagtggctgcaggccttcctccgcgacgccgaccacaagcgccgcaccggcgacgaccgcctcacccgcgtctgggtgcgccagatgcgcgacgtcgccttcgaggcggaggacgccgtcgacgagttcttccgcaaggttgacatggaaggcatgggttaccaacgctggatcacatggctcaagaaatgcttgctaggctccatcagaaaattgtctggtcgcctcgaaaaaattaacagcaggctccatcagatctcggagaaccaaaaggagtacaaggtcgagcatacaccatcagcgacagtactcacgtcttccactacagccacnncagcatgggcgggatggtacagaaacggcgtgggtttttgagaaagaagtggagacactanagggaatggctgcttgggtaaaggtcgcccctcagctggacgttatctccatacttggnaaaaagagcggtgtggngaaagcaaacgctgtcacgtatt

SEQ ID NO: 93749 - DNA, 476 bp, Zea mays
  Clone ID: MRT4577_185488C.1
gaacgaagcaggtgcacaactcgcgagcaagagcgctctggctggctggcggctgctgtcagtctcctccagcgggaccgacctaactactactgacggtgcgctgaaggagcacaagtgggggctctactcatgctctgctgagtacaataacatagtttgggcacttacctgcacgagaacaaggagtcgaaatgcggagtgacattgtgggacataggcgtggagtcaaagcttagtgctgatgtgctacctatacgggacagataacagcaccgacagatagaaaagcaccatttgacgatgttgtcatcagctgtacaattacgtgatcagtagacatatgaggtctggcattaggataggctgatgttagacataacgtttgagcaacttgcttgatctactcaccaaggcgcaccatgtcattatggatctacttatgaaagggggcctcaactacctgagaaggaata

SEQ ID NO: 93750 - DNA, 281 bp, Zea mays
  Clone ID: MRT4577_185489C.1
acaggactaggactcgcgggtcgacgcaagcctctacacacgacgtcgtaatagcacgggcacggagaaccagtgcccgaccatccacggcagcgtggactcgttcccgttcaaggccggcaagtgccagaataagaaccatgtgccgggagccgacgtccttcaccgtcaacggggacggcagcaccaagaacgcaccgcccgagttccagaacaccaagctcatgaggcgccgcatttagacgctggactagatcgagggcccgctcgacgtcagctcc

SEQ ID NO: 93751 - DNA, 134 bp, Zea mays
  Clone ID: MRT4577_18548C.1
cggaccacactgatactccggcagcccacccaaattgataggggctagaactagagaggcacaacgggcaaaaaactgtaaagaactagatgggaggccaaacactgccaggaccgacacggctggacaaaaat

SEQ ID NO: 93752 - DNA, 245 bp, Zea mays
  Clone ID: MRT4577_185490C.1
gcaaaacatcctaactatagtggaaggggttaaacctataatcaggggccccgaggggacccagctttggaccaagtccttggctagccagggataatatcgaatctgaaagcatggcatggcaatccataattggtttactggaccacataatgcatgggtaacttatggatgtcttttggggtttaagtatggtgggaataccttctttgccattaaaaaaaatgttaattccttttcaaaaa

SEQ ID NO: 93753 - DNA, 645 bp, Zea mays
  Clone ID: MRT4577_185491C.1
gcgaaaaacagcagctgagaagtccaaccgaagatgagcagctcttctgaagatatgcatgaacatcatggtgatggacgtcgtgctgctgctgttcaagtcatcttctcgtagtcccaaattgctcgagggaaggcgtcctctgtggctgaaactggcagcacagatcatgttccgtcggcgtcgtcaactgctgcagactcaagcacgcttgctgacaaggcaatagcaggtctgcctccagaccttctgaacaagctaacgattcgaagcggaaggctaagtcacaggaccctggctggaagttcggttggtggcctgatccgtctaagaaggagttcgtgcaatgtatcttttgcatgaaagtggtgccctctggaataaagaggttcaaacagcacctcgccggcggattcggcgacacgatgaagtgtgcaagggttccagaggttgtttcaaaggacatgcaagcttatcttaagaagaacacaaggtctgcacttgttttggatgacgatgaaagtatagaaggagaagacgatgctgctgctgctgcccccgttcaatctgaaccaagttctggtactaaatacaagcaagcaaagaaaaaggtttctcaagctgcaatgtcctcctttgttgtct

SEQ ID NO: 93754 - DNA, 588 bp, Zea mays
  Clone ID: MRT4577_185492C.1
acttcccgctccgcatcggctccggggacaagcgcccgtcgccggcgccgcccgagcccgccacctcctcggactcctcctcgtcttgggccagcggctcgcacaagaggcggaagcgaggcgaggccgcggctgccaacatggccatggcgctggtgcccccgccctcccagcttaaccggccggcccagccgtggttccctgccgcgccggtcgagcaggcggcgatggctccgcgcgtggagcagctcgtcgtctagccatgcgtgcaacgatggatgcgccggcgaaagcgggggagggacagggcaaggtcgtgcgctgcacttgcgtgacagctccaccggatggaatgcgaatatgcgataaagctcgtgatgccgctgttgctctccgtgcaactggcgcaagtggaagaagctgtctctgtgtgtaatcaagtgtcttgtctgcggacgaattttcgggttgtgcgtcgttgtcactgctcgggattgtgctgctgctgataagttcggaaaactgtacacccacgtagggagagagacgatccgtgatcaagaacaacccgctttgttctaactctga

SEQ ID NO: 93755 - DNA, 684 bp, Zea mays
  Clone ID: MRT4577_185493C.1
gtgttgccagtccactcgccgccgccgtccccctctcgctccctctccctttgtcgcgccgccgccaccgtctcttgtctcgcctgtcgccacctcaagatgtggggcggcgacgacggagggactccggaggtcaccctggagacctccatgggcgccttcaccgtcgagatgtaccacaagcacgcgcccaagacctgcaggaacttcgtcgagctcgcgcgccgcaaatactacgacaacgtcgtcttccaccgcatcatcaaggatttcatcgtgcaaggtggggatcctagtggaacaggcaggggcggcgaatccatctacggagcaaaatttgaggacgagataaggccagagctgaagcacaccggggctgggattctatcaatggcaaacgctggtccgaatacaaacggaagccagttcttcatcactcttgcaccttgtcaatcactggatggtaagcacacaatttttgggagagtatgcagaggaatggaaattgttaagcgccttggaagtattcagaccgacaaaaatgataggcccatcaatgaagtgaaaatcctgcggactgttgttaaagattgaagcacggctgttgtcatgaaactcttaatctttggttgtagctgtttcacatgagcatgtgttcccagtttgactgggaggtcttgtaat

SEQ ID NO: 93756 - DNA, 1408 bp, Zea mays
  Clone ID: MRT4577_185494C.1
ctcgatcacctttctcccctgcttccattcccatttccacacacacacgtctcagctcactccctcctccagtttcgtcagctcgtcatcataaaccgaacacagagctctcgattccattccaggatgctgctgaacccggcgtcagagacgtcggtgctagacaccatccggcagcacctcctcgaggagccagcggcggcggaggcgcggccggccgacgagagcttcgggagcctggtggcggaccagtggagcggctcgctcccgttccgcaccgacgacgccgacgacatggtggtgttcggggggctgcaggacgccttcgcctacggctggctgcccgacggctcattcgggcacgtgaagcccgagccagtgcggtcccccgactcgtcctcctggcacccctgctcctacgacggctcaacctgcttcggcctccgggacccggagcagccactgacgcccggcacgaccacgcccgggagggggccggagggggcgccggccgcaaaggcccggggcaagcactacaggggggggaggcagcgcccgtggggcaagttcgcggcgtagatcagggaccccgccaggaacggcgcgcgcgtctggctcggcacgtacgacaccgccgaggacgccgcgctcgcttacgaccgcgccgcctaccgcatgcgcggctcgcgcgcgctcctcaacttcccgctccgcatcggctccggggacaagcgcccgtcgccggcgccgcccgagcccgccacctcctcggactcctcctcgtcttcggccagcggctcgcacaagaggcggaagcgaggcgaggccgcggctgccaacatggccatggcgctggtgcccccgccctcccagcttaaccggccggcccagccgtggttccctgccgcgccggtcgagcaggcggcgatggctccgcgcgtggagcagatcgtcgtctagtctagccatgcgccggcgaaagcgggggcaaggccctgcgctgcacttgcgtgacagctccaccggatggaatgcgaatatgcgataaagctcgggatgccgctgttgctccttgcaactggcgcaagtggaagaagctgtctctgtgtgtaatcaagtgtcttgtctgcggacgaattttcggtatgtgcgtcgttgtaaaaaaaaaaaaaaaagctgctgctgataagttcggaaaactgtacaaagacgtagggagagagacgatgcgtgatcaagaacagcccgctttgttctttctctgataaaaaaaatatccagcggccaaacaggcgcgcaagtcaacagaacagcgacctgagctcgtgacacgagatcgagatcgaaatcgcccccactgaaaccagaactgcagagccgagcggtaatccaacgctgacgacgtaac

SEQ ID NO: 93757 - DNA, 136 bp, Zea mays
  Clone ID: MRT4577_185495C.1
tctcaacacttacacatttaaccataatctcaattcatgccttacatcaaaacatacctccctttcataccttgcttcatctaattacccatatttcattaatcttacactgcattaactcaaatctccgactaac

SEQ ID NO: 93758 - DNA, 588 bp, Zea mays
  Clone ID: MRT4577_185496C.1
gcctgtttgcgcatcatcttattgcatcgggttatggggtgcttgtccatcatagtttgccgcttcatgtctttgctttgatcggccgagtggtgaggatggatgtcctgccacgaacggatcctgccggaccgatctgtcttcatacagcttgaaggggctagttctgccactattatattccttgtcaagccaagcactgcttgattgggatataacaacttcttcaaagcgacgatgtgaatgaccaagcacaaggcaggctaggcggtctctcccatcccatgattggcggactgcctgctgttttagaacatgcttaatgatctcttgaatgtctgtctgggccaatcgcaccaactctttagtgcaggcactcctattgtaatggcaaacatgctaatttctgctgtcgaccaatccgattccgttattgatctgacgcatcgtgctcagtaaatgctgggtggcgtgctggaacctgtaggtctgggggcgttcaaagcatgcgcctcgtttgacctgacctatgctttgggggtgccaatcttcacatcgttcaacatcgacctgacgaatgatacggag

SEQ ID NO: 93759 - DNA, 361 bp, Zea mays
  Clone ID: MRT4577_185497C.1
attgatgcattaggcatattaatgcatttttagacggttatcgcaagataatattatgattaagtcatcatcataattacgacaaccaaattcttatgtatataccaacataatcagacataacataaatagaactcgagcactctacaaaatactaacttcatcctattaccgtatgaacagaacattttactagtatttaagaccactgctcatcacatacgtagaacctatttaattatatttaacatatacacccatcgaggtactactcacataacctacccatcgacgatcattatacaatgtgattaattcaccattgaatacaagcacaccacaacatcagatcaatccaatc

SEQ ID NO: 93760 - DNA, 184 bp, Zea mays
  Clone ID: MRT4577_185498C.1
gggggacaaaaaccacccaaaatttcctttttttgaacaattaacggtttttttttaacttccggaaagaatccctggtgcccaacaaaaccttaggctccagggttaacacccctttaataatttaactttgaaccggacaagggcctgggacctactaaattttgatttccaaccagaaaac

SEQ ID NO: 93761 - DNA, 444 bp, Zea mays
  Clone ID: MRT4577_185499C.1
tccttctttcattcccctttttcttcggcccatacccctttttatccctacctaatattttctagaagcgctctatatcttacaagggagatcactaatcctattccctttttacctccatctcccttatgactaatattacaacttcatcaccaagtacctgaatttccctactgttacaaacaacttaaccgttaaatacctcatcacctttccactcacatcctctttaaccactaatacctccaccatatcctataatacgcccattactactactacccaatataatcctagataactcccatctttaccttttaagtatatttaaccctcctctcccttcattctttaccttattataattcctattacaactatatcttttttcaatattcattaataactttacattttcccatttcattcatttcatttccctct

SEQ ID NO: 93762 - DNA, 298 bp, Zea mays
  Clone ID: MRT4577_18549C.1
acttttggggcgaagaattggatgaaaaacttgaacgatttgttagaaactatgtcagagatgtatatagtgatctttcagaaattatattgaagatgacaaagaggggcgtacaacgacatattggtgaggacttcgctgaggatctgcaagatgggttattaacatccaaagtttattttcttatcaaatctcttatggggtataggcatatgcaagatttgagatgcattgtttttgtcgaaagagttattacaagcattgtgttggaggcccttctgtcaactataatcaaatg

SEQ ID NO: 93763 - DNA, 223 bp, Zea mays
  Clone ID: MRT4577_1854C.1
agccacagaatctagcgccctgacaggcaatccaatgaatcgatcctaaagggcaatgcaaaggacgccacagtcctaagcatgaacatcctacgagcgccaacatactgattctaaaccgcactcatgctcatgatctcggatagacaagccggtggcagaagaaatacggcgccagctgcagcatgcgcacgccatatacaacgtgaagcagaacacgcac

SEQ ID NO: 93764 - DNA, 165 bp, Zea mays
  unsure (1)..(165): unsure at all n locations
  Clone ID: MRT4577_185500C.1
cgcacatatttgctagccccacatattnatttctggacacaaaatattgaactgggcctgggggccctttttagatccacaacgtggccttcaaaataacagtcanaggaggctacctgacggtgaacacgcttgtggccgtggtgcttccatttctcggggact

SEQ ID NO: 93765 - DNA, 940 bp, Zea mays
  unsure (1)..(940): unsure at all n locations
  Clone ID: MRT4577_185501C.1
caagtttgacaaccgcctcaaggaattcacggagaggtgggaggttgatgccttcttgagtgcgagtggataccttggggataacatccacccgttcttcgtggctcttccaaaggaccgtggaacaatttccaatgaggagttccgcaggcagatctgtcatgttgatattgatgtactacgtcacttgcgagataatgtaaaaggggggttcaatgaagagaaatatggatcacacattgggttcagctgcctgaggaagtacctcgaatctgaacttcagaagaggtacaaagaagcagctccagctaccctggcattgttagagcagaggtgcaccgaagtctcaatgaacctaacgagactagactccaaactacaagcagcgtcggatgtctctcagctccggagatcggcaatgcttcatgcagcttctatttgcaccaacttgaatgcattacttgatggagctgctgatccagctccagaaatatgggggaaaactacggaggaggaacaaatacatagtggtattggcagctggcctggcattaatatgcctgtaaaacctgccaactccagccttaagctgatnggtggtgcagcttttgagaagagtaatgcatgaactttcgctgtgcaacgtattncattggaatgcccacaagtgtcaagggaagaaggttgcgaacatactacttgctcatgctggaagacgcggaacagtaggttgactaggcagcagttgcgatagctcgtgcagccgcacgatcatggcttgctcctcttattgataccgcatgtgaccggcttgcatttgtcctaaaaatctggtttgatcttgctatggagcgcaaccgcaataatgactcacaatatcatcaaaattntgaagatatggataagntaatgttgggctttcttgctgctctccggtgct

SEQ ID NO: 93766 - DNA, 434 bp, Zea mays
  Clone ID: MRT4577_185502C.1
gtttattgagccaacgatcttgggaagaatacgacccatccaacctgtataatcagaggctacaggcttgctatgcgtgaagcctgcaaatatgttgaggaaaaattggcaggcaaggttgacaaacttggaaaagactcccttatgaactctgcaaaaactagcatgtcttcaaagctgataaatagtgacagcgatttctttgcaactctggtgtgcgaagctgttcaagctgcgaagattacaaatgccaagggagaggtgaaatatccaatcaagccatctctgtgaactgctgggccttgctgcgcatattactgtttggacaatatgatctgctgcaatagtatgcaattgagaagttattacaccccccccccccaaaaaaaatctcaaaggtgggcagtgctgggcctgctggctaatgattacag

SEQ ID NO: 93767 - DNA, 562 bp, Zea mays
  unsure (1)..(562): unsure at all n locations
  Clone ID: MRT4577_185503C.1
ccggggagccgccaaaaccctagcgccgccgccgcgaatcctgcacgaccccaccatgaccgtgctgagccgccctaccccgggaagacgtcgcagatctacgccatccgccaggccgtcgccaaggggctcgtcgcctactaccagaagtacgtcgacgaggccgccaagaaggagatcaaggacatctttacccgctacgatcgcaccctcctcgtcgctgacccccggcgctgcgagccgaagaagttcggcggacgtggtgcccgcgccaggttccagaagtcgtaccgttgagcggctgcctgctccatctcgatttttcagatcgttgtgggtgttcttcgctttatttcctatcaatggatctgcttatctggttctatatctagctgctgttttaccataatgtttagactttaatgcctagcctgaaaccttgtttgcaatgtgaaattaatgtgagagattatgaagactattttggttagcccctctattatgattttcatcattccagtattgagaattatgatattgccccctaatggttntggtgtag

SEQ ID NO: 93768 - DNA, 739 bp, Zea mays
  unsure (1)..(739): unsure at all n locations
  Clone ID: MRT4577_185504C.1
gagccgcctaaaccctagcgccgccgccgcgaatcccgcacgaccccaaccatgaccgtgctgagccgccctaccccggaagaagaccgccgtcgcggttgcgtacacgaagccggggcgcggcctgatcaaggtgaacggcgtcccgattgagctgatccgaccggagatgctccgcctcaaggccttcgagcccatcctgctggcggggcggtcccggttcaaggacatcgacatgcggatccgcgtccgcggcggcgggaagacgtcgcagatctacgccatccgccaggccgtcgccaaggggctcgtcgcctactaccagaagtacgtcgacgaggccgccaagaaggagatcaaggacatctttacccgctacgatcgcaccctcctcgtcgctgacccccggcgctgcgagccgaagaagttcggcggacgtggtgcccgccccaggttccagaagtcgtaccgttgagcggctgcctgctccatctcgatttttcagatcgttgtgggtgttcttcgctttatttcctatcaatggatctgcttatctgggtctatatctagctgctgctttaccataatgtttagactttaatgcctagccctgaaccttgtttgcaatgtgaaataatgtgagagatatgaagactattttgggtagcccctctattatgattttcatcattccagnattgagaattatgatattgccccctaatggttttggttggag

SEQ ID NO: 93769 - DNA, 648 bp, Zea mays
  Clone ID: MRT4577_185505C.1
gagccgccaaaccctagcgccgccgccgcgaatcccgcacgaccccaaccatgaccgtgctgagccgccctaccccgggcacggcccagtgcttcgggcggaagaagaccgccgtcgcggttgcgtacacgaagccggggcgcggcctgatcaaggtgaacggcgtcccgattgagctgatccgaccggagatgctccgcctcaaggccttcgagcccatcctgctggcggggcggtcccggttcaaggacatcgacatgcggatccgcgtccgcggcggcgggaagacgtcgcagatctacgccatccgccagaagtacgtcgacgaggccgccaagaaggagatcaaggacatctttacccgctacgatcgcaccctcctcgtcgctgacccccggcgctgcgagccgaagaagttcggcggacgtggtgcccgcgccaggttccagaagtcgtaccgttgagcggctgcctgctccatctcgatttttcagatcgttgtgggtgttcttcgctttatttcctatcaatggatctgcttatctggttctatatctagctgctgttttaccataatgtttagactttaatgcctagcctgaaaccttgtttgcaatgtgaaattaatgtgagagattatgaagacga

SEQ ID NO: 93770 - DNA, 827 bp, Zea mays
  Clone ID: MRT4577_185506C.1
cattgggtacctcgaggccggccgggcccgagccgccaaaaccctagcgccgccgccgcgaatcccgcacgaccccaaccatgaccgtgctgagccgccctaccccgggcacggcccagtgcttcgggcggaagaagaccgccgtcgcggtcgcgtacacgaagccggggcgcggcctgatcaaggtgaacggcgtcccgattgagctgatccgaccggagatgctccgcctcaaggccttcgagcccatcctgctggcggggcggtcccggttcaaggacatcgacatgcggatccgcgtccgtggcggcgggaagacgtcgcagatctacgccatccgccaggccgtcgccaaggggctcgtcgcctactaccagaagtacgtcgacgaggccgccaagaaggagatcaaggacatctttacccgctacgatcgcaccctcctcgtcgctgacccccggcgctgcgagccgaagaagttcggcggacgtggtgcccgcgccaggttccagaagtcgtaccgttgagcggctgcctgctccatctcgatttttcagatcgttgtgggtgttcttcgctttatttcctatcaatggatctgcttatctggttctatatctagctgctgctttaccataatgtttagactttaatgcctagcctgaaaccttgtttgcaatgtgaaattaatgtgagagattatgaagactattttggctagtccctctattatgattttcatcattccagtattgagaattatgatattgtcaaaaagccaggaatcgatttgtaatttcagtgaagttcaaagctgtattgtatgg

SEQ ID NO: 93771 - DNA, 329 bp, Zea mays
  Clone ID: MRT4577_185507C.1
acgcaaagtgctttatcctgtggagctcagcatgctatctatgatctgtcatgcaactgaacgggtgtgagctaattgatgacaaacattgatgctagcatgaccaagatttacatggtactcctactggtacttcaaagcagaactgttctactggattaaaacatacattaggcaaatattgaggaactacaatattccttgatggatggaatgataactccaacttctgagattgatctagaattcataatcttggcatactacaaccattatgagtctaagtcagcgactctagaatttataatggatagaccttgcatgataat

SEQ ID NO: 93772 - DNA, 880 bp, Zea mays
  Clone ID: MRT4577_185508C.1
attgggtccctcgaggccggccggggtggctataaaggccaatccactctctctccaggcaccccgagccgccaaaaccctagcgccgccgccgcgaatcccgcacgaccccaaccatgaccgtgctgagccgccctaccccgggcacggcccagtgcttcgggcggaagaagaccgccgtcgcggtcgcgtacacgaagccggggcgcggcctgatcaaggtgaacggcgtcccgattgagctgatccgaccggagatgctccgcctcaaggccttcgagcccatcctgctggcggggcggtcccggttcaaggacatcgacatgcggatccgcgtccgcggcggcgggaagacgtcgcagatctacgccatccgccaggccgtcgccaaggggctcgtcgcctactaccagaagtacgtcgacgaggccgccaagaaggagatcaaggacatctttacccgctacgatcgcaccctcctcgtcgctgacccccggcgctgcgagccgaagaagttcggcggacgtggtgcccgcgccaggttccagaagtcgtaccgttgagcggctgcctgctccatctcgatttttcagatcgttgtgggtgttcttcgctttatttcctatcaatggatctgcttatctggttctatatctagctgctgctttaccataatgtttagactttaatgcctagcctgaaaccttgtttgcaatgtgaaattaatgtgagagattatgaagactattttggttagcccctctattatgattttcatcattccagtattgagaattaaaaaaaacccgacagatccaaagaaggctcgacaaggattgatggaacaagactaaagcaaaacagaataaaaaaaaaatta

SEQ ID NO: 93773 - DNA, 429 bp, Zea mays
  Clone ID: MRT4577_185509C.1
aaacagatggacaacccgaacgatggtttatccctatgagaattattatacataaaagtttggagtgttgaaggcaagcagctgaacctactgcatagcatatacggccgggaactaatagagaacagaccacctatctatggcttataggacacgcatattgaaccaagctttgagactacgcttctatgaggaaccgacctggtaaaatccattgaagatacccatgaacacatcatcggccgaacaaccaagcaggcctaatgggactcatattcctagtttgatgccttatgccacgctatagcggtggttgatgctgcatgaaatctttttgccacagagtgtagagcttcagctaaattgtgatcaataacatcatagcaagttcaataagctctgagtgtgcctaggatctactaagtgtgc

SEQ ID NO: 93774 - DNA, 505 bp, Zea mays
  Clone ID: MRT4577_18550C.1
tttaaaaagcaaatttatttcaagagataaacgagagatttctgcccaatgcgatttcaagaggcctcatcgttcttgttacaaagtcagagggaagaaagagttcttcgtcgagagagagaaaaaaaaaaaggtaactcggtggcttcactacttttggctcctgccgtccgttttttgagggacagcgatcttactcttcgaatggctattaccattggaggagggaacactaggatgcaagtaccaacaatcatttcctctcttgcaattaccctttagaaaatacttgcagggttgattcttcttcgtagaggaagtagaagaagaagaatgtccagttccgtggtgggttttaggtttagcagacaccttcgcttccggaatgacgacagtgacaggaggaagaagaactgttccagagagtaaaggaatgtactcttgttgggtgagctgtagaagacagccatcgaatccgagctcgcttttgttatcgattttgaat

SEQ ID NO: 93775 - DNA, 312 bp, Zea mays
  Clone ID: MRT4577_185510C.1
ataaaaaattgatacgtagattttttgggtttttgagaaaaagaaagaaatattacttatggggtgttttggcagggaaccaggtggggaaaaaataaaatatttttcagggattatttgattttggagtactcctgaaaaaaaaaaatggaaaaaaaaaaggcagatgggcgatagcaaatattggaaaaaaataggtttgtttttgtacaagttggttaaaactaaaaggggaagggaaaaaaaaaaaaaaaaaatatggactgattgagtgttccattaaggggaattgggtatatttgggaaaaagcc

SEQ ID NO: 93776 - DNA, 310 bp, Zea mays
  unsure (1)..(310): unsure at all n locations
  Clone ID: MRT4577_185511C.1
ctgaaaccgatgctggattcctatatcgctggtgaacagtaggagccccaagttgggagtcggttaccttgctaaggagcacattttcatgtcgggcatatgacgttcggtgcacaagcagtagaacccaccatccacttacaccagtacgatcttgttccgattaggtagggtatggaatttcggacagtttttggttctactgctaaactctggtgaattccattcagttccaaaaatatttaaccaaaatttcatagatgtttgaacacttcgtccgnnaaaaaaaaaaaaaaaaaaaaanaaaaat

SEQ ID NO: 93777 - DNA, 785 bp, Zea mays
  unsure (1)..(785): unsure at all n locations
  Clone ID: MRT4577_185512C.1
tttacgcgtttgttagcgcacacgcccatgtctctgggcaccctcatcatcttgggcgccgagacggctcctctctctctctctctaccacaggcgatatgcgccgttactaacttgctccaccaaatcagctccaatctagccatggaactagctaacccttgctgaactgtggaatggtttctgagcagagcgtggcggagctgaagcagaccctgctggcgaccacgctggagctggggcggcgagggaggagctgagcggaaggagcagagcatcgccaagctgtcggacctggtgcgcgaggtggccaagagcgcgacgacgcgcgggaccaggcgcagagcctccgcctcctcgctgcccaggccgcgccgccgctcgtcacgtccagcgtcaccgactccgactgcagcctcgcgtcgtcccccgtggacccgttcttcgaccccgtcacgtccgccgacaacaggcggcgctgcaagttcagccccgccacgccgccggccgcgcccaggcagcagcagcagcgccagcccggcgccgggctcgggtcggcggccgacgccgcgctcgagatgctcgccgccaagaggcccctgccgcacaggggccgcctgctggccgccgtcatggaggccgggcccctgctgcngaacctgctcgtcgccgggccgctcccgcgctggcgctacccgcccacggtgcgcgctccggacacgctgccgctcggcgcctcccgtgccgncgggtacgcctgcgtcgcggttccgctggccgtcagc

SEQ ID NO: 93778 - DNA, 295 bp, Zea mays
  unsure (1)..(295): unsure at all n locations
  Clone ID: MRT4577_185513C.1
agtggagggccttttgttatgatgcggcacgtgcgagtctatatgaacagtagtttgggtgttaggagatcacatacgattgagcacgtacttatgaactacagaccaggccaggcaccgtttatatagtgtacattactcagagccggggggggtgcacacgatacggtgatcaagtgaagacccttccggtgccggnggtggtactcgccgnggaatngacctcacggatctnggggcttaggcccttgggggtggcgtggggtagcgggtggataccatgcttgggggcgtt

SEQ ID NO: 93779 - DNA, 250 bp, Zea mays
  unsure (1)..(250): unsure at all n locations
  Clone ID: MRT4577_185514C.1
ctggctgtgctcatcccctaccccccgccttgcccgattttgcaactgcaacacttatgcgcccgtgacgccaccctgcggggccgcctgtgcctcctgtctcacgcgcctccgacgtcctccggctcctgcgcccgctgcgccttctcaccccgcccnttgaaccccgaactgcgccgtctctcccgtatgccgccacctatgtntggcgacgccagctccgtccgttgttcctccttcccggcacact

SEQ ID NO: 93780 - DNA, 420 bp, Zea mays
  unsure (1)..(420): unsure at all n locations
  Clone ID: MRT4577_185515C.1
cccacgcgtacgctcgtagtaggcaaagttgctaattgaacatgcctttcgaacacatctgctcctcgacgggcgatgcgatagccgaattctgcgacgtccacaccgccgacagccgcaagaccctcgaggctcacctcatcggcaaaacctatgtgtctggtgactccattactaatgatgacattaatgtcttcgccgtggagccgtcgaagcctgacgctgagtttcctaatgccgcccgctggtacgagaccgactctgcggctgcagcctcaagagtccctggtaaggctgntggtgtaaatctgcctgctggatcagctcctgcggcatctgctcctgcggatgaggctgacgatgatgatgaccatgatctttttggtgacgaaactgatgaggacacgaaggcatctgatg

SEQ ID NO: 93781 - DNA, 3709 bp, Zea mays
  unsure (1)..(3709): unsure at all n locations
  Clone ID: MRT4577_185516C.1
cccatggccgctttttttttttttttcttcaactgcaacacacaaacatgtattataataaagaaaacaaaagataagcaaccattaaagggtccgagaacaaataagcaccatgttgcatgttttgataaattgattactacaaattaatgatcgcttccctcaagattaaaacaaactgccgtttcaaaacaaaacttgtgtacacaggagtggaacagatgagatatgtgcaagtcattgtgggttttggaatctgcaacagtcgtcaatatcgcttttcatgcttcacgtaggtctgtcatctcaaacctgacatttgggttcatgtacacatgggagcaatgctcatagattggtgttccatctaggggctcctcatgagggtggaatccagttgcatcacaatcatggatcacgcccatgccacatggctccgttagatgaaatatgccatgttttcttgttgtatccgtaggagccataactattgcaatcgcttccggaagcataatctgatatgcgtaatgattatgaagatcaatggaagataggaagcaggtctgtgttggatgtgtatgaatccaaccaagagataaaagggagcctttgtcctgaacttcaaatatttcttcttcattcgtagcttgacatgaatcagatgttgatttctgcttaggaattatcaatgttgtcacataaaaggttctctttttcggacgctggccggacccccatcttcgtgaccttcgtaggcggcgagcacccaccaggagaaggcatggcttcacgcatgacaccttccaagaggccttttcagagaagatcttcagactacgatggccggggcaagtggcagaagacgaagcacccttctccacataaatctcagttcaaaatcgagcctggtgttcccattttccatattctctgcccggcttcacaatctggtaatgtgaatggcaaaggaggtgccattattgtatagatacgagaagaacccatgagatatgtgaaagtcattgggggtgttggagtctgtaacggtcgtctatatcgcttaacatgcttcacgaaggtcggtgatctcgaacccgacctttgcggtgagagtgcccatgggaccactgctcctactgggggtgaccaagctaggggctacgaatgcggctggaatgaggcggcagcaccggcatgtaatcgcgcccatgcttcagagtaccagcaagaattccacaggtttccaaattctttgcggtatttaactcagcgaccctcaggaaacactccattaatgccactggcacatgcaaattctgatagcgtccggttgaagatgcagcaagtcctggtcttggatcagcaactcttgatgcaggagagagaagaaagccttggttgcgaaagttacaaagttaggtgaaacagatagggtaataccgttggcactgaaggccgtttcacttgtattcgataggatttttgcaactgaaggtaataatgaaactgggaacgcatctgctgcaagcgctcctgtttcgttgcgaatgttggtgctatacagccaagcaggttggctcctggggaagggcggtagtgtggttaagcaaatggcagcagataacggctgtgaaatccgtgttttgaaagacaaccttccgtcatgtgctctgttgaatgacaaactttgccagatcactggagagattgactcagtaaggaaaggtctcaatgctgtatctgaagtgctcttagctcatccacccaaggaaactgatgcagttgctgatgttcattcttctggatcatcgtcacgttctttgttcagccagcctgatggtcttccctctggaatgcaatctaacttccatatacctttgcaaggcccgccatcccaagccaatggaccttttgatatagttgatcttcaacctccaatacatggtcatgcctcagtggctatagaatccctctcctttaggatgctgtgtccacaagacaaggttggcagtataataggcaagggtggaaatattgttaaaaccattcaaaatgatacaggctgtgaaattaaagttcttgacactgttccaaaaacagatgatcgcatcataagtatatctggacctgcgcatccgagtgatggaatctcccctgcacagaatgccattctgcatgtgcagcgtaaaattatgttacctagctctgataagaaggaaggtcctgcaacgtgtaggctgatcgtttctggaaaccaagttggttgtgttctcggcaagggtggtagtatcatagctgaaatgaggaagctgtcaggagcatttatagtagtgttgagcaaagacaagattccaaggggtgtcccagagcatgatgaagttatccagataaacggaagttgtgaagctattcaagaagctctaatgcaggttacagctaggcttcgtaaccatcttttccgggacagaatgcctgcagtggggcctaatatgcggccaccttttggtttgttagatccccagtttggtccattttcgggaaaccatgaatcatcatccctgtttcataaagatttcatgggacgaccattggatgggattgctgctccttggacagtgaagggcatgcgggatctcagcgatccagtgtcaatatccgatatccctggagcagggcatagagaagctggtggatttccaggtcctggtcagccatctatgatgccaaacttgactgcagaggtcttggttccaagattagttatccctgttctctgcggtgaggatggaggttgtttggacaggatccgtgagttttctgaagctaagataactgtcgctgagcctacagccgatgcgatggacactgctgttttgatatctggcacaccagagcagatgcatgcagcccgaagtctcgttgaagcattcgttatgagcgaatcttttggcccatgacatgtccagaggcagtgaagctagcgatcatatgtgggttcatgtttgtgaatatgcgtcccagtctgtctgcagagtgacatatgctccaagtggctaattaggctgaatattcgactggagtcctctttctgtctgcagagtggcaaatgctccaggttgctagttatatataatcttccaaagtcgtcactttgactctgagatacggagcacattttgagtagccgcagaactatgttgcttatgcaaggaagtattgtttggacccggaaaggctctaactttatttttgttgtactgatgttgtgagatgtaccaccattgtctgtatttcagtccggctttatatctgtattttatggtattgctaccatagttaatatgacggtaaggcagcgaaaaggcgtaagccggggaatattaaatagtagaaatctttatctttatatatactaatataatgaagcagatgcaaattcaaccaagagaaaaaaaaaaaaagcccggctcgcaaatgatgatgccacaatgtcactgcgacgccgtctcgcagattatgctgcaacagcagttaccattcatgttcaacccaatggccatgacgattccacccatgttcttacagcaaccctttgttggtgctgcattctagatagaaatatttgtgttgtatcgaataatgagttgacatgccatncgcgtgtgacttattattaacaataaaacaagtttcctcttattatcttttt

SEQ ID NO: 93782 - DNA, 1454 bp, Zea mays
  unsure (1)..(1454): unsure at all n locations
  Clone ID: MRT4577_185517C.1
gcgtcacctcgccttacgccttatcgcttaaaaggtaaaaaggggtcggtcgcctgacctcgtcttgccactttaacaactatgatggcttcataattaacattttatttatctattaggtcaaatcgaacaaaagatatgcaggggcatcaaactggacagtaaaggaagttgttgaatcagcgaggaatgattttggcagcattgacatactagtgcattctcttgctaatggcccagaggtaacgaagcctttgttggaaacctcaagaagaggctatcttgcggcaatttctgcatccagttactcctatgtttcattgcttcagcacttccttcctataatgaatcccggtggtgctagcatctctctaacatacattgcatctgaaagggcgattcctgggtatggtggtgggatgagttctgctaaagcagctcttgagagtgatacacgggtgcttgcattcgaagctgggcgaaaaggcaaaatcagagttaacaccatatcagcaggccctcttgggagccgagctgctaaggcaattggatttattgagaagatgatagagtactcatatgttaatgcaccattgcagaaggagctgttggctgatgaggtggggaacacagctgcattcctggtttcttcattggcttctgccatcaccggctcgactgtttatgttgacaatgggctcaatacaatggggcttgcaattgacagccctaccataacgtcatagatgtggttgtggtagatagacgacctttcctgctgcattgcggtatcatccttgaataaagatcatagttagttataaatatgagaggtaagggcaggaaagggggaaaattatgaactggtcttttgcgctttctttgctggagaggaacattagagcgatttccagaatgatgggatgctattatgtgatttcatatgattcagaagcagtacaataactccctagatgagctgtcataactatacttatgtttaagaaacagcctacatcttaggtcacttatgttttaaaaaaaaaaaaaaaaaaaaaaaaaaaaaaaactaaaaaaaaaaaaaaaatacgctcccggccccgggcaaggtnacacacaaatatttctatctagaatgcagcaccaacaaagggttgctgtaagaacatgggtggaatcgtcatggccattgggttgaacatgaatggtaactgctgttgcagcataatctgcgagacggcgtcgcagtgacattgtggcatcatcatttgcgacatcatgctcggcaagaccattggtgacatcatgctcggcatcatcaatggtgacatcatgttaggcgtcatcatctgtggcatcatcactggcatcgtctgaagcggtaaggccaacagttgctgcagcatcagggacggacacgccatcaagctggcaagcccctgttgcatcatgca

SEQ ID NO: 93783 - DNA, 200 bp, Zea mays
  unsure (1)..(200): unsure at all n locations
  Clone ID: MRT4577_185518C.1
tacataaacaatgccccctacaggccattataacgccacttctactaacaccaactaatcacttttaatcatcagaatgggtggccttctctcaattatcnnnaattcaaacaccanctccnnaacctcctaccancctttntantccatcccacacaacctaatacctanctcctcttcttacctatccatacaaacct

SEQ ID NO: 93784 - DNA, 200 bp, Zea mays
  Clone ID: MRT4577_185519C.1
aaaaccgaccaaaagcaaaggcaggattttttaacgcgggctacggaagagtgcaccggtaactgtattgaccaacagcacaactgcagcatctaacctggaaaaacaaaggcgcggtgggcatggcaccagcttacgatgacgaagcaccatgcgccacaaaatagctgatacccgtgcgtaggaaccccaccctagag

SEQ ID NO: 93785 - DNA, 773 bp, Zea mays
  unsure (1)..(773): unsure at all n locations
  Clone ID: MRT4577_18551C.1
ccggccgggaacatcatcaccagctttctctcttcccccaccaaaacctctctccttcaccaaacacataaataataaaccgtcaacatgcctaagaacaagggaaagggtggaaagaaccacagacgtggtaccaaggagaacgatgaccagcgccgagagctcaccttcaaggaggacggtcaggagtacgcccaagtaatcaagatgcttggaaatggtcgtctcgaggctttgtgcttcgacggcagcaagcgtctcgccaacattcgtggaaagatgcgaaagaaggtctggattaaccagggtgatattatcctcctgtccctccgagacttccaggacaacaagggcgatgtcattctcaagtacaccgccgatgaagcccgtaccctcaagtcctacggcgagcttcccgagaacgccaagatcaacgagaccgactccttcggacagggcgaagatggcgaggcctacttcgagttcggcgacgctgactcagacgaaatntctgacgatggcgctgctggcaagaaggaggtcgacattgacgacatttaagctccttccgggaaccaccaaatccccttcttcctccaccgagcccccgacctggccccggatgctccacgattcctcgggttggcgttgttgatactgtcttctctctcanacccggagctgagcactanaacttctggtgcgtcgggtcccacgacagtagtttgctgtggagcttagacagcatgngggggggaggaacgtcatggctt

SEQ ID NO: 93786 - DNA, 1182 bp, Zea mays
  Clone ID: MRT4577_185520C.1
gtattaagcggtaaggcaagcagttgttgcagcatcagggatggacatcgaggccggccggggtgtaatcagttagtggtattaataaacgttcctgctacagtcgaattcacgcggggatcggcctcagtcgcacatatctactatactatactctagggaagcaaggtacaccaccgtcatgggagccaagtatgccttgcattgatcgctctgctagctctttgtgcaagcgccactatgtgcgacccatattccagggcacttgccaccagtcatgccattgggtaccatgaacccatgcatgcagtactgcggggggcaacaggggcttgccagcttgatggcgtgtccgtccctgatgctgcatgaacatgttggccttaccgcttcaaacgatgccagtgatgatgccacagatgaggactgctaacatgatgtcaccattgatggatgccgagcatgatgtcaccaatggtcttgccgagcatgatgtcgcaaatgatgatgccgtgcaggatgctattgccacaatgtcactgcgacgccggctcgcagtattatgctgctacatgctgtttaccattcatgttcaacccagtggccatgacgatcccacccatgttcttacagtcacccttttgttggcgctgcattctcggtcgcaactatttgtgttgtatcgaataatgagttgacatgccatcgcgtgtgactcattattaacaataaaacaagtttcctcttattaaaaaaaaaaaaaaaaaaaaaaaaaaaaaaaaaaaaaaaaaaaaaaaaaaaaaaaaaaaaaaaaaaaaaaaaaaaaaaaaaaaaggaggaaaacaaaaataagggaaaaatctaaaaggataaaaattaaaaaagatggaccaaacaagaaagcaattaggagggcccattttgggcctccaatggggcccaaaacaattaaggggaacatttaaaaaaaccacaaaaagggggaaaaccttgggggtaacccactgggggccccaatctgcacattctgattttaaataactgttataggagcgggttttacaaaacaaaaggccggtaaaaacaggtgttcccccattatggccattggaaaagccctatggtttcccattatggcgcgccattaaaaggggccccacacaaggttacccccaaaattgc

SEQ ID NO: 93787 - DNA, 362 bp, Zea mays
  Clone ID: MRT4577_185521C.1
ggggccgggcccaaaacgaaacagccgggcccttctaaccccccaatgggccccccgaaaccccacccacagggtctaggtgcccgctcgaatcaccctcccggccggaaacaagatcaaaaagccccttgggctttgggggggttgaccgcccccagccaccaaaaacatttgcttggtgaaaaacaaacttaacattcccccaaaatacaacttttcgaccaggatttctcatcatctgggacatctgggggaaaaaacctctggggatccctggaccgctcttcggaggtggacctaggcttcaccctctccgggacaggctcaagggggataatactggctccatcgatcaccccctc

SEQ ID NO: 93788 - DNA, 398 bp, Zea mays
  Clone ID: MRT4577_185522C.1
accactccgcgctagctgaggacggttcatcggctcataggtgcgacgggcgacgacggcgactcatgcgccacacatggcatcccatctctccgccgccgtgccccggttccacggccttcggtgctactccgcgcccaggtccgcggtggcggcgctgccgtccgtgagggtgggcaggaagaggtcgtcgtcgcatggcatccgctgcgactacatctgctccgccaccaacctgatcatggtgacgacgacgacgctgatgctgttcgcgggacggttcggactggcgccgtccgcgaaccgcaaggcgacggcggtgctgaagctggatgcgcgcgactccggcctgcagacaggtgaccccgccgggttcaccctcgccgacacgctggcct

SEQ ID NO: 93789 - DNA, 405 bp, Zea mays
  Clone ID: MRT4577_185523C.1
cggacgcgtgggccactccgcgctagctgaggacggtacagcggcacagaggtgcgacgtacgacgactacgacgcaggcgccacacatggcatcccagctctccgccgccgtgccccggttccacggcctccggggctacgccgcgcccaggtccgtggtggcagcgctggcgttcgtgagggtgggcaggaagaggtcgtcgtcgcaaggcatccgctgcgactacatcggcttcgccaccaaccttgatcattgtgacgacgactaccctgatgctgttcgcggggcgggtcgggctggcgccgtccgtgaaccgcatggcgacggcggggctgaagctggaggcgcgcgactccagcctgatacggtgaccccgtcgggttaccctcgcgacacgctggct

SEQ ID NO: 93790 - DNA, 348 bp, Zea mays
  Clone ID: MRT4577_185524C.1
accacgcgtacgtgcgctagctgaggacggtacagcggcacagaggtgcgacgtacgactacgaccactcatgcgcgacacatggcatcccagctctccgccgccgtgccccggttccacggcctccggtgctacaccgcgcccaggtccgcggtggcagcgatgccgtccgtgagggtgggcaggacgaggtcgtcgtcggagggcattcgatgcgactacattggctccgccaccaacctgatcatggtgactacgacgacgctgatgctgttcgctgggcgatttgcgctggctccgtccgcgaaccgcacggcgacggacgggctgaagctggaggcgcgcgac

SEQ ID NO: 93791 - DNA, 441 bp, Zea mays
  Clone ID: MRT4577_185525C.1
ctccaaaataaactagtaccacagcactcttacgtagctgaggacggtacagcggcacagaggtgcgacgtacgacgacgacgatcacgcgccacacatggcatcccagctctccgccgccgtgccccggttccacggcctccggagctactccgcgtccaggaccgcgaagacggcgctgccgtccgcgagggtgggcaggaagaggtcgtcgtcgcagggcatccgctgcgactacatcggctccgccaccaacctgatcatggtgacgacgacgacgctaatgctgttcgcggggcggttcgggctggcgccgtcggcgaaccgcatggttacggcgccgctgaagctggaggcgcgcgactccggactgcagacgggtgaccccgtcgggttcacaatcttcgatatactgggctggggtgccgtgaggatgatcct

SEQ ID NO: 93792 - DNA, 346 bp, Zea mays
  Clone ID: MRT4577_185526C.1
acccgtccatggaatatatagggtgggagcccaggactgggctactagactgctgggaagcgcatataggaggattgccgggagcgcctggccgcacgcacaaaaaccaatgcctaaagtggcctgtggtgggcgaggaacatccacgggggagcatactcatcggtggctagtgattattcgtggccacatcatattacggaatgtgagtgccaataaacgggatatgccttcttcgatcacctcggaggagagtatcattagaatgttcatacagggctggactattgaggttctggctacgcacgctgctgttgcggctcttgtgtttgtggcctatatgtac

SEQ ID NO: 93793 - DNA, 426 bp, Zea mays
  Clone ID: MRT4577_185527C.1
agtgcccacgcgtccgcccacgcgtccgcaccagcgtccgtgctagctgaggaccgtgcaccggcacagaggcgcgacgtacgaccacaacgacgcaggcgccacacatggcatcccagctctccgccgccgcgccccggatccacggactccggggctacgccgcgcccaggtccgcggtggcagcgctgccgtccgtgagggtgggcaggaagaggtcgtcgtcgcagggcatccgctgcgactacatcggctccgccaccaacctgatcatggtgacgacgacgacgctgatgctgttcgcggggcggatcgggctggcgccgtccgcgaaccgcaaggcgaccgcggggctgaagctggaggcgcgcggactcgggctgcagaccggtgaccccgccgggttcaccctcgcccacacgctgg

SEQ ID NO: 93794 - DNA, 592 bp, Zea mays
  Clone ID: MRT4577_185528C.1
gtgcggcgctcaggcggaggccgcgacagtactacaccactccgcgctagctgaggatggtacagcggcacagaggtgcgacgtacgacgacgacgacgcaggcgccacgcatgactatcccagctctccgctcagctcgtgccccggatccacggcctccggggctacgccgcgtccagctccgcggtggcagcgctgccgtccgtgagggtgggcaggaagaggtcgacgtcgcagggcatccgctgcgactacatcggctccgccaccaacctgatcatggtgacgacgacgacttctgatgctgttcgcagcagcggctcggactgcatccgtccgtgaaccgcaaagggacactagcgctgaaactgcttcctcgccactcctaactgaacacgccggacgcccgcgatctacgcctgttcgagactgtgtgctgggcttatgtatgtctgagattgtgcagggtcatcgtacttggctagcgtacgtacgtgcacgtactcagctcctgtacgaattacgacaataagctcgtgacctgaataaaacttcttcgtaatacaaaaaaaaaaaaaagaaaggccccta

SEQ ID NO: 93795 - DNA, 1079 bp, Zea mays
  Clone ID: MRT4577_185529C.1
tacgtaagctcggaattcgtctcgagactaaagaaaatggcccttagggttattgctgagagtttatctgaggaagaaatcgcggggttaaaagaaatgttcaaaatgattgacagtgacaacagtggtcatatcacattggaggaactaaaaactggcttgcagagagttggtgctaatttgatggattcggaaatcaatgctctaatggaagctgcagatatcgacaacagtggcacaattgattacggggagttcattgctgcaactttgcatataaacaaagttgaaaaggaggataagctctttgctgctttctcatactttgacaaagacggcagtggttacataactcaagatgagctccaaaaggcatgtgaggagtttggtttaggggatacccgacttgaggacattattggggacatcgatcaggacaatgatggacgaatcgactacaacgagttcgttgcaatgatgcagaagggagataatcctctggggagaaaggggcatcaaagtaatgctagttttggtcttggagatgcacttaagcttcggtaaaataggagcagatgtttaccttcataacgaagttagcattcagagactaagaaaaattgaccaagcaacaactccaaaaccgtgtcccatgcctgtactctggtctccaagcttcaatggtgccctatcaaaattcggggggtcgctgaagcaacctaggagcgtgaacttttgccggaaagcatcgacctcataaaattaacagtagggtcctcatgctcaacatggcatcttttgatttccctcctttctagttcatacgtagtggcaatgaaaccttgaggccaccgtgtaatttaagtaagcatgagaataggtgagattgcttttttctgccccctttattcttccattgtgaatcgacgacaggaagagagtgaaccatcctacgtctgcattccaagactcatgtttcagttatgttcatccgtgttggataggtgtagttcttagtgcctgtaagaatataatattgtattttaggagtctgactagtgaaacaattcttttgtgtt

SEQ ID NO: 93796 - DNA, 296 bp, Zea mays
  Clone ID: MRT4577_18552C.1
cccacgcgtccggaacgccggacctcgacacggacgaccggacgacgcacgcaggagatccggggtactggaaatttgtgaaaactgaactgtgagatggcttcaccagagctttcccgcgtaggaaaatgtgtccatggcgaagctcgctgagcaggcggagaggtacgaggagatggttgagttcatggagaaggtccccaagtactgttgactcggaggagctcactgtggtggagcgaaccctcttgtctgttgcgtacaagatcgtgcttggtgcccgccgcgcctcatgg

SEQ ID NO: 93797 - DNA, 781 bp, Zea mays
  Clone ID: MRT4577_185530C.1
tgtttaaatctggggattggtgtaattgaagctactgcactatagctaggaaggaaggaaatgcaaaaatggctgcctgctgagtgagcgctgacaacaaaacctatctatcaggtcctttagtttttgctctacccaacatgaatagagtcaagtcacaagctaggttggctgcctacatgctattttgctagctaaaagagaaggatttaatcaaggaacaagcgatgctaagctgtatcagccggttcatcgtcagggctactaattctgccgggggttgtatctgcttgtcggcgcgctcttggtgctgccgttaaactccactcccggcttcgtcgttgccgtcggggacgctgtcgtccgatggctcttgacgtcgaaggtgttggtggccatggtggcagcccccgccggtcgcagcaacctccttgatgaggtcgtggcacgacgctgcgcccagccttgcgatgccgccgccaccgcagggttgctgtcgctgccgcctgcacgctgggccgccgccgccgccgacgacgacgacgctactactaccactgcagccgtcgcactgctgttgaggaggaggaggagatagagcaggatcacggcgctcgtggccgcgcccgcgcggcagcggcatgcagcctgcttcatctgcagagcgttgagctgtgtgtgtgacaagcagtagccagcagagcaggagcaggaggactggtaggtctatggtctgttgcagttggagtagaagatgatcttggacttgcagagatatatc

SEQ ID NO: 93798 - DNA, 1299 bp, Zea mays
  unsure (1)..(1299): unsure at all n locations
  Clone ID: MRT4577_185531C.1
ctcgaggccggccgggactacctttctacccaccactccgcgctagctgaggacggtacagcggcacagagcgacgacgacgacacaggcgccacacatggcatcccagctctccgccgccgtgccccggttccacggcctccggggctacgccgcgcccaggtccgcggtggcggcgctgccgtccgtgagggtgggcaggaagaggtcgtcgtcgcagggcatccgctgcgactacatcggctccgccaccaacctggtaggtatatatatatgtatacatgtgaagtctgatgagtacgtgaggaaaagaccgacgatcatatcactgacgacggcatatgtacgcacgcagatcatggtgacgacgacgacgctgatgctgttcgcgggacggttcgggctggcgccgtcggcgaaccgcaaggcgacggcggggctgaagctggaggcgcgcgactccggcctgcagacgggtgaccccgccgggttcaccctcgccgacacgctggcctgcggcgccgtcggccacatcctcggcgtcggcatcgtgctcgggctcaagaacaccggcgccctcgaccagatcatcggctagatccctacgtcgccgttgttaagatcagactcagcagcctcgatcgcgccgccggccggcaggtgcctgcaggtggtgactttgtaacgtgtgtgcgtgcgtacgtgtacattgcatccatcttggttccaatggacatatagctcctgttaaaaaaaaaaagatttcgtagtaagtcctcgaccatccctgcaaattaccgcgatggctcccaagatcctagtcatccttgtgttcctcgccgtggcctcaccggcggctctggccgccttcgatgtgatagagatgctggccgacaagcccacgtactccacgttcctgaagctcctgcaggacaccaaggtcgcgggcgaggcgaatcagctccggtcggcgacgctactggtcgtccccgacaaacttgccaagcctctggcgtcgctgcccgccgataaggtgcggccggcggtggagaaccacgtccttctcagttacttcgaccccatcaagctggacgagatgaagacacgcaccgncatcctccccacgctgctctccgtcaccgacaagaaactcggcgtcctcaactacaccagggccgacgacgggcagatgtacttcggcgctcccggcgccccctgcgtggccaagctcgtgaaggtcgtcgcagcgcggccgtactctgtgtccatcatggagatcagcgagcccattttgccggc

SEQ ID NO: 93799 - DNA, 326 bp, Zea mays
  Clone ID: MRT4577_185532C.1
acactccgcgctagctgaggacggtacagcggcacagaggtgcgacgtacggcgacgacgacgcatgcgccacacatggcatcccagctctccggcgccgtgccccggttccacggtctacggggctacgccgcgcccaggtccgcggaggcagcgctgccgtccgtgagggtggtcaggacgaggtcgtcgtcgcatggcatacgctgcgactacatcggctccgccaccaacctgatcatggtgactacgacgacgctgatgctgttcgcggggcagttcgggctggcgccgtccgagaaccgcaaggcgacagcggtgctgaa

SEQ ID NO: 93800 - DNA, 369 bp, Zea mays
  Clone ID: MRT4577_185533C.1
ccggccgggcccgtctgtttggccacccatccgatcccacccggcagcactcggcagcggcgccgcgcaatggccacccacgcagctctcgccgcctcccgcatccccgccggcgcccggctgcacagcagggcggcggcgtcgtccaggcacggcgtgcagaggcttgacttcagaaacttctccgaggttacgtgctgggcgatattcggttgatgtttagtggccttgaccgagaataatgattaaaggttaacctgatgtgtcagaaatagccgtacttattaccaccctgccgccactatatcctaactacccctcctaggatgcaataaatgaaaagtttgctgctgcctttaacaccactta

SEQ ID NO: 93801 - DNA, 327 bp, Zea mays
  Clone ID: MRT4577_185534C.1
ccacacatgggatgggagctctccgccggcgtgccccggttccacggtctccggggctacgccgtgcccaggtccgcggtggcagcgctttcgtccgtgagggtgggcaggaagaggtcgtcgtctcagggcatacgctgcgactacatcggcttcgccaccaacctgatcatggtgacgacgactacgctgatgctgttcgcggggcggttcgggctggcgccgtcggcgaaccacaaggtgacggcggtgctgaagctggaggcacgcgactccggcctgcagacgggtgaccccgccgggattacccttgtcgacacgctggac

SEQ ID NO: 93802 - DNA, 255 bp, Zea mays
  Clone ID: MRT4577_185535C.1
gctgcccactgcgggcacctaaagcgcccggccaccccgaacatcgcggaaagcttgttgctggtgttgctcgtagtaccgtagtacggcagccgcgtgtggagcaaggagggagaggagaggggagcgagcggtggccgccatggcggagcaacaacgagtcgggcgtgtcagtgctggacaagatctcggacaagctccacggccgcggtggcagctcgtcctcgtcgtcgaactcggacgacgagcgctcgt

SEQ ID NO: 93803 - DNA, 363 bp, Zea mays
  Clone ID: MRT4577_185536C.1
caacatccctttatcgcccttgttgtgtcaacaatcgccagccctatcttaggtggggggataggtacaaaccatcatgtcacaacacctgcagcaactcttgctacctgtgatcaaccaagtatctatggcgaacctctctacctactcttcgtaacaacagtttctttcattcaaccaactgtctacactgaaccctgctgcttattagcatcaacaactattaccatttaaccagttagcttctgcctactctcaacaacaacaactttttccatttaaccaattgggcgcactgaattacacctgcttatttttcccaaccatatacttactaccatttattcagattgctacaataag

SEQ ID NO: 93804 - DNA, 251 bp, Zea mays
  Clone ID: MRT4577_185537C.1
ccggccgggtcgccgaagccgatcgagcacccgtgtgagcgaaagcgtgacaagtgcgtgcgtgtgagtgtgactttgtgttgctgttgcgtacaggcgagaggagaagtaacagggattcttcggtaaattcaaatgcataaacagtattatttcattcattggttttttttgcaagttacgtgactaatgactgggtgaatggatgagacgggttcctcaatcctaaaaaaaaaaaaaaaaaagcggcc

SEQ ID NO: 93805 - DNA, 245 bp, Zea mays
  Clone ID: MRT4577_185538C.1
tacagtacgaaagcaatgagacgggcacctcaaaacaaacaacccttatggccctccagaacccacaaacactgggttaacaaaatcgcatgcgtcgtgccgccgtttaatggtcctcttcgtttagtggacgattccacacgctctagagcaacgcccgcacctggccttacagtccgagtcagcccagggacgattagacatactgtggcgtcgagtacctcgcagaggctgtttatgaactt

SEQ ID NO: 93806 - DNA, 293 bp, Zea mays
  Clone ID: MRT4577_185539C.1
gttcgacccacccgtccgcggacgcgtgggaaaaaaaacaaccaaaaaaaaaatttaaaaattttaaaaagaaaaaaaaaaaaaagggaaaaggggaacataataatactaaaaaaaactacaactatggttcacgggcggtcccttttgaacataccggtttgttccgcatattcgcccgcatttttcactatggggcaccctaaattcttgtactggtccgacgttttccaccctgtggcggtgcaccccccgctttcccccataataaccacggggccgccccccccctt

SEQ ID NO: 93807 - DNA, 234 bp, Zea mays
  unsure (1)..(234): unsure at all n locations
  Clone ID: MRT4577_18553C.1
agaagagacagaacgccncgaggacacgagacgatgaacaacgacgccaccgccagcgccaagccgcgcgccggccgagaagcccccgccggcgggccggcacgggaacggaagccacggagcacggcgccggcgccgcagggnggaccgcgncaaccgcaacgcggaaggggagaggacccccgacaagagggcccgggggcccgacacgagcggccccggggccgacggccc

SEQ ID NO: 93808 - DNA, 573 bp, Zea mays
  Clone ID: MRT4577_185540C.1
aacatgcgtagccgagctagcgattaatagatatcgtgctcaacagcagcagggagagaaggcaggctttgcagttttagggcagccaagggtagagtttttctttctcaccgagggagactgggcaatcagctagattagcccttcatccgcctaggccctagagaagaagttgtcagcaaagcgagtccacagctaggtttagccctcagcaaagcagaataatcctagtttagataggtagagttaacaggcgagagatataatcatagagcctgttcttcgagtatcagtcggtattcccacgtaccatgagatattccagcacccaacagcgcatgcccaggacttcggtaataggcggcgcattagcgcccatgcgccattctgatcagttggcaacccagcatctgcagtagggaacagatgccctcatgtcagcattttgcataggtttagttgaaaaccaggactatgagcactccagttcgcctttcccagttccagctaatcggctagaatcttgattagcgagttgagatattttatgcgcagcgcagccaagacgcatta

SEQ ID NO: 93809 - DNA, 356 bp, Zea mays
  Clone ID: MRT4577_185541C.1
ccggccgggatctccatcctccaagctccttttcttcccacatcctctactcggcagaggtctcggcttctctcgagatcccgactcagcagagttcgagatgatcgagaatatgcatagccacagcatgcctacgcgagatcaggaggggcccactcacaccattcgcttccgcctctactgccgacgtactagacgacctcgccgcgccggaaccactccggcctaccatcctgtcgagagaccaagctccgcacgcacggaatcaaagacccttctcatgccatgatataggactccgcaccgtccatctatgccgatacaggatactcgtgtagcgcacaatctccgtcgtc

SEQ ID NO: 93810 - DNA, 608 bp, Zea mays
  Clone ID: MRT4577_185542C.1
ttgcatcggtcggcacgaggcgcgcctggagcggccggttcatgacggtgaagaagaacccgcggaactcggtgagatcgaccttgtcatcttccgcctcccaccactcgaactccgtcagcaggttggcaacgaaatatttcaagtgaagcatcgctgtcgcgagcccagggcatacgcgcctcccagcgccaaacggcatcatcttgagctcggtcgtgcatgtcaggtccgtcccgtcgccttccccggcgggcatgaaccgttccggcttgaacgacatcgggtccgaccacgctgccgggtcgcggccgatcttgcccacgaggaagttcacggtcgcgccaccgtccggcaggcgggacacgccgatcaccttcttggcatcgtctccgtctacgcgacgtatcacgaatggcacaggcgggtggcgacggaggctctctagcacgacggccctgaggtacggcatgcgcgccaggtcctcctcctcgatgactcgcttgccgcaggccatggcgttggcttcgagccgaagcttttgctgcaggtcggggcttttgacaaggttggccatggtccactccagcgccgcggccgtggactcc

SEQ ID NO: 93811 - DNA, 217 bp, Zea mays
  Clone ID: MRT4577_185543C.1
gatggtattgtgcaatcccatccaatccattagtttgtcttcaacaacatcctctatatcctttgtttacagattcttctaaaaaaatcacttcattctctctagcagcgtcctctatacttaaatacctatattagagacatattttgctctagattttgtatgtatgtatgtatgtatctgttataagtattctatacatattttagttatgttc

SEQ ID NO: 93812 - DNA, 182 bp, Zea mays
  Clone ID: MRT4577_185544C.1
acgaggactcctccgatctggctcaagcacaccctaccacgcgaagtggaagagatgagcaccaaggctgcaactaacggccagatcccgactcacattgatcttctgctccgcgaccagcacggcatcccggttgtccagagccgcactggtggcaggatcctaacgttcctctaggtccc

SEQ ID NO: 93813 - DNA, 453 bp, Zea mays
  unsure (1)..(453): unsure at all n locations
  Clone ID: MRT4577_185545C.1
acccacgcgtacatatatacactataatgttcattggnaaattttttgattatttcactggtaacattaacgggttttctgtaaattatcaggcccttcggcttaataatatttttttattattttcaatcatttataatacatcatttaaacttttcacaaccatactatatatatttattcataattcactaattataacacaacttaatttttccattattcatatcaaaactaaaattatccaaataaatgaatcaccaaaaactcttcatgttcatactatatttaatactaatacaatattatatactcttacattttacctcttactttcttactatatagcaaattcaatactataaaaaatccttaaagataaatcatttactttctattgatcaattctataaccttcagaaactaatcaatccttataatacactttcttat

SEQ ID NO: 93814 - DNA, 190 bp, Zea mays
  Clone ID: MRT4577_185546C.1
actaccatcagttctcttgttttatccataagctattttcagttgagctggtatagcacccgatagggcgctgccttttctagtatatataacaagcgaattgcaaaccgacagttgcctgtaaccaaaggaaaccgtggggactgtacctaagcccacctcttagcacagccactctccctctctctac

SEQ ID NO: 93815 - DNA, 253 bp, Zea mays
  Clone ID: MRT4577_185547C.1
ttggcttggaacctttggactgatttatgtgcttgattgaacttttagattaaacagccgttgttgctgttgctgtactatagtcattgcagctccaaggctttggattggacttacccttagatatttaaggataagacttactgtctgccttaattagatcctcctcctcctcgtcttactgcccgactctgccacttaccttagcataacttgacttagttaattgacgctaacgacggtgtcgaattcg

SEQ ID NO: 93816 - DNA, 1626 bp, Zea mays
  Clone ID: MRT4577_185548C.1
cattgggtacctcgaggaagctcgggaatcggcatccgatttcgattcgatttgccggcggtgcccgcggcggagaggatggcgagctccttctccttcccgctgatgaatccggcggacattgcggaggcgctgcacagctactgcatcgcgcccagccccggcctccgcgccgagcacatcgtcaccccgcagcccggcctcgtcgccgaggtcctcgccctcttcctcgccaacttcgtcggcgacgacgagcccgacgagcagctagagtttcaggcgctgcaggcgatcgacaacccggagcaccacatgcgcgccatagcgctctcgcgcctctaccggagggccaacgccttcctccactccatcctcttccgggacctcacgctccgcgaccttctccgcgccgacggccgccgtgtcgtctacatcctcagcgccataatcaacttcctccactacaggcaagataagctcagctttcttgagcccatcgtccaagagtacagcccccttcaggaacggcacacggagctcagggctaagatcgccgagcttcggaacgcaaaagaagaccatctacttaaggagcagatggaggcgcccgtggtccagcaactcgagaaggaggtcaatgccctcaaacagaggcttcgtgaatacaacaaagagcagctgtcgctgcgcgttgcaacaaaagccatagacgaaaagaaacaggagttactcggcaagatgaaccaagctgatttcgagttggtgaaagttatgcaagaaaaggaaaggctatcagccaaaattgttcattcccctgaaaagctcctgaggacccttgaggagaagaaagcagtccgtgatgagctaaggaactcagagaaggtggcaatgcaaaaagttcaagagaaaaccaatactcttgagacgtatactaaggtttctgagaaactagtgaagcatctctctaaaatttctgctgtacatgaaaaaggcactgttgctaaagcttctgagaaggatgttaaagcacacaaagagaagattggtgatcaaaatttggagataaaggcacttcgcaataaagctgctgagtggcaattgaaagtactcgagaacgagggcattctgaacgcaaaggagaaagaaagggatcaaagagttgcagagaacaatctgaagatgaacgcgttgaaatctgaagtcgaatcggagcacaagtgccatgcggagaaagaaataaaaataaaggaaaagcttgaaaaggttgctgaattatgctctcaagctgattcggttgctgaagctggaaataagaaaatacaggaaatctgtgggaagtataatcaagtttgcgaggctgcaaacatgtacatggatggcatcgatcgttcctttgaagagatcgatgaagctgcagtgagtttgaaagctataggccagagtggtgcttgatgcgtgaagtgaccatcgacgggcaatggatcgtggacagcatagtaaattgtgctagtgttaagctctgtatatatacctccaccgcgtctgtatatgccttcttcccactattttaatttaattagcactaattgccagtgaaaatggatatgtctaccgatcttgattaat

SEQ ID NO: 93817 - DNA, 520 bp, Zea mays
  Clone ID: MRT4577_185549C.1
gggcaaaacatgtgctacatttttaccctttcgaataataacgacaaactggtaaaaagggggaacataacagattaaccagacttatagccggggcgggggggcaaccggtaacgggcccaaaaccccggacaatgggggaaattaagctttcacagggggcttagctgggggtaagataaacgggaagcatgcgaggcgacccttaggcgaccccccccatcttggtttcaccagcggcgcccccaagccgggggctttcagcccctgccccaacagggccggccccctcggtgctcaaaccgggtttgggcctgcgggggttcccgttgcccaatgtgtttgggtcctcccggctgaatccgggggtctggggagcagcctccaaccgccgcctcccggggatccttggcgggcctggccttcttggccgcctcggcccgctgggggggctcctccctgaaaggggcccccggggggggcccccttggctttttgctccgcctgttgccccccctgc

SEQ ID NO: 93818 - DNA, 264 bp, Zea mays
  Clone ID: MRT4577_18554C.1
tccaatccagatcagcaaagcggcagtgcgtagagaggatcgttgaactgaacagcatgaagatggtcatcgttctcgtcgtgtgcctggctctgacagctgccaacgcctctgtaatgcaaatgccctgcccctgcgcgggtctgcagggctagtacggcgctggctcctgtctgacgactatgatgggcgccggccgactgaaaatctactcctagtaggcgtagcaggcgcaactcatgccgatggctgcagagccctact

SEQ ID NO: 93819 - DNA, 885 bp, Zea mays
  unsure (1)..(885): unsure at all n locations
  Clone ID: MRT4577_185550C.1
naaaaaagagctatgtttaggagtgaaattgaaaaactccgcgcaggcaagagcagccagccgcttcgggatcgggacgcggagaggggaaaggcgaagtcgtcgactcgtcgtccgggcagcttccctcctctcctctccgcccccgcttacctaggccggccccgcctacgccccctcccgccgccgcacgatgagcacttctcccgccgccgccgacgtttcgcctttgccgcctactgctgccgccgacgaggccgcgcgggcgacagagacggtggtggtcgatgagagggtcgcctcacacgtggacccgttcctcgtcgaggcgctcgacaaccctcgccaccgtctcatggccgatgtcctgatcaagagcaagtctacatcaacctcaccaatgacaaggtcccatggcgtcgtctagttctgcagtaccgatgcctctcctagggcaaagctttgctttaaagtttaaaccacaacgagaccaacttcacacttttgaaagcgcaagttccgcccatccttagacatgcgcaactacaaggctacctagatggcattactgtagtgcgcaatgagaagatcttcgtcaagcaacatggcaagaggatcgacgatgtcaacacataattcgatcgatcgcgctctagcagtaggtccttggctttctcatgacatccatgactcaagaagtcatgagttaggatgccatctaccaaacatccgatgaggtgtcggaactgtggaatactnacgtgtctcagtcaagagcccggaccatgaacacacgaatttgccttggcaactacaagaanagctaatatgacaatggcttgaatatgtttgccaagaatgaaaactcctttcagatgagatgtc

SEQ ID NO: 93820 - DNA, 623 bp, Zea mays
  Clone ID: MRT4577_185551C.1
ggttggggtttttttttttttttttttttttttttttttttttttttttttttttttttttttttttttttttttttttcgaaatgggttcatcctaaaccgggaaaaccggggtgggggggggcaatacaagcgtagcaccgcgcgggggagggggggagccccccaccctagatggccaaaggccagtagccgaaaccaccactagggtaccctcgggcccgagtagcacggggcaccgggaatccccaggcaatcaccggggaccacccgggaagggcaaaaacgccggggagacccagggggaaaaagtaccgagagggaaaggggaaaaaaacccccaaagggccgggaaaaagaaccggaaaacccgctgaacgcccaagaagggggagggaaaagggacctctcaccacatgcctggggaagaatgacccaacgacacccaggccctggatggggaaaaggaatggaacccaccccagccgccgcggaagcaagaccaaacacggcgaaggtgaacgcttagggacccgaacctggccgaaccattccagaacaggaaaaaaccggggtgaaacccagcagaggcccaaaccgaccgaagtcaaagaataaccgga

SEQ ID NO: 93821 - DNA, 458 bp, Zea mays
  unsure (1)..(458): unsure at all n locations
  Clone ID: MRT4577_185552C.1
gacggcanaccctatcgcctgacgcctatccctctcgtctcgcctcggtctctggcggcggcgccgccgttttcccccatcgtctcggcgactcctgagtcccgacctcgacgctacagcggctgtggtgatccgtcctccactcctccttcgtccattcctctggtgcaaggtttgtccggctctggcctctggttcttctgctttgaaaggtccgtctctgcctcttcgtctctggtctggtgtgccgcgccgtcttgttcggcagcctcagctacggcgccatcccggtcgaatctcatcgcagctgatccctctggatctcgtccgcggcaacgacgccatcccggccgaatctcgtcagcgtagctggtccctttggatctcgtctgcgcacggcacagctgctctgtctcatgatttaaagcgcatccggtccctctggatatttacttttg

SEQ ID NO: 93822 - DNA, 401 bp, Zea mays
  Clone ID: MRT4577_185553C.1
attcggctcgagacttgttttagaacgtttgtttccgccctggtttttgtttttcggcaacggggcatgcctaaactggtcagtggttggacctatcgtgatgtccaggtgaacgacatcttgctgaacgactacctggttgagaacgcgacgaagcacgcgatgtacctgccgcacaccgaggggcgttactccaagaagcggttccggacggcgcagtgcccaatcgacgagcgcctcataaacttcctcaggatgcacgggcgcaacaacggcaagaaggtcatggctgtccgcatcattaagcataccctggagatcattcacctgctcaccgatgccaacctcatccaggtcgtagtcgacgcgatcataaacagtggaccgcgagaggatgccac

SEQ ID NO: 93823 - DNA, 666 bp, Zea mays
  unsure (1)..(666): unsure at all n locations
  Clone ID: MRT4577_185554C.1
gccggccgggaaaattgctatagggttactttcttccagccgccgccgcgtccgcctcgccaagcgcaccagaacgccggaaaacatcgctactactctaactgcttttgtagaggggggatgagttcccctccccctccaatttcttcaaccgctgcgacgatgctacgcaggccatcggaaccacgtctcactgaaccaatacgtcgctgtgaacatgtacaaaacacgtgatgcacctgccgcacaccgtgggacattactccaaaaaccgtctacaaaaggttcagtgcctcaatcgtagagcgcctcacaaactatctcatgatgcacggacacaacaacggcaagaaggtcatggttgtccgcatcatcaagcataccctggagatcatccacctgctcaccgatgacaaccccatccaggtcgtcgtcgacgcgatcatcaacagtggaccccgtgaggatgccacccgtattggttccgctggtgttgtgaggaggcagggcgagnatatctcaccccggaggagggtgaccagatcatctacctcctcaccactgntgccagggatagtgctttccggaacatcaaaaccattgccgagtgccttgcagatgagctgatcaacgctgccaagagctcatccaacagttacgccatca

SEQ ID NO: 93824 - DNA, 711 bp, Zea mays
  unsure (1)..(711): unsure at all n locations
  Clone ID: MRT4577_185555C.1
cggacgcgtgggtggcggcagacggcgacgttcggaagtccggacactccggcgggggcactcgggaagagttatcttttctgcttaacggctccgccaaccctggaatcggttcagctggaccttcgatgatgtccaggtgaacgacatcttgctgaacgactacctcgctgtgnaacgcgacgaagcacgcgatgtacctgccgcacaccgaggggcgctactccaagaagcggctccgaaaggcgcaatgcccgatcgatgagcgccttacaaacttcctcatgatgcacgggcgcaacaacggcaagaaggtcatggctgtccgcatcatcaagcataccctggagatcattcacctgctcaccgatgccaaccccatccaggtcgatggcgacgcgatcatcaacagtggaccccgtgaggatgccacccgtattggttccgctggtgttgtgaggaggcatgccgtggatatctcacccctgaggagggtgaaccatgccatgtacctactcaccactggtgccagtgagagtgctttccggaacatcaaaaccattgccgagtgccttgcagatgagctgatcaacgctgccaagggctcatccaacagttacgccatcaagaagaaggacgagattgagcgtgttgccaaggccaaccgttgaacggagcttgtatcctggtgcactctgcgctggaaacttt

SEQ ID NO: 93825 - DNA, 477 bp, Zea mays
  unsure (1)..(477): unsure at all n locations
  Clone ID: MRT4577_185556C.1
gcgaacagacacacaaagcgaccacgaggcgcggcggagcggcacgagagcaccacatcccgcgaacagggccggcgcgcccgcgccgccggaggcgaggccggcggacgcagcaccaggcggcgcaccgccaagagggaaccgcagagcagaagggacgggcacgaccgccccaaggagccgggcccgagccccaagcagacgccgccggaccggaccggagagaacgccggcgacgacgggagggacaccgcgggccgcncgggcgacccggagacatacacgcgcaaccgggagcgggaggagaaccactcccggagaggcgacgcagggcgcggggcgctgcgagaccccggagaccccgggcaagaacggcgacaagaacggcgaggcggagagggccaaggccggggcggagaccggcacgcaaggcgggctggactacctgcgagaacccaacctggtgcacgcccagag

SEQ ID NO: 93826 - DNA, 796 bp, Zea mays
  Clone ID: MRT4577_185557C.1
tgcctggagccatgtaaattgccaccacccttatttcctcgtgccaagcacaaccctagccgtcgctagcctaccgctccctcccggcgctcgcccagtagcgcgccgacgcagtgccctcgcccctagccgttgcccccgccgtcgcgccgcggcagctgtgccgcgcacctcgcccttgcagtcaaagaaggcttctcctcctcctgctgacgttggtcgccggagaaggtcgtactgtccggcgccggcacggccacagacgacggggccaatgccaccgacgcgagcccaccggccggcgcgccgctcaacgtgcgggcaaggaagtggtggcggttcccggctacggaaggcctcgtcacgggcagcgagcggagtgtgcccaactcgtcggacccactccacaaccgctgaagcgcctgtgtcagccgcctgccattcatgctgcttcgacctctactgttagttatatcgtacctctggtcgcatgctttttggctgcacaatgtggcttggtattcagacttcagagaattgaattgcgtatacgagtaaatgtagctgattttggtctagctggtttgccgtttcgagcgtttgtaaacacaaattcgttggcagtttacaccatgccgtgtgtatataaattccctgaaaaaaaaaaaaaagctcagttcacaacagtttcaagattctatgatggtagtatactgtatgtctgtatgtgaatccctgttttttttcagtttctcttgtaatctaaatattttacagctggtgcaaaaaaaaaaaa

SEQ ID NO: 93827 - DNA, 390 bp, Zea mays
  Clone ID: MRT4577_185558C.1
agggggggggagccccgggggatctttttttttggattaatttacaggggggggggcaaaaattccaaaaacaccatacgggaaaatataaggacaggtccaccattgatttatatcagtttaaaggaaccgaaaaatccgataacacctttctgaggaaacatgttttgtatccctggggaaaaaaaaaaaaaagctggcttgaaaaaattttgacaaattgcaaaaactccgggggaagttcctgggccctggactaaagccaggcacccaaaaacaaaaccaggaaggcttttaaggggctgggggaagccccttgttggggagggtaaagtaaaaaacctgcctgcactggctcctaaggttaaccacgctgacactaaaactttt

SEQ ID NO: 93828 - DNA, 270 bp, Zea mays
  Clone ID: MRT4577_185559C.1
atgacgaaacacggagttccttgggatactaacacgtccaaatatcacacagacatacatacacggacatgccgaattgtgcggactataaaatggaaaacacacggatgtgtttgacttgcacaaacggggccccttgaaaaaggggaacccctaactatactctggggagccccacgagcgtacagcctttgatgagctgcgcacaaaacgaaaatgaaaaagactgtgctagggtgcaattcatggggtacaaagggacatagattc

SEQ ID NO: 93829 - DNA, 360 bp, Zea mays
  Clone ID: MRT4577_18555C.1
ggggacacacactggacaatttttttattttgaaactgcgggtttaaaaaggtttttttttttgtacaaccccgtaaaccaagcatttggggcctttttttcccccaagaatggctcactaatgaaaaatacctacaaaaccccaagattttttatgcagtccgcccatccaataattggggtcccgggcttgctacaaagggagttctaaagggggtttttacccaaaattgttgaacacttggggttctttggcgaccttgatgaaaaccccttttaagggcgtgtctaccactccccaagcatgtattgggaggcggcgctttttcttttctaccatttaaaaaacatgggcttttt

SEQ ID NO: 93830 - DNA, 349 bp, Zea mays
  Clone ID: MRT4577_185560C.1
cacccgtcccctacctctgtgttcaaacaatcctatcaagtgcaaatcgaacatttactttctatcaccatgattatggcttacttggaggggaagaaaccctaactcaaccatcttgccattcatattaatgtgccccacttcatctattatatcctacgcaatctttaacaacagcctgagcaccttctctttattctctacatgatattcgccaacttgctcatgctctatcctacacccattgcccaccaaaggaacaatatatcatccatgtcttgtaaactgcttctcaaactctacttgctcaccttgatccttaacacattcaacttgtacacgttcaacc

SEQ ID NO: 93831 - DNA, 1125 bp, Zea mays
  unsure (1)..(1125): unsure at all n locations
  Clone ID: MRT4577_185561C.1
attgggacctcgagccggccagggttgctctctccacctcctctctctctttctctttcggtatcgcagtcgtcgtcgccgctccccggccgggctcgctcgcgtgcgcgacccacccagccagcacaccagccagtcggcgcagcaaagcatggggaactgccaggcggcggaggtggcgacggtgctgctccagcacccgggcgggcgggtggagcggctctactggtccaccagcgccgccgaggtcatgcgcgccaacccgggccactacgtcgcgctcgtcacgctccgcgtcgccgaggaccggcaggacgccccgggcggccagcggcgcaccgtgcgcctcacgcgcgtcaagctgctcaagcccaaggagacgctgctcctcggtcacgtgtaccgcctcatcaccacccaggaggtgacgaaggcggtgcaggcgaggaagcaggacaagcagaggaaagcgcagcagcagctgctggagccgaggcagggccagggcgtggcgagtggcgccgcggccgaggaggaggacgacgacgacgaggcagccttggacgccagccttgatcagttggcgcggcaggacaacggcagccggagctccagtgcgcggcaccggcaatggcggccgtcgctgcagagcatcgacgaggccacgacctgagatgtcagctccatacagccgtagcgccgtaatcattgactaccggtgggcctgtactttcggtgatcacctggcctcggtcagttcatcgcaagggttgctatttggcctactgctacgattgcacactgtggagtggagtgagttgggagcttgacaccccgggatgagagggcactgcttcggatgcagcatgtagcctcggatccgtgtaaattttcaggtcttggtcaggagtttgttagtgagactgctttgcttcttcttcttcttcttattttctctcgatccatacggtttgcacatggaattatatcagtaacaaattagagtagcttactattagatttacagccagacatgtcatgtacttgctgctactctcttgcagatgggaatcgagcgtgtagccttttgagaggnaanaaaaatataaaaataaaattaaatat

SEQ ID NO: 93832 - DNA, 1149 bp, Zea mays
  Clone ID: MRT4577_185562C.1
ccggccgggaaggatgctatcataccagcactaaagcaccggatcccatcagaactccgaagttaagcgtgcttgggcgagagtagtactaggatgggtgacctcctgggaagtcctcgtgttgcattccgctggatagccgagggagaggagagagttgctcgtcctctccccactttctatcacgcaattcctatctcgcagtcgtcgccgctccccggccgggacccagcagagcagagcagagcaggcagtgtcggcgcagcatggggaactgccaggcggcggaggcggcgacggtgctgctccagcacccgggcgggcgggtggagcggctctactggtcaaccagcgccgccgaggtcatgcgcgccaacccaggccactacgtcgcgctcgtcacgctccgcgtcgccgaggagcggcaggacgcccccggcggcgagcggcgcaccgtgcgcctcacgcgcgtcaagctgctcaagcccaaggaggcgctgctcctcggccacgtctaccgcctcatcaccacccaggaggtggcgaggggcggtgcgggcgaggaaggaggagaagcagaggaaagcgcagcagctgcttgagtcgaggcagggtgtcgcgaggggcgcggccgagggggaggacgacgacgacgaggcagccctggacgccagccttgatcagttggcgcgtcaggacaacagcagccggagctccagtgcagggcaacggcagtggcggccgtcgctgcagagcatcgaagaggccacgacctgatgtcagctcagctcagtacactcataccacgcaaccgtaggggtagggccgtaatcactgaccgctggacctgtatcttctcggtgattcacctggcctcgattagttcatcgcagggggttgctattggcttactcctacatttgcacgctgtgagtttgacaccctgggacgagaggactacttcagatgcagtatgtagcctctggatccgtgtaaattttcaggcccttggtcaggagtttgttagtgagtttgcttttcctttcttttttttttctctcccctccatacagtttgcgcaccgaatcatgacaaattagagtactagcttatactattagatttacaaccagacatgtcatttacttc

SEQ ID NO: 93833 - DNA, 381 bp, Zea mays
  Clone ID: MRT4577_185563C.1
cgtaaacatgtaacccccgcttgtctctcatgatgaatgtaagccttttacagagtgggtatatactccaggataatcagggactgaagaactgaaatagacctgacacaggctaggcaggtgagctacctgcttcttttgttacatacagagaaatgcatgcatggcctgccccttcaattgtggagagatagagaagagagaacgaatcaatggacgcgatgcacgacagctgaggaggcattgccattattattataatagacctctccgtctttgctgatggggatatgatgggtgtgggacttgtccttattgaacctcatcttcccctttcagaggaccatctaccagatgtactcctgcatgagcacgttgccc

SEQ ID NO: 93834 - DNA, 157 bp, Zea mays
  unsure (1)..(157): unsure at all n locations
  Clone ID: MRT4577_185564C.1
gattcangcgctcagtctcgtacacatggtgcgcgcgctcagccagctcttgacctaccagcagctgagcacgctcgccctccctatcttagctcgcctctgacctccatggtcccgacagggatacccacgtcgagctccatcacacgcacgctca

SEQ ID NO: 93835 - DNA, 501 bp, Zea mays
  unsure (1)..(501): unsure at all n locations
  Clone ID: MRT4577_185565C.1
aagccgcgnngagggagcagagcagcagggaggcnncacaggnncncnccgcncccncccaggaacagaggacagggaacccaaancggcccggganccncccgnncccccggccgcggacaacngaaaagggggggcgggcncaggggcaaaacaaaggaaaaaaanncgacggaaaaagggaggcgnnacncncncccncnncacncncgggnccgaggcgccggaaaaccgcnaaaaacaccgggagccggcccncggacggancgacgaacgcgggggaaagggaaancnncgggagggaaaaaaagggaaaacnnnnnnggagccggacggagagaggcncnccncngggnnggagggggancagcnggcgagcggcagcagggaccgccagcccggcaccaaccnnccgcngggcccgcgggcacagcnngcnagccgnccccccgggcccnnccgccccccacggggncggcgngggcgacaccacgaccggga

SEQ ID NO: 93836 - DNA, 445 bp, Zea mays
  unsure (1)..(445): unsure at all n locations
  Clone ID: MRT4577_185566C.1
tttttttttttttttnnnnnntttttttttttttttttttgacctggattacaaggaaagcaatcatatgggtgcaagcttagaaaagggagggggggtacactttgaatgggtgaaaaggcttaattttctaatccattttcttgtctccacaccttagcatcattgtaatattgagacacatcaacaccatggttctgatggttgacaaaattgaaccaggggattgtggagaatttgaggtgcgcaaattgtgagttgtgatgggcgacggtttggatccaaggttggatggtagattcaccccatatgggccgaccggacctggcgacctgagcgaattcctcatgttgcctcttttgttcacgttcgttttcagtccaacctaaaaatcgatttgcccctcgttcgtaggccatcaagaaacctccgcaaaagcccaacc

SEQ ID NO: 93837 - DNA, 223 bp, Zea mays
  unsure (1)..(223): unsure at all n locations
  Clone ID: MRT4577_185567C.1
gttgcaagaggtggaggaagacggatcggagccggagtcgtcgccctcgcctgcacctccgcggtcgnggtcgtggtcacgacgatcggggcgcgcggggccggcctctgtggcgagtgcaccgccggcgtgtacgattcacgcccattaccgcgcgttcatgggtcgctacttcaggttctatctgtagatcatggtgcgcatgtttgcagtttgtcttggt

SEQ ID NO: 93838 - DNA, 667 bp, Zea mays
  Clone ID: MRT4577_185568C.1
tctcaatctatagacctctcacatttagccctgcaccatgggacgcgcaaggaatgcaccccatccacccctcatcctcgcccaaatccgcaactgtgtcaccgcaatccacggctcacccaaatctacgcaaggaagacacgcccaaatccgcagcctcggccatggaaggaatcacccctggaaggaatccgcgcaaaatccaagcctcaccatcggccccttccatcctcggcgccatccttccatggatggagatccttgccatcggcggtgcccacctagcgtgatgccctatattaaagtgatgtccgctaatctacctctccagatgggtgcagagccatcgagctcccctcctggtatgacctcccagagtgtcgcctccttacttccaggctagcaagaagattgctgatgcaaagctacctacagatttccaagcagtcctagaagaactcctaaaccctaaaccccaaacaaaatgaattcatatacatttttttaggcgctattgtttgtttaccttttttggtagcccttcatatcacataagaactcctggttgtcgggactgaaacctgtaagttgtatgtagcccacttgcaatttgaaccaaaatagtaagtgctaccaagtcgaaaaaaaaaaagaaaaaaggccccct

SEQ ID NO: 93839 - DNA, 628 bp, Zea mays
  Clone ID: MRT4577_185569C.1
cacgcccagcttagctcagctcaggtagctatagttagctagagagctggacgacccccgggcgacctcagatagatttttaatggaggcgccagcagcgccacctccgtcgtacgacggcggcggcggcggcggctacgtcctcgtcgacctgtccctgacgctgggcccgaccgcgacgccacaccctgcctcctcctcctctcctgagcctgaccacacaccagccgccgccgccgccggttccagttccgccggcgtgcggctgttcccgtgcctcttctgcaacaagaagttcctcaagtcgcaggcgctcggcggccaccagaacgcgcacaagaaggagaggagcgtggggtggaacgcccacctctacctcccgccgccggccgcggacacggcgtcggcgtcggtcgccggcggcgccgccgctcgtgccgcgacgacgcccgtcggcagcagccacgcgctgccgatgatccaggccgtctcgcactcgtgccaccaccatgagcaccaccaccgggacggcggcgcggcggcgccgttgttggagacggcgtggtggtcgtcgtgcgcggaggagaaacagcagaggcaccccgttgacctcaatctcaggctctag

SEQ ID NO: 93840 - DNA, 365 bp, Zea mays
  Clone ID: MRT4577_18556C.1
cggccggaccaacccttccgcccccctccttaaatccctcagccttttcttctttaggagaacctcccccccaaaagaaggatctttataaaaacaagagagaccccccccacccccttttccctctaaccccccccacctgacctaaatttcctaccacttcaagtcttcctccccccttccctccattaatatttatacccttctatactattaacatacccccaccacctcccccctaaatccaatttcttacctaaagtccctatccttgttatcccaaaaaacctcctccccccccaattaatttccctcaaaacccaagcctcttttaaaatccctccaatatctcctcttatcccaaa

SEQ ID NO: 93841 - DNA, 599 bp, Zea mays
  Clone ID: MRT4577_185570C.1
gaccgacaatttcctacgcaagcagcaagtgcacacgcaatacgacacctacctcggcgagcaaaagggaaaacgctgatcggagcaacgaagcccgcagccatgccgacggcgacggccacggccacggcagctcctcgccacgcggctgtcttcctgcccctgctgctgctcctgctcggcctccacgccacgtccgacgccgacgcacgctcgagagtcgccgtggacgccgagctcacgtccaccaagccgatccccgatgccgaataagcccagagtgaaaccgcccggccccggtgccgcgaggccgatcttcccaggcttcggtatccccgggatgggcaatttcggaatccccggtaagcgcgtcagttggtggagagacgactacaaagggcccgccgtcgaatacgccctacggcggcgaggtggatcccaccgtgacgcgctccgagaaggggccctgctacgggaagaaggtcccatgccccaagaactgcttctcctcgtacagcggcgccttcaaggaatacggagcactactgcggcggcggcagatgcaccgtcgactgcaaagtccagtgcacggactactg

SEQ ID NO: 93842 - DNA, 420 bp, Zea mays
  Clone ID: MRT4577_185571C.1
ctcgaacctctcaagaaaatctacctggctgtccttcgcccagcgcgagctgacatcactccaatcatcactggctgtggaagtcttgaatttcctgctcatgcttcctctggagactagatcggacagggaacttttcttgatgaatttggccgagaaggcattgaagcatctgagatcatgcctcggtgagcactgcgtaaacatggcatccttggcggaatagttggatgtggagtatgagtcagcattcttcagctccaggaccgaatttgatagattattcagtgatccatgagatctgtttgattgcaagcagtttggtttcgtctcacggtcatcgacctggtacattgaggattctggagcatatatcattgcattttcaggagatgtgcaccacgtcagattcttgttgtg

SEQ ID NO: 93843 - DNA, 300 bp, Zea mays
  Clone ID: MRT4577_185572C.1
ctgcgctttcgagaaaaaaaaaaaaagagaaggggaaaaaaaaaaaaaaaaaaaaaaaaaaaaaaaaaaggggaaaccaatataaagaaaaccaaagcttacaactccaaaattactacaatgttgttttcttttttataggtaactggttttcggtttttgtgcctccggttttttacgtcgtcggggtggggacccacaaattcttaccaccgtaacaccctttttcaaattatctgctttgggacccagggggaatacccctgtagaccccccccctaccccttcttcttaagtgtg

SEQ ID NO: 93844 - DNA, 326 bp, Zea mays
  unsure (1)..(326): unsure at all n locations
  Clone ID: MRT4577_185573C.1
gcagagcagaccagaggaagcgngcgngaaagccgcccanggcggccaccggggaggggacagccaccaggcgcgcgcgcgccggccccaccccacaccggcacgccacccccgccgcacccgcgcgccgcgcccagccggccagcggaccgccgacccggcaacagggagccgccgaggcacgcaaggccgagcgccagcagagccagagaccggccccaacaggaggaggaggaggaggaggaggacgcccgaaccggcgaggagaccggcgacaaagccgggcccccccgggacccccacgccgagggcgccaggacacccaa

SEQ ID NO: 93845 - DNA, 900 bp, Zea mays
  Clone ID: MRT4577_185574C.1
atggggtgttggtttggcaccaaatctttgccgtccctccgcattctcctcagtcccccttgtcttactcttgtctcgtctctccgtgtatgtatctctctgactcagagctcggtacccttcctcttccggtctccggccatagcgcccaccttgccacgacttggcgctgctatgtccttctcctcgtcgtcatcggccggctcgaagcccggcctcatcacactgtcctcctcctccgatgacgagcaggaggcgggcagcgggaagcagagggcgccatcggccggctcgaagcccggcctcatcacactgtcctcctcctccgatgacgagcagaaggcgggcagcgggaagcagagggcgccatcggctggctccaagcccgacgtcaacattgatcctgtcttcggttcctcctccgatgacaaaaaggaagcgagctgctggaagaggtcttcatcgttcggctcgaagagcggtcccgtcgtcttgacctcctccgacgacgacgacgatgctgagctccttgcgaagtgccggaagaggcgtccgccgcgcaacgtggcctggatcttctacgacgaggtcaagatcctcaccgcgctcgccgccgagcgccaggagtccgggcggctgccgggctctccgtccgctctcctggacgccatccgccgccgggtcgatctgaagcgggaaaaccccacagccgtcgacgtcgccaagaaggtgcacaacctcatggacaggttcaagaaggtgatcgcctccggtggcccgagcgctgaggtccgcgacagggagctctatgacctgtccagtgaagtctggccggagctcctcccgccggttgtgcacatttcgtcgccgtcctctccgtcggatggaacctgccactga

SEQ ID NO: 93846 - DNA, 307 bp, Zea mays
  unsure (1)..(307): unsure at all n locations
  Clone ID: MRT4577_185575C.1
ccctttttntgtccttctgtttgtgggagaatttcaactatggtnggatgatacatactgntacaaagtctaatttcgaagtccgaattgccaggtttttcaccacctctgggcccgggntgcncnttgncgntggccgngncggtggcctctnncttgcccnggcnnnccgggggggggggggggggccccccnnncccnnccccccncccncgccgggggggggcggccccctccttttttttttttttttttttttttttttttttttttttttttttcttttttttcttcttctttttttctc

SEQ ID NO: 93847 - DNA, 313 bp, Zea mays
  Clone ID: MRT4577_185576C.1
aaaaaaaaaaaaaaaaaaaaaaaatattaaaaaaaaaaaaaaaaaaaaaaaaaaaaaaaaaaaaaaaaaaaaaaaaaaaaaaaaaaaaaaaaaaaaaaaaaaaaaaaaaaaaaaaaaaaaaagaaaaaaaaaaaaaaaagagaaataaataaaaaaaaaaaaaaattaacaacaacggataaaaaaaattaataatgctaccgtagtgaccccttggctattcggaaatctccgtcattttcaaacatttcgacttgggaataaacgtcgtttaggccatttagcggttgggcaccaaaaactttttcacctg

SEQ ID NO: 93848 - DNA, 112 bp, Zea mays
  Clone ID: MRT4577_185577C.1
ttagctgaaatgcctcatgtgggaagtccacagttataccaggcaggggggaggaagcctaggcacagaatcaactatgtgtgtgcacacagatggtatttactactggtct

SEQ ID NO: 93849 - DNA, 344 bp, Zea mays
  Clone ID: MRT4577_185578C.1
attcggctcgagggcgggcggagctagtgcgtttgcgcacgcgctgtggaccggtcagagcaggttcaccgttgatacgaggtgcgagctgcccgggcggcagtccatcacgatctgcacagcgaggtctagacgcacagaggggctcttccaaccatcactattctcaatggaaactccctgatgacacgagactacatacaactaactcatgacacgggagagggatatcagaacggacctttacgggtatatggacctgagctgagggaccaccatatcacctgccatgagttccaggatgagcaaggccattactgccgtcgcggcgagctacatgaaga

SEQ ID NO: 93850 - DNA, 286 bp, Zea mays
  Clone ID: MRT4577_185579C.1
cccacgcgtccggagccaagaagaaaggagggtgctctgacggcggcagaacggcaatgtccgacaggaggcgcggcacctgcgccagcaccggcactcgcaaggatgaggtgacgacccgacagtacaccatcaaccttcacaagcgcctcaacggatgcacgtttaacaagaaagcgccgaatgccatcaatgagatcacgatgatcgcccaaacaacaatggataccaacgatgtccggatcgatgtgaagctcaacatgcacgtctggagcacacgaatccg

SEQ ID NO: 93851 - DNA, 411 bp, Zea mays
  Clone ID: MRT4577_18557C.1
gctcgaggccccccacccacgcacaggacacggggcacttttacggggagttcgggggcgaacccccaccgggcggcgagatcagccgcgccacacgcgccaagtacggccgccacatgaccatcatgtctaccgatggacacgtgtaccatgactggtccgcgctcaaggacgtgaacacagatgaccacacgttgatcgggttcacatgcacgaacgggaagcgggtgacggcaggagcataaagaccagggggactacgtggagcagaccaacaacaggagctagggcctggcgcacagcacttgcccaaagcggaccctggccaaacccatggaccttagggaccagttactaatgctgggcaccatatttaccagcaacccgagacaagggtgtacctgatgcaac

SEQ ID NO: 93852 - DNA, 506 bp, Zea mays
  Clone ID: MRT4577_185580C.1
ttctctgccccacgacaaacagaacactgtggtggactggtttcaacacctgagcgcgtcgagtcacatgacatcacttacaacacatttattttctaccaggatgagatctcccttgcttaagaaattttgttttaacagtagatgtagacacaatcacactaataagtagtaccatttaccttattacactaactcagcctcaatctctaatatatataagtccaatagtggcagatcacactaatagttacttatttgagaaatacaatataatattataatgcaacctcaaactgtaacatatatataaatctaaccactggtagatgagatttatcaatttatcataccaagatctgccttcaacttcagaagacttgcttctacctgtgccatgtttggtctttcgtccgcatcaagatttagacaactcactgcaatctcataaacacttgcaagaatctttaaaacatctggttttgcaatttctttatcaaatagct

SEQ ID NO: 93853 - DNA, 359 bp, Zea mays
  unsure (1)..(359): unsure at all n locations
  Clone ID: MRT4577_185581C.1
cagctcgctngcttagccgcctccagcactggactccaccaagttatccgcgctgctggcgctcgccatgctcgcgctctcctcgtcgccgctcgctctcgcgtgggagaaggcggagccggaatgcctctcgtgcgtgtccggctcgccgccctcggccggcgtccccctgcccccgttgggcgtaccgtctgtccctctgccccctgtccgtntcccgtcggtccccatccctccggtctcccagctgcccccggtcgtcggactgccgccggtgtcccttcctccctttccgctcgtcggtggtggcccgccgttgacgggcctccggtnggcgtgcccgccgcctccgtctcccc

SEQ ID NO: 93854 - DNA, 192 bp, Zea mays
  unsure (1)..(192): unsure at all n locations
  Clone ID: MRT4577_185582C.1
gtccctcgagctgccggnatccctagtcgctactccccgcggcgccatcccctcgatcgggctccgattccgatggacttcgcggagctggaggccgtggagggcctccggtggccgtggcactcgtggccgccgactgctcccgccgccgcgtccctcgtcgtgcccacggncgncctctgctcgccgctg

SEQ ID NO: 93855 - DNA, 683 bp, Zea mays
  Clone ID: MRT4577_185583C.1
taaccctttttttttttttttttttatcaagagttactttaacccacatatattttttgttacatcaaaagtataacgatttttttttttgttttgtttccataatcagagtagcgtggtaataatatatataatttttttcagatttttttgtgaacttacacacatcaaaagctcatgtgcactagggaggctgggaccatatcctgactcctgagttcctgacatccgtgagactgcggcgaggcagtgaaagcgaaacctccaggcgtgcgccttgaggtgattccggtaatggattcaccccctctgcttgcccagccggacgtcctgcaggagcatgagcccgacggagaagacggcggcgagcagcggagtgggcacctgctccacggcgtcgcttatcctcggcacctgcctggcggcgttcttggccgtgacggcgagcagcggcgcgcccaggatcgcgacggcggccttgttggcgagcaccagccgcaggtccttgcgcacccacatgaggatcatctcctggaactccgtgaacagtatccctttcttggcgcggtactcctccattttctcggcgatggtgttcatgcagggagggtccttgcgagggccgattaactgcctgttaattgaattgtaaaccatgagggtggcgacgtggagggagttga

SEQ ID NO: 93856 - DNA, 174 bp, Zea mays
  Clone ID: MRT4577_185584C.1
acaggccacatctttaggggcgaatgcaaccatgtgttttgtactaccgcgccacaatacgtaacttcaatagcttacagtagccgcaaacctacaccgtacacatagcacccgggcgttctaggaccaagtgcctccaagaccacaagcagcagaagaattttttaccaccac

SEQ ID NO: 93857 - DNA, 657 bp, Zea mays
  unsure (1)..(657): unsure at all n locations
  Clone ID: MRT4577_185585C.1
cggccgctcgaggcggcggncgggattttcattcgacgccctcgccacgcctcgccgtccactcgccttctcgccgccacttgctctgctcaccgcgagcgcgtgcgtgcgtgcgcgcccccgttccgacgcagctagccggtgactcgatcttagcgtgctacaatggcggcagctgctagtgccctgctcctcctgctctgctcagccttctgctcccttgcccaccgggcggccggcgtcgactacggctcgtggcagagcgcccacgccacgttctacggcggcggcgacgcgtctggcacgatgggcggcgcgtgcggctacgggaacatgtacagcacggggtacggcaccaacacggcggcgctgagcacggcgctgttcaacgacggcgccgcgtgcgggtcctgctacgagctgcgctgcgacaacaacgggcagtcgtgcctgccgggcaccatcaccgtcacggccaccaaacccccgnnnaatctggccacatggtggtgggagatgtttngtggggattgcaccttttgggaccgtgaacatcaatgcttgtttatggtttattacatgcagtatatatgaaatatatatgctcngtggttggatccttcggtttgtccggaaaaaaaaaaaaaaaaagcggcc

SEQ ID NO: 93858 - DNA, 1345 bp, Zea mays
  Clone ID: MRT4577_185586C.1
actcccccagtcccatagtctccagcctgagctgcaccgcgagggctcgccgctccgcatcaccgtcccagtgccacaccccgtctccagcctgccccagcgtaatggcgcttcgccaggccgtcctcgcggccgttgtcctcgccgcgctgctcccgctcgccctctctcgcgggctgggcttggtgcacgggcatgtgaggccgcacacgcacgggctggggctcggccaccaccacgcccagccgcacccgcacgggcacgcaccgctcgtaggtggcgcgtggtcctctgctcacgccaccttctacggcggcggcgacgcgtccggcaccatgggcggtgcgtgcgggtacggcaacctctacagccaggggtacggcaccaacacggcggcgctgagcacggcgctcttcaacaacgggctcagctgcggcgcctgcttcgaggtgcgctgcgacgcggcggggggagggagccactcgtgcctgccgggctccgtcgtggtgacggccaccaacttctgcccgcccaacaacgcgctcccctccgacgacggcggctggtgcaacccgccgcgcgcccacttcgacatgtcgcagcccgtgttccagcgcatcgcgctctacagggccggcattgttcccgtctcctaccgcagggttgcgtgcaacaagaagggcggcatacgtttcaccatcaacggccactcctacttcaacctggtactggtgaccaacgtgggaggcgccggcggcgccggcgacgtggccgtgatctgcgaccgggccccccgcacggggtcccagcccagcactcggaccaggggtcagaactggcagagcaactcgtacctggacaggcaggcgctctcgttccaggtcaccgccagcgacggccgcaccgtcaccagcaacggcgccgtccccgctggctggcagttcagccagaccttcgagggcggccagttctgaggatgaacagctagcgcgcgcgcggctagctattggataattaattacggtactgtcgatttggtttttttgccttgttttttttttgcgcgacgacgacgaagaggaggatgaagacgaagatgaagacgaggcctctctccgggtatattgaaggaaggagaaggcttttgcgcgcgctatgctgaggctgctaatctagcacccgcctagacgtttcccttttctctggtggactacggactggatcggaccaaagatcgatccagctcctagtactaataatatagttgtacttgagaaaatgaataattgtaatttatcgttttttgggaccaaaaaaaaaaaagggcggccgccaccgcggtgga

SEQ ID NO: 93859 - DNA, 1357 bp, Zea mays
  Clone ID: MRT4577_185587C.1
ttggggacctccgagccggccggggggcggacgcgtgcacgttcccaagccagccattggttggtagcaagccaagctaatcaagttagctttagatacccgctcccgctcttcttccctccgacgaaggcagctgacgacacagcaggctagcttcggagttcggagcactcagccatggccattgccggcgctctcctcctcctgctcggactcctcgcgcgggaggccgctgccggcgggtggcagagcgcgcacgccacgttctacggcggcggggacgcgtccggcacaatgggcggcgcttgcgggtacggcaacctgtacagcacggggtacggcacgagcacggcggcgctgagcacggcgctgttcaacgacggcgcggcgtgcgggtcctgctacgagctgcggtgcgacaacgacgggcggtggtgcctgccgggcaccatcaccgtcacggccaccaacttctgcccgcccaactacggcctccccagcgacgacggcggctggtgcaacccgccgcgcccgcacttcgacatggccgagccggccttcctccgcatcgcgcagtaccgcgccggcatcgtgcccgtcgcgttcaggagagtgccgtgcgtgaagaagggcggcatccggttcaccatcaacgggcactcctacttcaacctggtgctggtgaccaacgtggcgggcgccggcgacgtgcgctccgtctccatccggggctcccgcacggggtggcagcccatgtcccggaactggggccagaactggcagagcaactcgtacctggacaggcaggcgctctcgttccaggtcaccgccagcgacggccgcaccgtcaccagcaacggcgccgtccccgctggctggcagttcagccagaccttcgagggcggccagttctgaggatgaacagctagcgcgcgcgcggctagctattggataattaattacggtactgtcgatttggtttttttgccttgttttttttttgcgcgacgacgacgaagaggaggatgaagacgaagatgaagacgaggcctctctccgggtatattgaaggaaggagaaggcttttgcgcgcgctatgctgaggctgctaatctagcacccgcctagacgtttcccttttctctggtggattacggactggatcggaccaaagatcgatccagctcctagtactaataatatagttgtacttgagaaaatgaataattgtaatttattgtttttttgggacctttgatattattgtactcgcgcgcgccggccttgcgtcgaaattgaagttcgcaataaggccggccgccggcttttattcagcgtgccctctcgttccttcagt

SEQ ID NO: 93860 - DNA, 2481 bp, Zea mays
  Clone ID: MRT4577_185588C.1
cggacgcgtgggcggacgcgtgggcccggcctgtgccgccgtcgccaccgctcgctcgcccgcctgcctgcctgggcccgcagcaccgactctgacagcgcccgtcctgcttcctgtaccggcaggcgagggagtggactcagggagtgtgatggcggcaatgccggcgccgcttctgcctctgcttctgctggtggtggccgcggcgatgacgctctcccccgccaccgcccgcattcccggcgtgtatgtcggcggcggcggcggcggctggcagagcgcgcacgccacgttctacggcggcagcgacgcttcgggcaccatgggcggcgcctgcgggtacggcaacctgtacagccaggggtacggcgtgaacaacgcggcgctgagcacggcgctgttcgacgaggggctccgctgcggcgcgtgcttcgagatcaggtgcgaggagcagcccgggtggcggtggtgccggccagggaggccctccatcctggtcacggccaccaacttctgccctcccaactacgcgctccctttcgacgacggcgggtggtgcaacccggcacgagcttgcgcttatctgtgctcgcccatgttgcgtgcaacaagaaggtacccatacgtttcaccatcaacggccactcctacttcaacctggtactggtgaccaacgtgggaggcgccggcgacgtgcacgcggttgccgtgaaggccgagcgctcccccgggtggcaggccctgtcgcgcaactggggccagaactggcagagcaacacgctcctggacgggcaggccctgtccttccgcgtcaccaccagcgacggccgctccgtgctctccaacaacgccgccccccgcggctggtctttcggccagactttcagcggtgcccagttcaactgaacacacccccaccgttcatgcagcgtcgacgcagtggcactagtactagttgttccgtccaccccgattggagcctgccgagaggcgccatggttttatgaatggtctgcacctcgcatttgctcctgggaattaccagtagtttaggcctagtaataaggcgtggtaacaacgcagagtacgcgggtggtgttttagtgttccttggttgtatccggcttggaaattggaggtggtggtaaggctggtctgcagataaacggaggcaggctgccttgtatcacccgccaattatgcgtttagggcctcatggtgatggctccttcgagatgagatgttttctgagttattcaagtgtgttagttgtaatgaatcttatcaagttactatttcctaatatattatccttcggaaaaaaaaaaaaaaaaaaaaaaaaaaaaaaaagtaatctgtgttgttaccactgctaaactaccgtcccaacactaacagaaagctacacgcagatcagggctcttgtgttctttccccatggttaaaggaagaaccccgaagtccgcccacgcgtccgcccacgcgtccgcccacgcgtccgtgctacgagctgcgctgcgacaacaacgggcagtcgtgcctgccgggcaccatcaccgtcacggccaccaacttctgcccgcccaactacggcctccccagcgacgacggcggctggtgcaacccgccgcgcccgcacttcgacatggcccagccggccttcctccagatcgcgcagtaccgcgccggcatcgtgcccgtcgcctacaggagggtgccgtgcgtgaagaagggcgggatcaggttcaccatcaacggccactcccacttcaacctggtgctggtgaccaacgtggccggcgccggggacgtgcagtccgtgtccatcaagggctccagcaccgggtggcagcccatgtcccgcaactggggccagaactggcagagcaactcgctcctcgacggccagagcctgtccttccaggtcaccgccagcgacggccgcaccgtcaccagcaacggcgtcgctccggcgggctggcagttcggccagaccttcgagggcgcccagttctagctacgactactccatcgacgagtgtgactgtcagagcaagagagaaggagaaaccttcttcgctgtagtaaagaagaggctcccgccattccgaggctgcttattattagcacccgcttaggcatttccttctcttattattaccataggattgagctgtttattttctgcaccagtgattgtagcaatgggttaagcaaaacaaaaacctgcaaggctatttattgtagggctgcaggggagtggtgtcgtgcaacttattgtgttgttacgctgtactagtagcaacccccgaatctggccacatggtggtgggagatgtttgtggggattgcaccttttgggaccgtgaacatcaatgcttgtttatggtctattacatgcagtatatatgatatatatatatatgctcgtggtttgatcctcggtttgcaaaaaaaaaaaaaaaaaaggcccctagggcc

SEQ ID NO: 93861 - DNA, 550 bp, Zea mays
  Clone ID: MRT4577_185589C.1
gtggacttttttttttttttttttacacatatgatgaatcatggcacaggatcgaatgtcacatctttactacataacaggagttctataaaaaataaataaataattacattataaggagacaacggtccagcaacccaaagttgactgggagacgacggcctaaatctctctcacgaactcatcgcagcatccttcatgcgcctcatcctgcggtacctgttcttgaccgagttacgccgcacaagttctaccgaagcgcgccgccgacttcctgggctcgagatgcgactccagtctttcaccacttcgagcacgccctggtctgcgacccaaccggacgacggcgcccgcgcagtcctcaacgcccggcgaggaggcccagaacgctccacgccgcaagcacaggaaagtccctggacgtccagggtgcggcaccgttgaacaccctcccggcaacgctcccgttctctctctgctcttcctttcttctctctcgactgcgcgaatacatcgtcagcgcatactcgttggttttttttctcttctg

SEQ ID NO: 93862 - DNA, 1498 bp, Zea mays
  Clone ID: MRT4577_18558C.1
gcagaagcagttataataacttaccttatattaaagtaagaaagagttggattattacagaccagaaccaaatataagagtgctgagtattattattacataacatgggaggcaaaaactcctcccaaataagcagtaaaagtttttcttaacggaggacctttcctcccgtagctttagtcttgattctcttcttttggtaccaccttggaacagaagcaacaaaagtttgctgcttcttcacctaaaacaacatgggacaaagccctgagtacgaagagtactttcgcaagacttacccatcaaagtaaaagactctcaaggagatgctggcgtttgggaatcaaggtatgccttatcaagaatcaaagactctgtttgcagaaatgcttactaagagtagatccttaaaaatccagttttatttgtcaggttaggtaaagttacctgtatctagagttctttctaccctagttcaatcacttgacctgcactagccgtctttttatcaaaaaccctttaagttcactggaacgctacgtgtaagtcagtgaccgagtctccataaccgcggaggtacggcgatccgaatcgattatactcagctgaggatctccaatcacatgacatatgtagcacttaacccttgcatatgtcaactcgccaccggggttcttaagaccagatcaggttcatgccaaccgagagcacaaatacaccaccgtccaacctcttgccatagagggtacacgctactctcgccatctctccactcccattgcgtgttatcttattctggtattagtctgcccaaggcaaagcttacccatgatgaggcatgtgaccagttaaagggtcctcggtcagcaggcctacatcgacaaggtccttaatcgactcatatggagacactacattgagaccctcttctcgtgcaagtcacccgcccggtctcagctttatcatttcaagcccaaggtttggtacctggcaggggtacatcttttccgatgttgaacccatcacggccatgatggatccaccatcaagttttatttttgaaaatcatcccttcccacttcaagcatcatcttttgttgaaaacaaaatattttgtttttctagagaaagactaagcatcagaaaaaccttttcataaaacaagtgatcaaggaaaggtaatcaatcttccaaggaaggaaatgcatcaattgtttaacacataactcctattacctaatgcatcaagcaagtgataaagattttaaaatagcaaggaggtggcaaatgcaccggggcttgcctggaagaacactacgttagtgtttgttaggtgacgtccacttggcgaccatcttttgtcttcgcatttgttccgattatccatatttaggttcatcatttgcatcaccttgagattaatctagctcttgtccttctcaccacgtgatcaactagcgtacctcatgagatgcacgatgcacatcgatgagcacga

SEQ ID NO: 93863 - DNA, 414 bp, Zea mays
  unsure (1)..(414): unsure at all n locations
  Clone ID: MRT4577_185590C.1
aggatcttaagaccgggacaaacttgcaaagtaggcacttttcttccattaggacaacacatacaacaatttctcgccaggatgccaacgaatcatatgtccccattccccgctgttggaaccatggatatcctaaagccgccgctgaacacagctctaaacacgcacatctgtgggcaggagtacacaaaaacacatgggtgggtctacagaaccgcggcgatcgtaaacaccgcccctgactagccacaaatagggatcgacagacagactactggttggccgtcaaggagacatcacaggaagacccccgttcttcggactggcatgtctcggcacgagcacagcaactnaagacctggccttgaacgggatggctctgatgatcaccttgtggccgattgcattcagggc

SEQ ID NO: 93864 - DNA, 215 bp, Zea mays
  Clone ID: MRT4577_185591C.1
ggaccccgaactttaaattaattaactggggtccaaactccaaacaggtcagccaaatttttgacagcagtgcaaaggtcaaccaaacaagaaagaaaaaacccttttgggaggcagagccacgatttggcaatcaggtcctccagctgcgcgctcattcggggttgaaccctggcgatgtacatgtcgggggataaccgtcgccaccacctttt

SEQ ID NO: 93865 - DNA, 1489 bp, Zea mays
  Clone ID: MRT4577_185592C.1
cggacgcgtgggcggacgcgtgggcgttcccaagccagccattggttggtagcaagccaagctaatcaagttagctttagatacccgctcccgctcttcttccctccgacgaaggcagctgacgacacagcaggctagcttcggagttcggagcactcagccatcacacatgaagaaactgatccttcttctttcttctttcttcttcttctctgcgcgtgcacggacgacaggcggcgcctgcgggtccggcaacctgtacagcacggggtacggcacgagcacggcggcgctgagcacggcgctgttcaacgacggcgcggcgtgcgggtcctgctacgagctgcggtgcgacaacgacgggcggtggtgcctgccgggcaccatcaccgtcacggccaccaacttctgcccgcccaactacggcctccccagcgacgacggcggctggtgcaacccgccgcgcccgcacttcgacatggccgagccggccttcctccgcatcgcgcagtaccgcgccggcatcgtgcccgtcgcgttcaggagagtgccgtgcgtgaagaagggcggcatccggttcaccatcaacgggcactcctacttcaacctggtgctggtgaccaacgtggcgggcgccggcgacgtgcgctccgtctccatccggggctcccgcacggggtggcagcccatgtcccggaactggggccagaactggcagagcaactcgtacctggacaggcaggcgctctcgttccaggtcaccgccagcgacggccgcaccgtcaccagcaacggcgccgtccccgctggctggcagttcggccagaccttcgagggcggccagttctgaggatgaacagctagcgcgcgcgcggctagctattggataattagttacggtactgtcgatttgtttgtttttttttttttttttgcgcgtgatgatcgagtgcatgcaagagaaagagacgacgaggagaacgacgaagacgaagacgaagcctctctccgggtatattgaaggaaggagaaggctttgcgcgcgctatgctgaggctgctaatctagcacccgcctagacgtttcccttttctcttctctggtggattacggactggatcggaccaaagatcgatccagctcctagtactaataatatagttgtacttgagaaaaatgaaataattgtaatttattgtttttttggggacctttgatattattgtactcgcgcgcgccggccttgcgtggaaattgaagttcgcaataaggccggccgccggcttttattcagaataccaactcgtcactacagtaagactcaaaaggggtgccatctcagacctctccggcggccaggccaagaagctcttcctctgggtctacgtcactgggatggtcttgtaccccgagcagggaaccgtcgagttccaggccgagttcatctcggagtcgctttcgtcctctatgattgacgatgtgcccacct

SEQ ID NO: 93866 - DNA, 1587 bp, Zea mays
  Clone ID: MRT4577_185593C.1
gaaagatgggttggttagggcaagaatatcctggtgtaagaaagtttatggtgagaaaggactctttgttgggtggtaatgcatctgaagatcgagtatgacttctctccttccttgatgaggttgattttgtccttttctggtcttggtctcattgattcatggttagtgtatatcatcggttgggaatatggttaagataaatatggatgagatagactacatgatgtaggtccaaagtttgtttgatgttaggtggggataggcagattatgcaatccatcatgactctattggttgggttagatcatgatcatggtgggataagtcaagtggttttggtcacgcaaatataacttagatctggtctcattattttgtattagatcctagttgttactttaggatgatataagtaaactggttaggataagatgattaccaccaagataagataaatcttactaagataaggatctattaagttagatattttaatggaagatattttaggttgtttagttagttttataagcattatgtatatgtagatgtaattatggacatcactccacaacccatcacactcaatcaaagaatcaaatcagaaaaagtttcataagaacaagcattcaagtacctatatatacctacaaaaatagttttgtttttgttcctatgagtaggtctcctattcttaaaggtcactttaggcacaggatttcaaagtgtgaaatccacatttgtctttagaaaagaaaagataagaataatcagagtagagcggaaatagatgagaaaagattaagataagtttagaaaagaatcagagtagcaaaggtaagtagacaatggttgtccagttctatctaggtttcgtcctacagtcaacattcctctgataccacttctgtcacacccgggttttaggggtccaaagcccgggcgcgaacataatcaccaggtgtgctgggaccaagtctcacacatatgatgaatcatggcacaggatcgaatgtcacatctttactacataacaggagttctatacaaaataaataaataattacattataaggagacaacggtccagcaacccaaagttgactgggagacgacggcctagatctctctcacgaactcatcgcagcatccttcatgcgcctcatcctgcggtacctgttcttgacctggcacttgagattccaggtgccagcttgctttttagatgacacgtgtcctcgcgcgagttacgccgcacaagttctaccgaagcgcgccgccgacttcctgggctcgagatgcgactccagtctttcaccacttcgagcacgccctggtctgcgacccaaccggacgacggcgcccgcgcagtcctcaacgcccggcgaggaggcccagaacgctccacgccgcaagcacaggaaagtccctggacgtccagggtgcggcaccgttgaacaccctcccggcaacgctcccgttctctctctgctcttcctttcttctctctcgactgcgcgaatacatcgtcagcgcatactcgttggttttttttctcttctggttaacagagaccccggccgg

SEQ ID NO: 93867 - DNA, 293 bp, Zea mays
  Clone ID: MRT4577_185594C.1
accggagccgggacttccgggtgccgacccacgcgtacgcctagctggcctgctgctgcatttacagcggacaggacaagtgatttcggcagcacctctgcaggttttccagccttacctataagcaaccctattagctcaagttcatacccacccaatacatttacattggggcaaacaggtacttcatgccacactctcacatcaggcgcgcacccagcttcaactttcccatctgaaccatcactttagtgatctatctcaacctacactagtttgaactcactgtccac

SEQ ID NO: 93868 - DNA, 1381 bp, Zea mays
  Clone ID: MRT4577_185595C.1
cgccggcgacgtgcgctccgtctccatccggggctctcgcgttcccaagccgaccatagcccgctagggagatcgggagcctcgaggccggccgggacagccaagctagcaactctctcgagtcgattcctaagcagctagccagtgactcgatcttagcgtgctacaatggcggcagctgctagtgccctgctcctcctgctctgctcagccttctgctcccttgcccaccgggcggccggcgtcgactacggctcgtggcagagcgcccacgccacgttctacggcggcggcgacgcgtctggcacgatgggcggcgcgtgcggctacgggaacatgtacagcacggggtacggcaccaacacggcggcgctgagcacggcgctgttcaacgacggcgccgcgtgcgggtcctgctacgagctgcgctgcgacaacaacgggcagtcgtgcctgccgggcaccatcaccgtcacggccaccaacttctgcccgcccaactacggcctccccagcgacgacggcggctggtgcaacccgccgcgcccgcacttcgacatggcccagccggccttcctccagatcgcgcagtaccgcgccggcatcgtgcccgtcgcctacaggagggtgccgtgcgtgaagaagggcgggatcaggttcaccatcaacggccactcctacttcaacctggtgctggtgaccaacgtggccggcgccggggacgtgcagtccgtgtccatcaagggctccagcaccgggtggcagcccatgtcccgcaactggggccagaactggcagagcaactcgctcctcgacggccagagcctgtccttccaggtcaccgccagcgacggccgcaccgtcaccagcaacggcgtcgctccggcgggctggcagttcggccagaccttcgagggcgcccagttctagctactactactccatcgacgagtgtgactgtgagcaagagagaaggagaaaccttcttcgctgtagtaaagaagaggctcccgccattccgaggctgcttattattagcacccgcttaggcatttccttctcttattattaccataggattgagctgtttattttctgcaccagtgattgtagcaatgggttaagcaaaacaaaaacctgcaaggctgattattgtagggctgcaggggagtggtgtcgtgcaacttattgtgttgttacgctgtactagcagcaacccccgaatctggccacatggtggtgggagatgtttgtggggattgcaccttttgggaccgtgaacatcaatgcttgtttatggtctattattacatgcagtatatatgatatatatatatgctcgtggtttgatcctcggtttgtaaaaaaaaggcccctaaaa

SEQ ID NO: 93869 - DNA, 593 bp, Zea mays
  Clone ID: MRT4577_185596C.1
gtggacttttttttttttttttttggatagaatgtcacatctttaatatataataagagttctgtacaaaataaataattacattataaggagacaacggtccagcaacccaaagttgactgggagacgacgacctagatctctcacgaactcatcgcagcatcctccttgccccttatcctgtggtacctgttcttgacctggcacttgagattccaggtaccagcttgctttttagatgacacgtgtcctcgcgcgagttacgccgcacaagttctaccgaagcgcgccgccgacttcctgggctcgagacgcgactccagtcgcccaccacttcgagcatgccctggtctgcgacccaaccggacgacggcgcccgcgcagtcctcaacgcccggcgaggaggcccagaacgctccacgccgcaagcacaggaatgtccctggacgtccagggtgcggcaccgttgaacaccctcccggcaacgctcccgttctctctctgctcttcctttcttctctctcgactgcgcgaatacatcgtcagcgtatactcattggttttttttctctttctggttaaccccgggccgg

SEQ ID NO: 93870 - DNA, 1389 bp, Zea mays
  unsure (1)..(1389): unsure at all n locations
  Clone ID: MRT4577_185597C.1
ccgtccgggggaagaagaaggcggctgcttggtctcactgccaaccacacgttcccaagccagccattggttggtagcaagccaagcttagctttagatacccgctcccgcacttcttccctccgaaggcagctgagatacagcaggctagcttcggagttcgggggcactcagcgatggccattgccggcgctctcctcctcctgctcggactcctcgcgcgggaggccgctgccggcgggtggcagagcgcgcacgccacgttctacggcggcggggacgcgtccggcacaatgggcggcgcttgcgggtacggcaacctgtacagcacggggtacggcacgagcacggcggcgctgagcacggcgctgttcaacgacggcgcggcgtgcgggtcctgctacgagctgcggtgcgacaacgacgggcggtggtgcctgccgggcaccatcaccgtcacggccaccaacttctgcccgcccaactacggcctccccagcgacgacggcggctggtgcaacccgccgcgcccgcacttcgacatggccgagccggccttcctccgcatcgcgcagtaccgcgccggcatcgtgcccgtcgcgttcaggagagtgccgtgcgtgaagaagggcggcatccggttcaccatcaacgggcactcctacttcaacctggtgctggtgaccaacgtggcgggcgccggcgacgtgcgctccgtctccatccggggctcccgcacggggtggcagcccatgtcccggaactggggccagaactggcagagcaactcgtacctggacaggcaggcgctctcgttccaggtcaccgccagcgacggccgcaccgtcaccagcaacggcgccgtccccgtcgtctggcagttcggccagaccttcgagggcggccagttctgaggatgaacagctagcgcgcgcgcggctagctattggataattagttacggtnnnnnnnnnnggccgcttttttttttttttttttacgcgtgatgatcgagtgcatgcaagagaaagagacgacgaggagaacgacgaagacgaagacgaagcctctctccgggtatattgaaggaaggagaaggctttgcgcgcgctatgctgaggctgctaatctagcacccgcctagacgtttcccttttctctggtggattacggagtcgatcgaagatcctatccagctcctagtactaataatatagttgtacttgagaaaaatgaataattgcaatttattgcttttttgggacctttgatattattgtactcgcgcgcgccggccttgcgtcgaaattgaagttcgcaataaggccggccgccggcttttattcaaaaaaaaaaaaaaaaaaaaaaaaaaaaaaaaaaccccaccac

SEQ ID NO: 93871 - DNA, 463 bp, Zea mays
  Clone ID: MRT4577_185598C.1
cgttgctgtcgaggatcgaatgtcacatctttactatataataggagttctatataaaataaataattacattataaggagacaacggtccagcaacccaaagttgactgggagacgacggcctagaccactcacgaactcatcacagcatcctccatgcgcctcatcctacggtacctgttcttgacctgggacttgagattccaagtaccaacttgctcttcaggtgacacgtgtcctcaccgcgtttgaaggcggagccgaccaacgacggaacgcggtgcacagcgaggcacaggtccaagcgattcgacaccacttcgagcacgacctggtctgcgacccagccggacgacggcgcccgcgcagtcctcaacgcccggcgaggaggcccagtccgctccacgccgcatgcacagggaagtccctagacgtccagtgcgcgacagcaacggaattcact

SEQ ID NO: 93872 - DNA, 189 bp, Zea mays
  Clone ID: MRT4577_185599C.1
agggcaatctccccaagacctcaactaaacctttatcaacgcagccggagccaccatgggtgcgaagaatgccggaagcgacgggaaggcccgctcggcgagctcctcgtcctcttacgggtaccgccgtcggccgccgagcaccagtacggcacctttggtcccccatccggagcctccggggagttt

SEQ ID NO: 93873 - DNA, 495 bp, Zea mays
  Clone ID: MRT4577_18559C.1
gccaaacgagcaaatagccaccgaaactagaatacacaattcatggtgtccagatacgatgccaatgcttgaaattaagagtgtcagtagtgcggtgcaaaattgtctaccatagtaggatttctgaattcaagaccacaaaaatttagccacgacacctaaagtgtccatctcacatttcaaccaattgctgtcgcaggatcctacatggcattactcatcgtcgtcctcaccatcatcgccaccgcctgaggccttcttctggttcttccgcttcacccttccagctggaccgccacccagagggctggtgagggagaagtcaatgtgcttctctgattcgaccctgaccatgaacgaggggatgttgacgagctgccttcccaccctgatgtggcgctgcctgatcaggacacgagcatggtggatggacttggccatgccattcttgaagacaatggtctgggagaagtcaatgtgcttctctgattcgac

SEQ ID NO: 93874 - DNA, 1558 bp, Zea mays
  unsure (1)..(1558): unsure at all n locations
  Clone ID: MRT4577_1855C.1
gtcttccanagnactctagcctccacgagcggcgcccgaccctctgattccactggcggctcccctcggcatccactggtggtgcccgggtttctagtagtaggaagtggctagatggaatacaactggaatgattctatatatgggtgacagtcttagttgaggaacacacttgtacttccagtgctagaaggaagaccacgagtcctactagctcttgggtagcatcaaaggctggttttttctctgcactgggagatggacagattgatatccagtcacctcccaagactacaactcctaagaagatgctactggggtgcatccctcgagggtggcaggggagcttcaagccaatctgagaaggggaaaaaaggatgatcagaggcaaaagaagtgcaaaagatgtggtgaattaggtcacagagtaactagctacaagtgccctttaaatggaacatagaaaaagtaaccgatgaaatgtctaatttgaacatgtgcacttttatatttgactctaattgtggtgtccaacatgtaggaagagaaagcctcgcatgaataaaacaaagtatggggagaatgccaaaatccccaaaagccgacttgaagaaggtgtccaaagtcaaggtgttatccaaggtgaagttgttgtccaacttgaagaaattgtccaagatcatagcgttgtccaaggtgaagttgttgtccaaggtgaagaggctgtctaagtcgaagtttcgcttctggtgcaaagcccagctagaccaacaagggagtatattttataggacaacccaatcagggtgactaggagtcggcttgctatgctactgggagatggacagattgataatcagtcacctctcaaaaatacaactccgaagaagatgctagtgaagaagctcacgccaaggaagctgaagagaatgtgaaaatattctaataagctactgttttatgtgttatccaagattttagtaagatagtattagaagtgaaccttgttatgctgtcagatgaactatatttattatgacgtgtgagtagtgctgtcagcttttgggagtagtgtgctgtcagatgaactactactttgaccaagaactactacttgatggagatcgtagttattttgatggatagcgtagtgtgctgtcagatgtactgttatctgaaagaaatgttgaatctgttagtgtgcacaggttaccagcttgtgttattgtgcacaggaggacagcacaaacacacataacagacatgtagtaaagtcatatttgcatgagtgtacatgcctcgagtggcagcacaccggcaaaccatgcccacatgcattggccctgattacagcacaagagagtgtggatgtggaattggaggattttgtgcatgagtactactcagtacagaggttcaaaaatgcatataagagaataattgagccactgccagataggtctcaatggccacatgtcgatctgccttatatggttggtgcaccacttgacaagagaggtagaggaaggtacaaaaaactaagaattaagagctgttt

SEQ ID NO: 93875 - DNA, 152 bp, Zea mays
  unsure (1)..(152): unsure at all n locations
  Clone ID: MRT4577_185600C.1
ataagggaacaaagctgggctcggggccgacccattggtgaatcaggtaaagtaactatgtagctacatgaagcatccaactttgatcgcttaagagtgtttnttgtgggagaaaaggtgggtaagagtatgggagggggagaaggaggggg

SEQ ID NO: 93876 - DNA, 814 bp, Zea mays
  Clone ID: MRT4577_185601C.1
ccgggggagcgtcagcaacatccgtcgaccccaattccgaccactgctctcgcgccgtcgcgcgacagcattgtgcgcccgagccgggcttgtctgatggcgtctggaggcgccgcccgcggtcgccttgctgaggagcgcaaggcgtggcgcaagagccatcccctcgtgggcgccggctttgtggccaagccggcgatgctgccggatggttctgtcaacctcatgctctggaactgcgtcgtccccggcaaggaaggcaagcatgattgaatcaactgaaaatctgaaagactgttgctgcggagcaggacgagccattattaaagactgactgattgggaaggtggatatttcccagtcactctccatttcactgaaaattacccaagtatcccaccaacctgcaagttcccacgaaggtttttccatgtcaacgtctatgattctggggatgtatgcctgtcaatacttggtgatgcatgggcgccctctatcacagtgcggcaaattcttataggcatccaggagctgctggagaacccaaatccagcctctcccgcacaggattttgcttacgatgtttttgcagagaatatgccagaatacaagagacgtgtccgtgagcaagccaagaggtatccttcgctcgtgtagccgtggacatctgcaacacaattgcttttaaccaaatagtcactcactttggtgtagccgaacatgtttgacgtgcttaactatggtggctagttagccctacgcttattggaactgctaaagtgccgcttattggaactgctttaagtgcccctcc

SEQ ID NO: 93877 - DNA, 831 bp, Zea mays
  Clone ID: MRT4577_185602C.1
ttgggtacctcgaggccggccgggccgaaccggagcgtcaagcaaacatccgtcgatcccgattccgaccactgcgctcgcgccgtcgcgcgacggcattgtgcgcccgagccgggctcgttggatggcgtccggaggcgccgcccgcggtcgccttgctgaggagcgcaaggcgtggcgcaagagccatcccctcggctttgtggccaagccggcgatgctgccggatggttctgtcaatctcatgctctggaactgcgtcgtccccggcaaggaaggcactgattgggaaggtggatatttcccggtcactctccatttcactgaaaattacccaagtaaccccccaacctgcaagttcccacgaaggtttttccatgtcaatgtctatgattctggggatgtatgcctgtcaatacttggtgatgcatgggcgccttctatcacagtgcggcaaattctaataggcatccaggagctgctggagaacccaaacccagcctctcccgcacaggattttgcttacgatgtttttgcagagaatatgccagaatacaagagacgcgtccgtgagcaagccaagaggtatccgtcgctcgtgtagccgtggacctctgcaacacaattgctgctaaccaagtagtcactcactttggtgtagtggaacttgttcatgacgtgcttaactatggtgtctagttagccgtacgcttgttggaactgctaaagtgcagcttattggaactgctaaaatgcccttgactacgtcttattattatggtttatcagtataaaaaaaaaaaaaaaaaaaaaaaaaaaaactcggaaaaa

SEQ ID NO: 93878 - DNA, 116 bp, Zea mays
  Clone ID: MRT4577_185603C.1
gcagtgacaagaacccttaaacagttgcacagcatctcagctcatcttcactgcaccctggatttgcatacaggcttcaagatcccatttgaattttgaagtgactggaccattgt

SEQ ID NO: 93879 - DNA, 241 bp, Zea mays
  Clone ID: MRT4577_185604C.1
ccacgaaaactgtcttcgacatggagcgggacgcgcccggtaccggcgctcctccgcctcctcgccgtattcttcgctcccatcacctccgacatccgcccaatctccaatgcgcacagatccggtgccgaggagctcttcatcccctccgacgacggacccctcgcggactcggagagcacgccatcgaggcagagaaacaatcccacatactcgggctggagaaatataagagcgtatc

SEQ ID NO: 93880 - DNA, 208 bp, Zea mays
  Clone ID: MRT4577_185605C.1
gggtccagcacgcgtccgcacacacgtccgcttttgacgatctcccacatgacctaaaatcatgcttcctctacttttgcggcattgccaatgaaaaccccggttaaggctcccaaattggaatccagttggatggaaaaggggttcctaaaaccaaagaatgggaaaacaatggaaaaagttggaagaatcaatttgaaggatttgg

SEQ ID NO: 93881 - DNA, 502 bp, Zea mays
  Clone ID: MRT4577_185606C.1
attcctccttctagccgtcaccaccccgtgacctccgcctggctaccatctccctccctctgcacatatcctgctcatcttccacctttggccgtgagcagcatggccgagtgcccctgcctctacacatcctccatcggccctctccccacaacagcatctcgtcggcacccaagctccttcccctgctctcaggccagcaggagccagcgacctctccaactcggctggccatggcacccagattttccagcccatgtgcccccccctggtgctctccatggatgtgctgagggtgatgacgaaggcttcgcagatgacattgatgagttttgagtctaacgatgcgctagtaacattcctgtcgaagagtgtctatgtttaattcttccgtactttgatacttgtttaagatactatgatccagatgatgtaataaagttactctactctctttatgactttattgcattgtcttttgatatattacacttgtgacgtc

SEQ ID NO: 93882 - DNA, 727 bp, Zea mays
  Clone ID: MRT4577_185607C.1
cgggaaactgctttattacaagctgtacagcatgcttgaggatagcagtatctctcacctcatctcttgggcagagaatggcgagagcttcgtcatgtcaccatctgcggacttctcaaaagtgctatcacaatactttaagcataccaatatctcttcattcgtgcgtcaactgaatatgtacgggttccacaaagaacgagacgtctttcatactgggcatccggagtcgaccttgtgggagttcaagcacggtaacgggaacttcaagcgtggcgatcttttgggccttcgggaaatcaagcgacgcgccagtcgacatgccctcgttcaccgcgagaacagctacgcaaagccatcatcctcgcacccaggtacgccagctgaggctatgcctatgccccctgagacctccgagtcacgtatgaccagcatcgagcatacgcttttcgatctcagcgcgcgattgcagaggagcgaggaagccgctcaatacatgcatgtgaggaattcagtgatcactgacacgatgggccggttactacacttcaatcaagagctgtcccgcaccgtcctgtcccttttcccttcggagagcccacattatagggatgtcatggcacttcaagcggggatccagaagcaggtggacgctgtgcgtgcccttgacgagcatcatgaagctccctatggcggccgtcagcattattttggcgcaatggagaac

SEQ ID NO: 93883 - DNA, 683 bp, Zea mays
  unsure (1)..(683): unsure at all n locations
  Clone ID: MRT4577_185608C.1
gacgcctgcggtatctcggtccggaattcccgggtcgacccacgcgtccgattttttgtaccaaaaaatactttaaaagacctcagaagcactattttactttgaagaaattgcatttttgaactttactcagaaccagttgtcaataaactccatcaaacaatttcattgatatttaaaaatgaatattagtattatgaaattatttgccttttttgtgggcactataagccaaatacttttttacccaaaaatcattttcgggaaaaatgttacaaaaaattgcaccatggattagcatggttttgtttttgttcattcagattcatttgaaggatagttggttgttgctgcaccaagtcaggtgaactccgttcatcgctttctttgcctccaaataattggttcattacaactaaaatgtttatgtcttcaattagtctgggaaacagtgccgagatttctgtaggaaatgaaataactgattttgaggtaccaaatagtgcaattgggtaagacagggtttattcagttgcatcggtctccagagttacagtgtcagctctgcgtcgtgctttttgggcccatcctttacaaccttgcttccaaaagtganaacgggcgtttgatggcactaggccaaaactgtccaatagagagcagagcttccaaaggctcatcta

SEQ ID NO: 93884 - DNA, 664 bp, Zea mays
  Clone ID: MRT4577_18560C.1
cgtcggacacagggaaaattccccaccacctcaccaccacccggcccggccatcacgagcgcactcgtctcgtctcccatgccgaccggtgagacgctagcggtggagactcaagcaccagcgccgcagacgcagacgccgacaacaacagcctcgtcctccccatcgtcgacccaccgtcgccatcgcactttctcatcatcgtcgtcgtcctcgtcgcccctctccacgctgtcctcggcggcatcctcgccgtcgccgtccccgcgcggccgcgccgtgcccttctcctgggagcaccatccgggcatccccaaggcgcgcttcctcggtgttgtcggagctgcctcctccgcgccaacgcccctcccgctcccgccgccgctgcgggtcccggagacttcaagggcgcgccaccagcagcacgcccggcgccgacgcgcctgcggaaagccgatgcccgccgacgacgcggggggggaccccttcgccgcggcgctcgcggagtgcaccagggaacgcggcggcgcgggatcagacgccggcctgatggacgcgctcttccccgcgcggccgacgacgtcgtcgtcggtgcccagcagccggcggtgggccatcgctttcgccgggggggtcgtcgggctcctcgacctgtacggttgca

SEQ ID NO: 93885 - DNA, 352 bp, Zea mays
  Clone ID: MRT4577_185610C.1
aatccgggggtctctttcctgggttgggcggggcccaggggaggggggcccacatgccaagccaccctccggagaaagcctcacgggggggcggggccaacgggagggggggggaatcgggcaggcaccgtcccaaaaaaagcaaggggcgggcactagaataaaaaaacaaaggaaaggcccaggctggggggcggtccaaaaagaacggcacgacccaaatttggagaaaaggagaaaagggggaacgggagggggggcgaaaatccaacggcccctgggcccctttttacttggggtacaaaggggcccagcagggccaagaacccttgtgggccaaaaagccccttgg

SEQ ID NO: 93886 - DNA, 650 bp, Zea mays
  Clone ID: MRT4577_185611C.1
aaactttcctagcctctctgcatcctcgccgttatccacgttctttagcgcgctgcgcagtgccgctccgggccgctgttcaattcagtatgttccgcatgctactgctgcgagagggctaccaaatcgagcaatagcaccctacgatctatttctgtgaatacgaaactgtgtctgctgcactgcgcgctgctattatatactagatcaagtgtgtgggcccaaactcccggcaacgtagctacttccacccctcgaaacagacctcttgacgcgctacatcactacacagtcctgctgaatgccctggcgcgatacctatcatcaccaacgtctgcattttccagtggatacacatagcgctgtcgctgccagggcattgattgaaaactactgatgctcttgctatgagttgcaggcattcgtatgtaccctaacggagcccgattgagaatcggcgcctgatacttacctactggaagagcccagcgtatactctcaaagtcctagttgtcctcagaccacgctccctatccacaggggatgccgacatcgtcgtatatctaccgatgacgctcataattcacgtggtcatgcggaacaaaggcccctagaagctctggctggaggaccacctctagctctcggtg

SEQ ID NO: 93887 - DNA, 788 bp, Zea mays
  Clone ID: MRT4577_185612C.1
gaagaataagaacagtattgaattacatttgtaccttcggcttgatagaaggtaaaagtacaagcgtgacgcatgagcgaatacaagtcagcgtgaacattacggggatattgttcatctatttataggcacagggcgcagcctgtgtaaaattacattcatgccctttatgtttactattgacttatggatgaaccaatgagagctaaatagccttttcccctttaagtcggttcctttttccaccgctgagccgaagctcccttacgtgtagcttcggagcaacatcagccttcatctcgaccatgctttccacatcgcgtatggttttaacccgagtctgaaggtacctgttcatatattacacttgggaaacattgttaaatcatgtttttgaggaccttcggaaatcgaaggccccctttggaagacgaaggccccccaacaagccctatgaaaaagaaagataaatgtttagcatgagaataaaagctctattccaaaattcataaactttaaatttacaattcatgtacgttcaggccgttgtacgcaaggctgtccgcgaggtcatcctcgagcctcaaaaatcccatacttttagccatcttccgacagacagatatctctttgttgtctgggagacagtacaggaaatcatcttcgtctgtgccattaaacactaaggcccccttcggatattgtagtttctgggcatagtgtctggcttctaagatttcttctttggataatcttttccccgaagcatgtcgaataatgaaatcaac

SEQ ID NO: 93888 - DNA, 344 bp, Zea mays
  Clone ID: MRT4577_185613C.1
ttttctctttttttctttttttttttttttttgttttttggtttaaaaaaaaaaaaatgtacccccttacccagtttaaatcgcctacattttttttccacgtcaaatttgcatcccaaagctttatttgcatcttttttagacattaaaaaactaaaccacccctcccccccctttttgtttgaataaaccctgctacaacttacaacttttacataccaaaaaggccggaagggcaacccaagttcccgaaaccactaccaatgttgtttttaaggttttcaaactctcgtatgctcaaaactcctttcttccttccatcgaagtagctttaaagttcaccc

SEQ ID NO: 93889 - DNA, 498 bp, Zea mays
  unsure (1)..(498): unsure at all n locations
  Clone ID: MRT4577_185614C.1
ctgcgagcccgtgaggtggagggattggatgtttctccgtacaacatgacgcgcatgcaccggctccgccccctcttcctctccgngctcttggcgtcgctgcaatgcggcgcggcgacggcggcggctggatacggaggtggcgccgaggggttctgctcggcggagccgcccagtaagtgctccgnggatcagtcgctctactggaaggtgaggcattccaccctttcgcccgtgcacctncaagattgacctgcctccacacgcagcgcttccagtaggtatcatgctcccaatagcaccagagagctctgcgtcgagcctcttcgccggntgcgcatcactgcgccctgcagcgtgtcgtgacccgctcgctgctctcggtggccactctattatcgtctctacgcanccatgcccagatgggttcaaaatcaggtcctaccacctgaaagatgcccgaaagggtccgctttctgttctaccaagcggagcatt

SEQ ID NO: 93890 - DNA, 355 bp, Zea mays
  Clone ID: MRT4577_185615C.1
ctcggctttttttttttttttttttttttttttttttggtttggtttttttttttttgggtggggccatacaaagaaggttcgaggaaactcccagcggtaaaaagcccagcccccagccaacggggggccacaaaagggcgatggaaaaggacacaagggctcccttagggcgcacagtaaacaaaaacgggggttccaaaattgggggaagcacctaacaaggggaataacctctcgtttaagggggtgaccttaatcacggcctggcgaaaaaaaccacagctgaccataacaccgggccggggggggaccccgaaattccaaaccgggacctgaaggggtcccacctgggc

SEQ ID NO: 93891 - DNA, 518 bp, Zea mays
  Clone ID: MRT4577_185616C.1
aaaaaaaaaaaaaaaaaaaaaaaaaaaaaaaaaaaaaaaaaaaaaaaaaaaaaaaaaaaaaaaaaaaaaaaaaaaaaaaacttgggccgggacccccctaagggcaatttttgaagttttccttccccctgggggggggtcgattttccttttagggggcccatttggcccttttggggggcgttttaaaatggccgggccggggttttacaaggggggaactggaaaaacccgggggttccccaacttattggctttggggaaaatccccttttccccagctgggttatttgcgaaaaggccccccctttccgcctttccaaaaattggcccaccctcattgggaattggcccccccctgtgggggggctttaagcgcggggggggggggggttccccccagcgtaaccgctccccttgccagggccttatcccccgcttttttggtttttttcccttcctttttccccccggttcgctggttttcccccccattcttttaatccgggggctccctt

SEQ ID NO: 93892 - DNA, 601 bp, Zea mays
  Clone ID: MRT4577_185617C.1
gttctgaatttttctattgccgcaacactttttggacaaccggtgtgaaggaagattcaaaactgaaagtgttagcttcaggcttcagcccaaattaacaaaactgaaaacacattttttttacagttcagctcccacataggattttttattttatttttgcagaatcaaggtctctcttttgaatctcggagcaaggccgtggtcgacgagcctgaagaagttttggagtagccggcggtcgtagtcgtcgtagaggagtcaccgccgctgtagctttccacggacaaaacgccgtaggaacgtccggtgacggcgaggtccgacgccgtcttgtacatctgcggcgggagcgccggcagcctggcgtccgccgactgcaggacgtgcatggcctgcgcgatggacggccgctcgctctgctcagggtgggcgcaccagagcccgacgacgagtgccctctcgatgcactcgtcgtcgtcgccgccgcccctcagctgctcgtccgccgcgtcgaggaccgcgttccgtccgtacaggccccacacccacttgagcagaacgaatggcggctcgccgggcagcatgaccaccggggacc

SEQ ID NO: 93893 - DNA, 323 bp, Zea mays
  unsure (1)..(323): unsure at all n locations
  Clone ID: MRT4577_185618C.1
aatgaatccagactgagaagaaacatggcaggcgtgatggatagaccagcggacgattacggatggatggattacatataccgtttattactagtcctgagccttcctattatatgaacagcggcctgaggagggggattactacgataaagaccctctctacttttatgttgacgccttaattattaggggttactaatctggacgctcatctttatctggctaagatgaagcggacttctgttgaccgggccatgagctcacctcctgtgttggtncatgaactaggagctgaagtgcaccatgaagacacagaactgggt

SEQ ID NO: 93894 - DNA, 182 bp, Zea mays
  Clone ID: MRT4577_185619C.1
ttatcgtttcagaatgcgctaccattttcgggggcgtcgtggagaactaggagctgcactcccgaacatctagcatgattaatagcggtggcattactgtgactactgatacggaagatgaaaactgtgcgaacccctgtctctatactgtcagccagcataagctttatacgacgagcgag

SEQ ID NO: 93895 - DNA, 253 bp, Zea mays
  unsure (1)..(253): unsure at all n locations
  Clone ID: MRT4577_18561C.1
gtcaaaaaaaattcagtttttataataattcaccggttttcaacagcaacttttgaagaacactaaggggaaacagatggggaccaaccaaaccaacggcaccttccaaagctccataattaaacatttaaaccagcaccttaatttggacctttttttttctttcctggggggttnatctaaaaaaaatgaaatatttggggaattaaaccaaggtcaaaactggccgtgtacatttttacaaacaaaattt

SEQ ID NO: 93896 - DNA, 695 bp, Zea mays
  Clone ID: MRT4577_185620C.1
cccacgcgtccgatctcgttccaggtccacgcggagtggtgcctgacgaaacgcgaagacggcagctacggcagcctcggcttggagcacatcgcttcgcttcagagagtcgttgtgaccatcgtctgtgaggggtatgtctttgagctggacctgacggagacggaggcggagctgattcacgcaatcaatgttcatcccaacaaccctactctcacttggacggttcttaacgaaggcatcattagaagctatacgttgggcgatactgatgatgatttagccatagaagagcaagaaagcaaggcccctttctccagtccatgatgatatatatgtcaccacgtcaagaagcttttgtgcaagatacccagacagacacccagagctagctagcgactgaatgcgcacagtgctgtcttttcacactcttctgcattttttttattattttttggtgttacagaagtgtatttttctgctcccaattcttccgttggctcggcactctgttcacatgcctgactataagcccttgggcgcgcttgacctagtttgcaagtgtttttgataatagtagatgtgtttattgtaataaattgtattattaacttgcactcaaaataatagaaacgtcatttgtctttgaattatttaaaaaaaaaaaaaaaaaaaaactcgagagtcttctagac

SEQ ID NO: 93897 - DNA, 252 bp, Zea mays
  Clone ID: MRT4577_185621C.1
gcgtttgaatccctgatgcacctcccaggtgcccagctaatacaaggtgaacttcatgatccactacttccttaaaatcattcacctttttgatgaatattccaaatgtttacttgatggagcacacaatgtgggctctaaaccaattcaacaaatccgcatattccttttcgagaaagctttagcacttattggcaataaaacccttattcgccaaggccttcatgggcacctttgaaacaacccatcttt

SEQ ID NO: 93898 - DNA, 737 bp, Zea mays
  Clone ID: MRT4577_185622C.1
ggccgccgcctcgcggcgaggccgaacacctgacacctcccgccgcccgtcggcgattcgcaatggccttcgccggcaacgccgacgactcggcggaggactattccgcggaggccaccgtggtgcgcttcgacccgccgctccctctcctccgggcgccagtcccctcgccagcatctagcggcgagggccccgtcctcgccttccgcgacgtcgcgagctggcgagccgcctgggaggccgccgaggccagcctcgtctcccagtgcgagctggccgaggtgcctcgcgatagtcatgcaaggcagtaagtttagcagctgcaaatatcaaggagggcaaaccagctcctggctactggagctcagtggttagggttgacaatgcccccataatcgccggactatgtttgtttcacttatgttttttttactttgtgacgatgtgttctttgtggaaaccggaatggttagggttgacaatgcccccataaccgctggactttcaatgtggcatttatatttgtttcctttttgaaaatgttgtttccagtttcaccccagttgggggcaaagagtacaaactacctcctggcatctgaataccagtggtaagggtggcccgtgctatatagtcgcgatgccttctgtgtggaatgacgatgtgtccttattggatccgtggtatccccaacaacgggcttcaaaaaaatgttatccccaacattgtaattggac

SEQ ID NO: 93899 - DNA, 231 bp, Zea mays
  Clone ID: MRT4577_185623C.1
tctgtagccccgggtacgctggagccggtgatggatggtcggctgcttccagtgcgggccaaggtgcttcgagcctagctgcgacgtgacacatggcaggtgctcatccactggcgcgaccttgctgaagacgacgcaacaggtgaggaccttgacgaattccgcaccacctaccccgacctacagctcgaggacgagctgtttgcgaaggcggggagagatgttatgtac

SEQ ID NO: 93900 - DNA, 884 bp, Zea mays
  Clone ID: MRT4577_185624C.1
cacagcagcagcaagtgagaagacttgtagtcgaggagctggggagcaagcaagcaagaagagagccgagagagctaagctagcgcgcgatggcgaggtcttccaagatgatgatggcggcggcggctctgctggccctggctctggccgtggcgacgaccgccgaggcgaggaacatcaagacgacgacgacggcggcggcggcggagaagaaggcggacaacgacgcggtggtgcagccgcagaccttcccgcccttcgaccgcctcggcggcggcgcgtccccggcgttcggcggcctccccggcaccggcagcagcattcctggcagcagcattcccgggttcagcctgcccgggagcagcggcggcagcagcatgcctgggttcctgcccggcagcggcagcatcggcagcatgcccctcttcggcggcggctccccgttcagcggcttcggcggcatgcccggctcccccaccgccggctccgtccccgagcacgccaacaagccctgaactccgtcagtcgccggcgtggtagtagagtgatgctactatagtacgtcgtcgtcgtcgtcgtcatcgtgcgtgcgtgcgtgcatgcatgcgtggttggttggttgcattggtttcccctagctacatacgagcagttcttgtgttctagctagctatagctcgtgttctagtactgcttttagttacctgcatgcattattggagagctggatgtgttccatttgttgtttgcttcattattagttctgtctatgtgagacatatggtgtttagctgttggtgatgactggttgtagtagtggtggtgatgttcttgaggcatgaataatgctacatgtgatgtgatgtttgttgaactgccgtggt

SEQ ID NO: 93901 - DNA, 333 bp, Zea mays
  Clone ID: MRT4577_185625C.1
tagctgaatacagtgtaatacggtatatcagaatactaatcagtataaataaaatggcgcagcagcaaaatgaccgaggctgaaactacctctaccagtctagtagggtggtggcctacttcgtggccgtattggcctcttccgtcccgttggtggtgttatatgtggcagaatgttaatactaattcgtgcttgtagcgtatccatactaaattgattaaccccaccagatctgcacaatcgtgttattattagccctggccgtccgagtagtggtattagattactagtattcggtggtaccaatgggcctgttggtgtaactgttggctt

SEQ ID NO: 93902 - DNA, 151 bp, Zea mays
  Clone ID: MRT4577_185626C.1
gtgacttgacgaatcgcggcgattaggtaactcgcttagaagttttcccgtgtttgagcaaaaaaattccctgttctctgttcctaagttagactgagtatcgtactaagttattttctttttcacttgatggaaaagttgcttcccattt

SEQ ID NO: 93903 - DNA, 132 bp, Zea mays
  Clone ID: MRT4577_185627C.1
gccaaacattaagcccataagatggctttaccataggcaacagaagctgtctaggggtgtcatattgtgaaggtttgggtccgcactggacatcttcagcaactaaccctgtaacttgcgagttgacggccc

SEQ ID NO: 93904 - DNA, 417 bp, Zea mays
  Clone ID: MRT4577_185628C.1
ccaaaaaacccaatttattgccttgcaacaataaacaaacctagaaatgtcaacccttgaaactaaatggtctgcccggttctttaagctaaatttgacatccaaaaaggatttgcaaagggaacttttgtataacacgtaaacccaggggcccttttgtctgcaattctttacctccttttttgggacagcatatgcttgacccaaaaagctaaatcctgggggaccctcttaaaagtttgggagcccacgtaccccaagccaaaccgggaagggtccccaaccctccactcaaagttgtcaagcagcgaccacccaaagtccccaaggactttggcaccatcatttatggcctttttgacctcagttatgtagcctttgaaataacggatttttaccggacccgtggcgaaccct

SEQ ID NO: 93905 - DNA, 123 bp, Zea mays
  Clone ID: MRT4577_185629C.1
taatacactatataggaagctggtcgcctgagtacgtcgaatcggcaccactcggcctggcgggtgagacaaaatcactatgtgtcttcacgagcctttgagcgagctatgtaactgcagcac

SEQ ID NO: 93906 - DNA, 187 bp, Zea mays
  Clone ID: MRT4577_18562C.1
tcggtaacattcatagagaagttctattatctacatctaagcaccaagggcagtcgagagttttgcccttcttgcgctccccgctcattcagcaagtgttgctaccgggacaattattccacattgctcacaacaatacctctctccaaagacagctgcaagaactgaataccctactatacaatat

SEQ ID NO: 93907 - DNA, 848 bp, Zea mays
  Clone ID: MRT4577_185630C.1
cttgccagggctgaaagagaaccatcctgtcagccaatcagaaaagtggaatttgactttgagcacaaaagaatgtcaaaggaagagataagagagttgatattccgcgagatactggaatatcacccacaactgctgagtagctacattaatggcacagagaggacaacctttctctacccaaagttttagcttttctgtgtttgcacatgtatgttgctttgcacatgcatgtaattgctcatgtatccattcgtttgaacacttgacggaacagttgctggctatttttatgcagtgctgttgatcaatttaagaagcaattttctcatcttgaagagatttgttggaatgctcttcaactttcttacgctcatttacattgctttctctgcggtaaattgctggcttaaatgcatgctgcttgaaccctataatcagatagaccatcccgaatgcaagtcaaggcctgatagtggtctttctgcaattacagagctggaccctggttatataacaggtcctctctcttcagtatggaaagaatgggtcaaatggtgtgtagagtttggcattgaagctaatgcaattatcgctgttccgtatgattggagactgcccccatcaatgcttgaggagagagatctgtactttcacaaattaaacaggatcagtaagagttaatggcccagtgacggattcaaggtatcctgctcaccaacagatcccacaagcatacggttaccgccaaatgcctgcaagggtggacagtaccaacccatcacaggccatgggaggttacacgctgcagtcacagaaggaaacattatttgaagagttgccatttt

SEQ ID NO: 93908 - DNA, 374 bp, Zea mays
  Clone ID: MRT4577_185631C.1
gtcaaggcctgatagtggtctttctgcaattacagagctggaccctggttatataacaggatcagtaagagttaatggcccagtgacggattcaaggtatcctgctcaccaacagatcccacaagcatacggttaccgccaaatgcctgcaaggttggacagtaccaacccatcacaggccatgggaggttacacgctgcagtcacagaaggaaacattatttgaagagttgccattttgaagagttactcgaatccaatattttgctcttttgaattccttggtgtacactggcaaatattagcatatttgaagagttgccatttcgatcatcatcttcatttgtactttttgggtcagatctaataaagcat

SEQ ID NO: 93909 - DNA, 1383 bp, Zea mays
  Clone ID: MRT4577_185632C.1
caacagtcttctggacggattatgttgcaacaaggtggtacagagctccggagctctgtggatccttcttcaccaagtatacaccagctattgacatttggagcattggatgcatatttgctgaggtgttgacagggaagcctttatttcctggtaaaaatgttgttcaccagctagatttgatgactgatcttctaggtacaccatcaacggacacaatttctcgggttcggaatgagaaagcaagaaggtacttgagcagcatgagaaagaaggaccctgttccattttcccagaagtttcccagtgcagatcctttggcacttaaactgttagaaaaactattagcgtttgatccaaaggaccgtctgacagcagaagaggcattgcgtgatccatacttcaaaggtcttgccagggctgaaagagaaccatcctgtcagccaatcagaaaagtggaatttgactttgagcacaaaagaatgtcaaaggaagagataagagagttgatattccgcgagatactggaatatcacccacaactgctgagtagctacattaatggcacagagaggacaacctttctctacccaagtgctcttacctattcctgttctccatagtacaaaagatgatattgattttgtggctggtttcatttgttggaatgctcttcaactttcttacgctcgtttacattgcttttctctacggtaaattgctggcttaaatgcatgctgcttgaaccctataatcagacagaccatcccgaatgcaaatcaaggcctgatagtggtctttctgcaattacagagctggaccctggttatataacaggtttcaggtcctctctcttcagtatggaaagaatgggtcaaatggtgtgtagagtttggcattgaagctaatgcaattatcgctgttccgtatgattggagactgcccccatcaatgcttgaggagagagatctgtactttcacaaattaaagtttgtaacacttgcctcaacttgttatgaagcaaccaaatgctatacatctgttaggatcagtaagagttaatggcccagtgacggattcaaggtatcctgctcaccaacagatcccacaagcatacggttaccgccaaatgcctgcaaggttggacagtaccaacccatcacaggccatgggaggttacacgctgcagtcacagaaggaaacattatttgaagagttgccattttgaagagttactcgaatccaatattttgctcttttgaattccttggtgtacactggcaaatattagcatatttgaagagttgccatttcgatcatcatcttcatttgtactttttgggtcagatctaataaagcatcagcattaaatttacaatgatc

SEQ ID NO: 93910 - DNA, 3014 bp, Zea mays
  Clone ID: MRT4577_185633C.1
gagttggttggaatgcccgccgactggaaagaatctccctcccgttcccgtcctccccccgctccgcctttccctttcctcccccttcctcttcctctctccttgggggcgcggcgagatcgggcggaggagccctaccgccccccctcgccgaaggccgcagcggaggcgggtgctcagctccgcggaaggttagaggtgcggggctgcgtttggaaccggcggtgggcgcgggagatccggccagcggggatgcagcaggaccagcggaacaagacttctgcagaggccgacttcttcacagagtacggggatgcgaaccggtacaagatccaagaggtcatcggcaagggaagctacggggtcgtctgctctgccatcgatctccacactcggcagagggtggcgatcaagaagatacatggcatcttcgagcacgtctccgatgccgcgaggatcctccgcgagatcaagcttctgaggctcctgaggcaccctgacattgtcgagatcaagcacattatgctgcctccctcgagaaaggacttcaagtagacatttacgttgtttttgagctcatggagtccgacctccaccaagttataaaggccaacgatgacttgaccaaggagcattaccagttctttctctatcagttacttcgggccctcaaatacattcatactgctaatgtttaccaccgtgacctcaagcccaagaatattttagcaaactctaactgcaaattgaaaatatgtgactttggactagcccgagtcgcattcaatgataccccaacaacagtcttctggacggattatgttgcaacaaggtggtacagagctccggagctctgtggatccttcttcaccaagtatacaccagctattgacatttggagcattggatgcatatttgctgaggtgttgacagggaagcctttatttcctggtaaaaatgttgttcaccagctagatttgatgactgatcttctaggcacaccatcaacggacacaatttctcgggttaggaatgagaaagcaagaaggtacttgagcagcatgagaaaaaaggaccctgttccattttcccagaagtttcccagtgcagatcctttggcagataggatagcagctgacaccaccgacatatacacaagatcccttaacagcatagtagaggcattgcgtgatccatacttcaaaggtcttgccagggctgaaagagaaccatcctgtcagccaatcagaaaagtggaatttgactttgagcacaaaagaatgtcaaaggaagagataagagagttgatattccgcgagatactggaatatcacccacaactgctgagtagctacattaatggcacagagaggacaacctttctctacccaagtgctgttgatcaatttaagaagcagttttctcatcttgaagagagtggtggtaacggcccatcagttccaacagacaggaaacatgcatcccttcccaggaccactgtggttcactcgaatccaattcctgccaaagaacaacctcttggtgcctcatcaagggttagaccagtctctgatgattcatgtaagaacccttgggagaaaggaagtggtcctggaaatgttcccaggacatctctgactccacaagggctgcaagcacaagcaggatcagtaagagttaatggcccagtgacggattcaaggtatcctcctcaccaacagatcccacaagcatacggttaccgccaaatgcctgcaaggttggacagtaccaacccatcgcaggccatgggaggttacacgctgcagtcgcagaaggcctatgcttgtgcaaacggcaaaggctcgcctgatgtggccgtgaacatgagagctccccccttccatctcccagctggaccaaagaagaacccattagataggatagcacctgacaccaccgacatatacacaagatccctgaacggcatcgtcgccgccgccgctgcatcagtgggcgctggcgctggtactcaccgaaacatcggcgttgtgccatctggcatgtcaaggatgtattagctgctgctgaaatgctggcaaatcctacctagccttgtggccacagcttctccgggactagccggcaaggctacaaggagtgggcatgtggtgcaaggagtgattcataagaggtggtcccgtggtcttggactcctggacatgttcttaggtcacgtattgaggcggaaaaatggcgccattttgcgcacaactgaaggattgatcgattcatttgattcaattgaagctaatgtatttgctaatagtaaaaggacgctgatccaagggaaaggctggagaaattctgacataaatgcaacataggccgttggccgttgcagtgggacctgagggcgtgtgtatacaatgtattattctcgttttatcgaccgtcacatctggtattatcatgctatcagccacctttaatctttatctaccacaacagttcaatacattgctttactgttaaccttatttgaagagttgccattttgaagagttactcgaatccaatattttgctcttttgaattccttggtgtacactggcaaatattagcatatttgaagagttgccatttcgatcatcatcttcatttgtactttttgggtcagatctaataaagcatcagcattaaattttcaatgaccccctaaatccatggttttcccctgggttttagctcttctagtgttagcacatgtatgttgcttagcacatgcatgtaattgctcatgcctccattcggttgacacttgacgaacagtgctgctatttttgccgtgtgctgatcaattaagaagcaccttgtatcttgaagagagtggagcgcacggaccacaagccccatcggacaggaaacatgcatccgttcccaggaccactgtggtccactcggatgcaatgcctggcaaagaacaacctattggtgcctaataaagggttagaccagtctgtgatgattcatgt

SEQ ID NO: 93911 - DNA, 212 bp, Zea mays
  unsure (1)..(212): unsure at all n locations
  Clone ID: MRT4577_185634C.1
gccgggggtgggcagtgtggttcctctcgctccctgggctgggttctaatacgtcatgactgcgagatcccttgccctcccccacttaatcgcttttccgcttttccccctttcgttggctagcgggcttcccagcaggcccgtgtcgatcccccttgcctggggtgtnggggccacattgctcctcgagagtgcctctgttaatattgtgt

SEQ ID NO: 93912 - DNA, 477 bp, Zea mays
  Clone ID: MRT4577_185635C.1
ggtgcccaggctccatggccggtcgcgcttccccctctgggcgccggaacactacttcctgctcaccgtgcggctccctggtgccgagctcccctccctagcgccgtccatggagtcacctggccgtgcctcctcattcctggcgagctcgcccctgcccaggtctgaccggcgccctccctgccccagctcaagccgcggtcgtgccgttgttcttcgtgtccaacaccgccaaaccactgctgtcgttctcggcaacttcggcacaacgtcgttctcactcgcccgcaccatgaccttctcgcggtctgaggttcatcactgtccgaaggctcatttggacggagctcctcagccgttgtgccctctttacccgctgaggcgtgtgttgccgcgttcacctcattgtgtcgtcgtggacttttcggcgtactgctgtggttcctggatcacgctcgcctcaactcgaacaagtcg

SEQ ID NO: 93913 - DNA, 753 bp, Zea mays
  unsure (1)..(753): unsure at all n locations
  Clone ID: MRT4577_185636C.1
tctgggacgatatcctgcaaccgtcccaaagcgtgattcgtatctcgcagtcgtcaaggctccagctcgttcgctcgctcaccactcggccctcctttctatcgcatagcaacatcagacacacatctttgcctatcaccctcgtgcagccttttcaagatgtcgggagaaggttggttgttcctcttctcggtcctgctttcggcggtcctcctcttcactatggtcttcttcatcattatgttctccgatctcgaatgcgactacatcaaccccatcgacctgtgcaacaagctcaaccagttcatcctccccgaaatggcagcacacgcagtcctcaccgtcttcttcctgctcagtgggcaatggatcgccttcctgctaaacgttcccctcgtcgcattcaacgtcaataaggtcatgaacaagaatcacacattggacgcaacagaaatcttccggacactctcggcgcacaagaagcagtgcttcatcaagctcggcttctacctgatcagcttcttctactatctgtacagaatgattcttgcgctcatcgctgataccgagtagagcgggagacggggctcaaagaaagcggtggaagtagcatcaagtcggcggaagtcagtaggagacgaggcagacaaaccgccttgcggacagacacaacaaaggcgctgtggaaggnaggtggnctnttctctttcgttttttcttggtaacttacaagtaccnataccatcatcttcg

SEQ ID NO: 93914 - DNA, 280 bp, Zea mays
  Clone ID: MRT4577_185637C.1
tagccatatgtccttaactcggatgacaactccaagaaataaaggccaaagaagaccaaccatgtcaaagaaggataagcatcaacacaagacttcaaagatcaagttgaaccgccagcggaatcaagatccacagttcaggatgaagtctttccttattatactcttccttgccacaacctattatctatacttgccataatcgtacctcatttgacctaatagatggctagacgtatatgtctatattttccaaatcatctactatgccttccgattc

SEQ ID NO: 93915 - DNA, 210 bp, Zea mays
  Clone ID: MRT4577_185638C.1
gttgaacaacagggtacccgattttacacaaaaaaacaaagggggggcaaagttctttaaagccaaccccaacactagagggggatattttattttaaaggtttttccaaatttaaaaaatccacgagagccttaaaaaagcatccaacgggatgtgcccaaatccatgggcatccatgaataccggaaggccacccaccctttttattt

SEQ ID NO: 93916 - DNA, 383 bp, Zea mays
  unsure (1)..(383): unsure at all n locations
  Clone ID: MRT4577_185639C.1
actcggtctcggaattcctcggagtcgactccactgcgtctcgtcccacgtcgtctcggtatcgagngtgcgtcctttacaaatatcaacatcctgaggagtctctagcatcggcctgcgcaatgttgcggtcctttgggactcgaaggggtcggaagaaaggatgtgaatggcatgattcctgcttagcgactaaagtattacgagtatatctctctttcnggggaacctgatatcaagggatttgcaaggttaagtcatcaaccaccgaccgccgccaacctcaagcaagcttcctctgcacaaatgactcctgccattaatccagtcacacttattctcaaccaagcatcaatcatcgtcaaaatttgtccttccgctgg

SEQ ID NO: 93917 - DNA, 443 bp, Zea mays
  unsure (1)..(443): unsure at all n locations
  Clone ID: MRT4577_18563C.1
ttggggtttttttttttttttttttttttttttttttttttttttttttttnnaaaacataaaacttattaatgatttgtcatagttctgggtagaacgcacacacaaaaaaaccggtccattattaaaccaacattgacacgactgagggggggaacagcaaatactttgacaacctcaatatggagagagggcaccagacgacgcaggcacattggcagtttaaacgacccatgacttactgaccaccacggaaacggagcacaagggggagggtgctctccttttggatgttgaagtctgttagggtgcggccatcctcaaactgtttgccggcaaaaataaaaccctgttggtccggggggatcccctccttgtcctgaatcttcgccttaaaattggcaatggggtccgagctctaaacctccaaggttatggttttt

SEQ ID NO: 93918 - DNA, 496 bp, Zea mays
  Clone ID: MRT4577_185640C.1
aattaaaaccttttttaaaaaaaagggtttttttttgggatggctttccggaaaaaacccccgggggtgggaagcaattaccaaccaaaacccctttccttaatggaaaccgggggttttcctggcccatttttaacccccccgattttaaggcccaaaaaaaccgggttttaaaaaggtggtcctttaagaaaaaagaaactttttcccggccccccggaaaaggggggatttaagggctggaaaagggcctttacaaaccttaggggggggcccacccagagccggggggcttccttttccaaaggtggacccccttttggcgacctttcaccctggaaaggtttttatgaaccccccccccccccaaaaacaattttttccctttttgaaaaaattttttttcctttttggttggggccttgggagtttaaccctgggaacaactattttttttttttttagcccccgggggacctttgtcccctgggccccc

SEQ ID NO: 93919 - DNA, 849 bp, Zea mays
  unsure (1)..(849): unsure at all n locations
  Clone ID: MRT4577_185641C.1
ctcgaggccggccgggaagagcttcgcgcgagtttgagccttgtgctggatgcgttgaaccttgcaaaggtcaaggaaagtggatgtagattttgctatgttttggtccttgtgctagatgctttcttcagtgggtggagaagtgcgagggctagagtacgtgttgatatcaaagagaaggctacggttaagattacgcttggtggggagcgctggaaggatgagattgcggagatttatgctgcaccaggtaggctactcttttccatggcggatgtcgcgcttttgcataacacgcttgatttcttcttgaggactttgctttagcaggtattcggctgtgcacatacgcgagttggtactatctaacgacctgcagcgacacgtcctccatggcctactctaggctttgcccatcacataccggtcaactcgggatctgatgacactttcaactttattcgacgttgtattacaggttgcatcgggaacccaaaacatacagcatgcaagtttccttgtccttcggccttgtcccctcccaagcgtctcctcgacgtaggcaaaagttcttcgccaatcaggctgattgacacacaatgcaagaactttcagtatgctgctctgtcgcattgctggggatcttcccagccgctcgtttcaacgaaagagacgtggcctaaaatgtcggtcaacatctcctttgataccttcccgcccctattccaagacgcaatcatcatcacccgtcagcttggcttgcgctacttgtggatcgatagcctttgcatcatccnagattcaattcgagactgggagactgagtcggcgaagatggggagcatctac

SEQ ID NO: 93920 - DNA, 369 bp, Zea mays
  unsure (1)..(369): unsure at all n locations
  Clone ID: MRT4577_185642C.1
gccacgcgtacgttatcagcattcattttcactttaagccaaccacattancaacaaccgaactgctttgtcttccaagatattatccctccttgctcttcttgcacttattgcgagcgcaacaaatgcgttcattataccacaatgctcacttgcttcacgttccattattacacagctactcccaccagttacttcaatgggcttctaacacccagctctacaagcctataggctacaacaagcaattgcggcgatcgtcttacaacaaccaatttctcatgtgcaacaacaatccttgtcacatctaacaatacaaaccatctgaacgcaacagcatcaacaatttctaccatcactgatccacct

SEQ ID NO: 93921 - DNA, 573 bp, Zea mays
  Clone ID: MRT4577_185643C.1
taccgggcgcccctctcggtttttttttttttttttttttttttttttttttttttttttttttttttttttttttgggattatacccccttcgactaggcatatcgacaagattatgggtttttttgggacaaaaatcaaaacaaggggcgaaacaaaaggactttctcctccaagggaagggcatcccaccccctatccagtttttttcaaaactaactaaaccgcccaggtgggtttttatccccccaacattagcctaccccacgaacaaaaaaaagggaaaacagacccctgtcgaaggagctaatccaagtaaaaaagggtcacaatcttccaaaggttcttggcctcctggcatgtttccatcaccagtttgctgtcttggaacgcaaaccaaatcacctgtgggaccttggaaatgatgcccatattgcataacctgaaaatggcaacagttgccactaaatataaagggggttttctagccccattcctttttattccggagataaaaataaaggggactcctctttcaatccatgcccttgacccggttaaggccatgttcgg

SEQ ID NO: 93922 - DNA, 1524 bp, Zea mays
  Clone ID: MRT4577_185644C.1
gcggccgccttcgccgaccatgttgcggctggtgccttgacttcggagtttgctgccgaagtcgagcgtctccgggcacagcatacggatgctgtttgggagaagtcggccgcggaaaacaaaagccacaggctgacagagaggttggtcgctacggaggccgagaaggaggaactccgacgccagttggcggaggagaggagggacgcgaacaaggccatcgccgacgggtgcgggcatttcgaggtcttcgaccagtcggacgaaggcttcgaacacgacatcttccatgtcgagggcccggtgcttaagcggtcggcgggggcgctcttcgacaggatgtggggtctgcacgaccgagagacggtccaggagaggtccggccgggcaatggatcagatggcgcatgacgaagaggttgaagaccttggcgacctagacagcatgctgcccgaggccccgggggtggagctggcgccttcgaccgatgtgggcaagggtccctcggtgacccccgcgtcgactggagctggcgaagaccccgcgccagcccatgcgccgacgggcgaggacgcctcgaaggtggtggtcgaacaggatgccgaagaccccgcggccgcggtcgggccttcgcaggttccgacgtttgggcctgcgcacgcaactgctactgacgatactaattttgtggcggcctcaaccgtagtgcctgccgatgataattcgtgtggctctgtgtctaagtgttttgagtctgatgattctgggagttcgatttcgtggacggaggagtcttcggatgaaggcttggattattttgcaggggttctgcttaccgaggttggacgatactacttagacttggagatagctgaggccagggttctgcttaccgaggttggattgttgaaggagaagggtctgactgccgaagctgtggtcgtcgattttgtttttaagaacattcagccactaaaagatagagcatacccagcttatctgtatcgtggcatcattgactcaaccagggttaccaacagaaggattcctgctgtgcatctggtaagccggcttgagatgattcttagaggcaaggtgtcgaatatcgatgctcctgttgcatattcagcctggaatctgcctccttttaaggctttcatcagttttgtgtcaaatcctcctgctggtgacagtggtttgggccttagagtgcgaccctctcccgaagaggttgaggctttggttgcttctcttggtgaaatccccgatgatgagaggcaggttcattttgagatgcctttaaatccgagcgacgcagaaataaatgccatgctgtacatgttggctgaggattcctctgattcggtccctgctgaaacactagctgtagcatccatcccggagtctggaaaaactttggatatccaaagatatgatagtattcgtccgaagcgtcctcgccgaaccaatcatccaacttctcctgctgaggggaagaaaaagaaaaagagacggcttcggtga

SEQ ID NO: 93923 - DNA, 308 bp, Zea mays
  Clone ID: MRT4577_185645C.1
ggggaacaataattttgggaactatggttttggacttatttaacataagtgggggtaaaacaaagcctatggtgttgtgcaactggagtcgtctcgaccatttttaacacgatcaacgtggggtgggtgatttagcggccttcacattggagcatgcaattcatctgctggttcaaatttgcggagaagaggggaaaggactttactccacagggcctgggttcagggttgcactcccttgaaccttgggtgtgggaggggatccattttgagctggggcccccttaggtttggggggggggctggtg

SEQ ID NO: 93924 - DNA, 562 bp, Zea mays
  Clone ID: MRT4577_185646C.1
ataaaaaaaaaaaaaaaaaaaaaaaaaaaaaaaaaaaaacaattaaaaaaaaaaaaaaaaaaaaaaaaaaaaattattttgggaaaaaaaaaaaaccaaaaaaaaaaaaaaaaaaaaaaaaaaaaaaaaaaaaaaaaaaaaaaaaggtttgtccttgggcgggaacccctttgggggggattttggaagttttccttaacatgggggggggttggggcttgcttttagggggcccatttcgccttttgggggggggttttaaaattaaggggcgggggttttaaaacgtggggagggggaaaaccggggggttcccaaattaaatggcttgggggaaaatccccttttggccggtgggggtaatgggaaaagggcccgcccggttggcctttccaaaaagtggggcaccttgatggggaaagggcccccccttgtaggggggttttaaggggggggggggggggggttccgcccagggggcccgttactttggcgggggccttggggcccgttctttgggtttttttcctttctttttgggcaccgttggcgggttttcccg

SEQ ID NO: 93925 - DNA, 281 bp, Zea mays
  Clone ID: MRT4577_185647C.1
acgcggaagaacacaaacttcgccaaaaagatgagcattcacgagatgcaaaatcagatttggaaagatcacgtttaccctccagaggcagggaagatatccaccaatcttatgcaaacagagatagggttgacatacagggcaggagttataataaggtaagagagactgaaattttgccaaggagagatgatggtgttcacagccgacgtgctaaagaggaagatttgaggtagagtacaatgttgaaggtggtgcaaggcatagaaataaggtgaggc

SEQ ID NO: 93926 - DNA, 367 bp, Zea mays
  Clone ID: MRT4577_185648C.1
aagtaatgcccatgcaaactctatagtctgttcttgtatgagctcgatcacgcttgctaacacagaacttctttattttcagcactatagccctgatttgaacaaacagatctactcaatgttaccaatccatcaagagcactcgggtttgagtaacactttcaaacatcaaaacccatccggccaccatatgtaacccaaaagttccaagcttcatcggaactgctaaatgtcataccaatttgtggaattcaaaaaggaattgcagcaactatgcggttgtgaataatgcattcagaacacgaccaactggatgttctcatcatttaaagtagaacttcaaccatgcagaaacgaataactaagt

SEQ ID NO: 93927 - DNA, 609 bp, Zea mays
  Clone ID: MRT4577_185649C.1
gccggccggtccgggactcccctcacctctcactaccactaccactgccgcggatcataccagatgcagtagaagcgcgcgcgagctggacttagaggcgcgcgatagatcgatcgatcgctcggccatcatggggcggcaggagcaggggctgatgcctactgagatcgggaatcgcggagcgcagccgacgggcccggaagccggatagccggacttgtcgccgcgagtgcgccgccggctgccacaattactgcaggcacggaaactccagaacgcgcgcctcgcgataccactacctcatcagccacgtgcgcgcacctggacaccatccccgtcttcttgctgatgagcgccgcccagctgggcagcctcagccgcgacaagctgtggcgcaaggtgtggggggaggtcacctacgacctcgccaccgtgatcgccttcctcgacgtcctcgtcttcaccatctccgtctacatcatgtccaggcccaggaccgtgtacctcatccacttcgcatgctacaagccaggcgacgagctcaaggcgcccaagggggagttcatcgacctggcgcgcaagaccgcgaagatcgaccaggaccgcctg

SEQ ID NO: 93928 - DNA, 1388 bp, Zea mays
  unsure (1)..(1388): unsure at all n locations
  Clone ID: MRT4577_18564C.1
agagaaggttctactatcatactcaaaagactagagaactggacaaccttcttggagatatttatcataaaattcttgacatggagagagctatcataagggatttagtgtgtcgcgtccttcaatttatacctcaactgacaaaagcagtgaactttgccgcagaacttgattgtattttatcattagcaactgttgcccaccaaaacaattatgtgaggcccatcttaactgaagattcaatactcgagatacataatggcagacatgctttgcaggaaatgactgttgatacctttattccaaatgataccaaaattcgtgatgcaggaagaataaacataataactgggcccaactactcaggaaaaagcatttacattaagcaggtggccttgatagtctttcttgctcatatcggaagctttgttcctgctgattctgctattgttggattgacagataggatattctgtgcaatgggaagcaaatccatgacaaccgaacagtcaacttttatgattgatttacatcaagttggaacaatgctcagacatgcaacatcgaggtcactttgtttgttggatgaattcggtaagggcaccctaacggaagatggcattggtctgcttggaggtactatcagtcattttgcaaactatggttcccccccaaaggtccttttgtcaacacatctgacagagatcttcaccgagaattacctaccacagtgtgaacatatcaaatgttatgccatgagtgttctgaatcctgatggacagacgagcaatgaagatatcacattcctttatcgactggtacctgggcaagctctcttaagctttggtctgcattgtgcacagcttgctggtgttccaaatgaagtcgtccagagagctggcattgttttggaggacatgcattccaagaaacctacgaggcgcgtgaccagtgagaaattaacagcaacagacaagcagtaccaggatgcagtgactaaactgatggccttcgatacacagaaaggtgacctgaacagcttcttccaggaactatttcccgtcgacttgtagctctggaaatcaagacttgtcgccagcactggaacctagtagaggaaaaagagtgaattccatgtagcgccgttagcagctttacatgtctacttatcgtgcttgtttcagtgttgttcggatgcccatcctgtcaagctatcgcgtgaatggaacggtcagatcggtttgtagttttagcgcatactccgtattgatgtatctgaactctcgtggcttgccgcttggatttacgtatgacacaatggagcgagatgccgaggttacagtaaaacgtttcaataccttcttccttcannaaaaaaaaaaaaaana

SEQ ID NO: 93929 - DNA, 480 bp, Zea mays
  Clone ID: MRT4577_185650C.1
ggccctagggcccttttttttttttttttttcttttttttttttttttttaaacgaatgtcacatctttactatataataggagttctgtacaaaataactaaataattacatcataagaagacaaccatcccctacaactatagttgactaagagacgacagcctagacctctcacgaactcatcgcgacatccttcatgctcctcatcttgaccacagagcccatggcggcgagcaccacacatacctcaaatagcagggcccggtctatgcccgtgagatcgatggaggtgtagtcctccaatgccacgacacccaccgtgttgcgtgcctctaggtagtaccagtcatccgcctccagcatctcctggatgtaggatggttgagcgtcgagaaccctgttaccttcacggtcggtgacactgaacactgaatggctattatattgaaagcccggcccggccggcctcgaggtaccc

SEQ ID NO: 93930 - DNA, 520 bp, Zea mays
  Clone ID: MRT4577_185651C.1
gaaatctgtttactcctttcattcttgacaccgaaatttacaactctagaagtacaaggacgcggcgaatacaatatcccttttgatttttatttgggcctcctccattttcttaaacaagtccgtgtcccctataactcgagcagcgtcgcgaacctcacggcaagtttcgtccaagcgtgtgatgacgcgtacgatggtcccttccgcgacatcggttaggttggtgatttgttcgaaaggcatgcctttggcccattcatagacgacttcggcgagaccaaacttcaatttagatttcgaatcaggaacagccactttatggagatcttgaactctcccgactcgatcagcaatgcctaagacgacatcacgcccggcttcgagcttgggaggcaaaaccggctcggaatcgctcttctcttggaacacaaatcctgaaagcagggcaacaacttcttccggctcgtacgacgccaaggtggtttcaagaatgagctccgtcatgataagctcgtcg

SEQ ID NO: 93931 - DNA, 344 bp, Zea mays
  Clone ID: MRT4577_185652C.1
atacttaggtaaccttgaaatggagcctacttcattgaggccaccaacgccattcaacactgccaaaatccaaccacgaccgagaagcaaacaaacgtaaggagtcagtcacacatacgcacgcatactactatttgcctcacaaaaaaagagagcactaaagctgcacatagcggtctatatcccaaatcaggacagtccacgcgagaccaacattcctgacgtgaactgcacaatcataatacagcctcgagcgaccaatcccatccctatcattgatgacccgtgcgccattcataaacctcatcaacctgcaggcgatcatcgccatggtaaacctcaac

SEQ ID NO: 93932 - DNA, 144 bp, Zea mays
  Clone ID: MRT4577_185653C.1
cgtaggcaagggcggcgtcggcgtcaacgttaaccctgtcaggagcggcaagcccggctgttcgacggttagagccagaaagggcggagtcagcgttaacgtcaacccgtgctacagaaagcccgggggcaccaccgttggcgt

SEQ ID NO: 93933 - DNA, 439 bp, Zea mays
  Clone ID: MRT4577_185654C.1
gggaaggaaacacattttttttattttgtcacttgccagtcagtctttgcccaaattttcaagttttgggaatgtacatgcttggggtggggggggacatctgaatctggtcctcggtcaagattcaagacatgatttaaaactttgcaacaatctaatgatcagcagcgggcaacgacactcaaaactttttacgagacatccacaccacctatgcctcgctacggatgggtcatcaagaggattggaaatgctgtccaagctgcaaccaacggggggggaagtgaaacccacagccccggaaaggcgttgggcacccacgggtaggcgttcggcgggggcattacccaattgtcgccattgaagtaaactcgttttgggaaggcccaacctttttggaaggtgaacctggagggcttctttcggaacaaaagcttaa

SEQ ID NO: 93934 - DNA, 556 bp, Zea mays
  Clone ID: MRT4577_185655C.1
gccacgcgtccggcaaccggtccagcactttcaagctcaactccagcaatggctgcctccaacatggcgatcttctccaccgcgatcgccggcaaccccatcaaagttggcttcttcggcgaagggcgcatcaccattggcaagaacgtgggcaagcccaaagttgccgccttccggaaccccttgtaacgcccccaccgggtcaaataacttcggccccttttcggccaaccccccaacttacttaacggggaatttcccgggcaattaaggttgggaaaccgccgggttttcggccaaccccaagactttcccaagaaaccgcaagcttgaggtaatcaattcccgttgggcaatattcggtgcgttcggttgatttttccccaagttgttttcccgcaacgacttcaatttcggcgaaggcctctagtttaaaagccggttccaagatcttcaccgagggcgtgctggactacttcggcaaccccagccttgatcaacgcgcaagcattcctcgccatctaggtctgacagatcgtactcatggaatgcattc

SEQ ID NO: 93935 - DNA, 338 bp, Zea mays
  unsure (1)..(338): unsure at all n locations
  Clone ID: MRT4577_185656C.1
gggtggttttgcttcttacatccancataacaaggaaggacttgagctcttggacactcagagcaaaaacgctggattctccggcacggttgcgagagcgagagatggacggtgggatgttcggttatcgagaccccgccgatggcggcgctgcatcactttttggacgtgcccgacggtgactccagcgcagacggtgacaatggcgggcagagggggtaccactcgcacttacgtccgtgacgcgcgcgccatggtggacacccctgtcgacctcatggagctgtcgagtgcgttcacgttactggtggacatgccggggctgggcacggtcgaca

SEQ ID NO: 93936 - DNA, 216 bp, Zea mays
  Clone ID: MRT4577_185657C.1
gccacacctcctcccactcatcctgtcctccactctgcacttgacgaacaacacaaacgacccgatcatcttcaacgcgaagacgacccaccccacaaactacttcgaacactcaaaccactacatccccattccccagaccaacactcactttaccgatactattcacccgcaacacgactttccacccaacatgcactacatctacaccttcct

SEQ ID NO: 93937 - DNA, 393 bp, Zea mays
  Clone ID: MRT4577_185658C.1
attcggctcgagcctgctcctactcgcaaaggtctgtcagtagcagtagattctcctacttcatttcattgtggccggacaaacttcaactatgtttctactgaaaacttggacaattctcaaagcacaccaggaacgttgatcaccacaacacttcctggtgtgaatgatcaacaatcaggaaatttggaacgtatgacacttgactcactggttgtacaatacttgaaacatcaacaccagacagtaataaagttcaacggcactggtgatgttatctatgccatcctgaggcgtaatcttgatgacgtgacatcatccatcaatgctcggagggtcaggcatcctcttttccctgcattcgcacgattgatgcggtgacttactcggata

SEQ ID NO: 93938 - DNA, 1124 bp, Zea mays
  Clone ID: MRT4577_185659C.1
aaataatcttatctttcatgtccaaataaagtatctcagtaaacaatgcacaataacatttttttagtagaacgaggagtgcatggagtagcaaaacaagagccttaaaaaatctgttggctatttaaaataatagtgcatttgccacctaattttataagtgaggtggagatttatcatagtacatggatattgatcatgatgaacaatgtcctgaaagaataatttatccactggctttgctaccagaattatttgtcgtgcatgccattattttaagaaagaggaatttgtttctattgtgtttgtatccactggctttgcatgtcattaaatattgcacaggtgatcctgaattcggaggtgtgggatctgaggaagttcaagcttttgaggagtgtcccttccctggaccagacagtaataaagtttaacggaactggtgatgttatctatgccaccctgaggcgtaatcttgatgacgtgacatcatgcatcaatgctcgtagggtcaggcatcctcttttccctgcattcagcacgattgatgcggtgacttactcggatattgcaaccgtccaaatggaccgctgtgtacttgatcttgccactgagtccaatgattctcttattggggtggttgctatggacgatcaccaggagcttttctcttctgctcgcttgttcgaagttggcaggaagcgaataactgatgatgattccgatccagaggacgcaggtgaaactgatgatgactccgatgacgacgacgacgactccgatgacggtgttcttgcgccggtgctggaagggggtacagattctgaagatatcagtagcagcagcagcgatgacggtgatgaagatggtggtgacgatgatatacccagttcggatggcattgaagatgaccggttcattgatgagagacgacgggagttcatgatggatctttttggtgacggttgggacgacgatgaggcttatatgatgggatcctttagcagtggcgacgaggagggttggatcatgtaggttttgtgctgctggcctgctgaagaacatgaagcattgccgtgtacagttcaatattcatatgcttacatcatattatgaccggaatt

SEQ ID NO: 93939 - DNA, 187 bp, Zea mays
  Clone ID: MRT4577_18565C.1
gaaggaactataagtacagtttttggtatggggattaagacgagagcagattatcagagcaggaccactatgcttaaattcgcaaagttgacaaattttgctgcgagaaacagcaggctttacactattgtaccaacaaagaagctccaaccccagatttcgatatagaacgcaggtggcgccacaa

SEQ ID NO: 93940 - DNA, 2167 bp, Zea mays
  Clone ID: MRT4577_185660C.1
tcttcctaagtcctgtacctattacggctgatgctagacatgcagaaatgttgaataagacaccactgtctctgacacttaaaaggacgcttgtgtatttgaacgaaaataattctttatcagcaacgaaccgcctcgcaacaactgatcaaacctaccaaccctctgtattccaaactcctgctcctactcgcaaaggtctgtcagtagcagtagattctcctacttcatttcattgtggccggacaaacttcaactatgtttctactgaaaacttggacaattctcaaagcacaccaggaacgttgatcaccacaacacttcctggtgtgaatgatcaacaatcaggaaatttggaacgtatgacacttgactcactggttgtacaatacttgaaacatcaacaccgccagtgtcctgctccagttacaactttgccaccactttctcttttgcaccctcatgtttgccctgagcctagtcgcagccttagtgcacctgcaaacatagctgctcgtatgggaagccgtgagataagaaggcagtttagtgggatccagatacctcgtagggatcgtcattttatatacagtaggttcaagcagtgtcgggtttgccgtgatgaggcatcactattgacttgcatgacatttcttggagatgcatctcgagttgtggctggtaaccacacaggtgaattaaggatatttgactgcaacacggcaaatctcctagagacccaaacatgccacctacatcttgttacaacgatggaggcgacatgttctggtggacacgagcttattctcacatccagcctaaatgaggttaagatctgggatgccttctcggtatctgcagggcctttgcacacatttgaggcctgcaaagctgctaggtttaaccactctggaacttcatttgctgccctttctactgatacagctcaacgggaggttcagttgtatgatgtgcagacatatactcttgctacacagcttcctgataacactagcagttcggggacaggccggggttacatacaacccattatacatttcagtccttcagacacaatgttgctttggaatggagtcctgtgggatacaaggcaaccaaattttgttcatcagtttgaccagttcacagattactgtggcggtggattccatccagcaggaaacgaggtgatcttaaattcggaggtgtgggatctgaggaagttcaagcttttgaggagtgtcccttccctggaccagacagtaataaagtttaacggaactggtgatgttatctatgccatcctgaggcgtaatcttgatgacgtgacatcatccatcaatgctcggagggtcaggcatcctcttttccctgcattccgcacgattgatgcggtgacttactcggatattgcaaccgtccaaatcgaccgctgcgtacttgatcttgccactgagcccaatgattctcttattggggtggttgctatggacgatcaccaggagcttttctcttctgcccgcttgttcgaagttggcaggaagcgaataaccgatgacgattcagacccggaggatgcaggtgaaaccgacgatgacgatgacgacgatggcgactctgatgatgatgttctccttgcgccggtgctggaaggggatacagattccgaagagattagtagcagcagcgatgatggtgatgaagatggtggtgacgatgatatccccagttcggatgacattgaagatgacccagagtacattgatggtggtggtgattttgaagggggagggggcttgatggatattttgggtgatgacgaaggggaaggcgatgagagtgatatgatggaatcctttagcagtggcgacgaggagggttggatcatgtagtttttttttgggtagtgcagccctgccgaagatggagcatggccctgtacaagtcaatatttatacgctcacattatgattgtaattattatttcctggttcttttgagcagctcctgccctgctagggaaatgtggaacataatggaagatggtgtaagtaaaggtgggaagagaacaatctaataccaatcgattaaaaatctatctatctattaattaattaatttatttgtggtgtccaaaaccaaaaaaaaaaaaaaaaaaaaaaaaaaa

SEQ ID NO: 93941 - DNA, 267 bp, Zea mays
  Clone ID: MRT4577_185661C.1
aaggatcgtcgtttcaaaggacattcacgttctaatttatgccgcttcttctgcctctgaatcaacttttttttgccatactgggccgttcctattattaccacggatccgggtctaattcctagtttgaaaaagaattagcatgaatgtaaaaaggcggatcctctcctctccatcaagagtaatgaactgggttctgatacagtacaaaagaatataactaaattaaccaaacttgcctggtgtcgacgccatcaagaaagcgtt

SEQ ID NO: 93942 - DNA, 653 bp, Zea mays
  unsure (1)..(653): unsure at all n locations
  Clone ID: MRT4577_185662C.1
accttcggcacgaggcgccgactgcctctttttccttttactctccacctcaccttaaagcactcagtttcaacggttactttttttttacaaaaaagttccttacatttcttttcaaatcaactcagcgtaaaatgttaataagcggtactaggaggtgggttatattaaaaagcggtgcaggagttggggtttgaacccacaacctgatggaagaagggtgcgagacactagacgaatttctctaaccagtaaaacatgatgctcaagtgtttacaatattgaatataaattgtacatatgtatatataanttttttgtaaaaaaaaattaantcgtgtcgggccgggccaccactacgggccaaggctacggcccaagcaccgcacgtgcgctcgtgtcgggttggcccagacactattaaatggggtcgtgcctcggaccggctcgccagaaacgacccatctgtccatctgtaccttcgcacgataatgatggtcctcgcctcagttgccaccacctagttcgccattctacttcttttctctctcccttcatgcctccacctccgcatcaccccattttcggcagagggcgtangagcatgcgccttctccccgtattcatctgacactagcctcgacaccgactcg

SEQ ID NO: 93943 - DNA, 256 bp, Zea mays
  Clone ID: MRT4577_185663C.1
aattcggggcgaggatacctttactcgtgttcggacacctatttgtggtctcgtggctcaggccacacgtgcttggtatgccgacgaccgagcttaggcgcctggtccgcttttatgcacgactatactatgtgtgctcgtaaattgtatcgtgatcaacgaatctgtttcgaaagacacggcgattgtcgctccgttgtttgcctcgatctgcgaaacggggaggctaggaggcgtttgttcaggattttgacgg

SEQ ID NO: 93944 - DNA, 281 bp, Zea mays
  Clone ID: MRT4577_185664C.1
gtgcctcctccacgtactcagcgacaccttcatgtacaggcgtagacgcatgaacgccgccgaggacgcatcggtttatgacgatttaaagctcacaattgtgaaacactcggagtctgcaaacacgatgcttatcttcatatggtggattgaacattactattgcttgtctgcccgctgtaaacctttatcacatgatgctcctcatctctattgactgacaaatgacattctggcgcttgatatactctttgtgacattatatgttgccttggcttgtg

SEQ ID NO: 93945 - DNA, 234 bp, Zea mays
  Clone ID: MRT4577_185665C.1
acatgttcctgtacaatgcccagaggggggggaagaaggctctgggaatctcggcaagaggcgaggaggataggaaagggatcgcgttcaccgtcggcctggcgatgggtcggctccgcggctgcgctctgctgctcggcgtcctgctcgcaggatcactgttggcccttcgtgctgggccggtggagggcctgaagctcggcgccgcgctcggcctctatctcgctgccacct

SEQ ID NO: 93946 - DNA, 265 bp, Zea mays
  Clone ID: MRT4577_185666C.1
cgggtcgaccagcgtccggaaaaacaagcgcatcgttccactaactacgatgggcgctttccacatcctcctccgcgagattccactactacgccaattaattaatggaggttgatccatttgattttgtatatgcaccaggtgtttgtggtgcagcactagctaaactatcatgtactgtacatagttctcacacgtgagcagcacggcacacggttgttgtacgaacggatattccctgcagatacggcagttgaagtctctc

SEQ ID NO: 93947 - DNA, 322 bp, Zea mays
  Clone ID: MRT4577_185667C.1
ctcgagccgcttcggaaggtttatgatatcttctgtcgtttggcactggctgctggcttcaatactggttcaggtggctcttcagttgctaacgaggttctaatggtggtgaggaagcaggttagtaatccagacatgaagtatagacggatgggaataattggggttttaaggatagtttctactatcgcttccactgatgtcaatgctgctgtgaactgttcatcatctcagcaaccaaattgtgaggaggccctagaattgctgaagatgtctgtcaactcatgcaaatttgtgacattactcttgatttttctatatg

SEQ ID NO: 93948 - DNA, 454 bp, Zea mays
  Clone ID: MRT4577_185668C.1
catgattgtgtgttccctacattgcttacgagctatttttaataattatgtttgttaaaaaaaaaaaaaaagagggaaaaaaaaaaaaaaaaaaaaaaaaaaaaaaaaaaaaaaaaaaaaaaaaaaaaaaaaaaaaaaaaaaaaaaaaaaaaaaaaaaaaagggccgccctttttaaaaaatccaactttacttccccttccttccaacttaatactttttttttagggccccctaaattaaattcattgcccgtcttttaaaaacgtcgtaattggaaaaaccctggcttaaccaaattaaatccctttgaaaaaaatccccttttccccagttggctaaataacaaaaaggccccaaccaatcccctttccaaacatttgcccaccctaaatggcaaatggaaccccccttttaacggcccattaaccccggcggttttggggtttaccccc

SEQ ID NO: 93949 - DNA, 241 bp, Zea mays
  Clone ID: MRT4577_185669C.1
gctttgaaatttgagcaccgaaacagcaagggctgcaattatggccctccatatgagtggcaagtttatagtgctctgaacgggtgttatggtgtaccatgggttcattacaaaggtcgacaaggagattattatgttctggtgatggatattctagggcccagcctttgggatgtctggaattcatttgggcagtcgatgacacctaatatggttgcttgcattgctgtagaggcaattt

SEQ ID NO: 93950 - DNA, 290 bp, Zea mays
  Clone ID: MRT4577_18566C.1
gagtcttccaacaaatccctccttccctctccgtttccgccaccacacctctctctctctctcttcctgttgttcaagcctccctccccgcggtgcagttggaggtaggctagggcagaagctttccgccgccgacgcggacccggcgccgacacgatccgctggacccagcgcatcacaccctttagggaggccccttggacagcagtactgcgctcgctctcctatctcagtccgtcacaacatggccccggagggcgagccgcgctcttctttgccattccagaatg

SEQ ID NO: 93951 - DNA, 576 bp, Zea mays
  Clone ID: MRT4577_185670C.1
atggtgcctcctgttgacgtggctggtctacgccctaggttgggcgacgtggaagctcctccgaagccgaggttgagtctgtcttccatggccgaggttgagtccgagcccccgggtcgggcgaggcggaggtcgccggctgatgccggggcggagtccgagccctggggtcgggcgaagcggaattcgtcgtcttctggggctgagcccaagtccgagccctgggtcgggcgaggcagagatcgtcgtctttcgggacttagcccgagtccaattcctgggtcgggcggagttcaccgtcttctgggacttagcccgagtccgagccctgggtcgggcggagttcgccgtcttccgggacttagcccgagtccgagccctgggtcgggcggagttcgccgtcttccgggacttagcccgagtccaagccctgggtcgggcgaagcggagcttcctatggtgccttcgatcgggcctggccgcctgtcagcctcactctgtcgagtggcaccgcagtcggagcggcgcaggcggcgctgtctttctgtcaggctggtcagtggagcggcgaagtga

SEQ ID NO: 93952 - DNA, 287 bp, Zea mays
  unsure (1)..(287): unsure at all n locations
  Clone ID: MRT4577_185671C.1
ggcctttatgacactaacaattaaaactgtggccaaaaaacctatcccactttcanatcaggggcaggataaactttgctgggagggggcaacacaaacatttattangggtgctcatattgcaccaactgtgcctgtgggacaaccaccaccctgctcacaacatttcatacgcatctccccacattaactggagaataacatggaagaggcgtcggcttttttacataatacaatctctacggtttaagctgtgccttctgttgttcgtgcaataacaaacacac

SEQ ID NO: 93953 - DNA, 108 bp, Zea mays
  Clone ID: MRT4577_185672C.1
ggagaccgacccggactttgaaattgtctcctttcttttgatgcgcagcatgaagaggttgctgtttatcgccctctccgctatagggctccggagatcttgtggact

SEQ ID NO: 93954 - DNA, 316 bp, Zea mays
  Clone ID: MRT4577_185673C.1
ggggtgttgggggatttaaagtttagggggaaaaaaaaaaagggttgggttaccgaaaattttattcttgggggcggacccttggggggatttggaacttgggggcgggaacctgcaggggtaccctatggcgctatagcggggggtttaccaggaagttgggaacaggggcttggtgggggaccttgttaaattgttgggggtttatttttactttgggcttattggggggaaggttaattcgggggggcaaaggggcttaattagcaagcccaaaaagataaggggcggggggcttaatgggagaagcctaggg

SEQ ID NO: 93955 - DNA, 596 bp, Zea mays
  Clone ID: MRT4577_185674C.1
attctgaaaatcggaggattccaaacttcgtagtcaactcttgcccgaacccgacagatctctacttccccctaccgtccatcgatccaccttcacgccagcgtcaccctcttccgaaagcgcctggcgcgagtgattgcgagacagtaggaagtgagggatgcatctccgaccacatcggtgaaacctgcattgaatcgagcaacgcgtgctgggaactgtactgactccagcacgacatacaacctgatggacaagatgactgctagataagacctgtcgttcacatcacaatgatgccttcaacaccttcttcagcgcatgactgtgtgctgaccaagcacgctcctcgcgcagcaatcttcgtgtagatctagaaccctatgtgatctactgtacgtgcctcactggctcgtaccggcagatcttccaccctgaacagatcatcatcgggaacgatgatgccgctaacaatttcttccgtgcccactacacgattggcataggagattgttgatatgagtcttgagcgcatccgcaagtttgctgacaactgcactcggtgctccaggaattcctgctcttcaatgccgctc

SEQ ID NO: 93956 - DNA, 827 bp, Zea mays
  Clone ID: MRT4577_185675C.1
cattatgatatggtgggaatggctccacatggtgacacaaacccaaggagcccaatactggaggtgctgacattattattttttttgaaccttttccctattttgagtatatttcttagttatgttcatgtttgatactcatattgttcccatggttttcacctgatataacgtctagagtatgccgtctcttatgaaatgcacttggattctaggcttctcgcttgttttgaaacaaggataattacattctggtagcattaggttactgaattactactataggataacacattaagtctgcagtatttttttcgcataaaatggcatttaccactctgggcttaaggctgcaaacttgacaatgtaaatcctaacacttctgtttgctagtttgatatgctaaatattgttatcttaggttattagcttgtgcaattagttattgatgcttcttagggtctcgatttgtccagctcagacaagcattataatgtgaatcagccaagaggattttgtcctgtttgccgcaaagtgttcgatgagaaggatattgagcatgttcgtgatttgttgggtgacaatacttccaggctggtatgtatcagatatgattcatgcacaattcctgcttttacatgcattggcaatttagtttcaatccatctaaatattgatcataatatttgggggctaaatcaccattgtccttcatgcattgtcactataatctatgtcaacgacacccacagtaactctttctgtgtttgcctgttcacctttcagcatcactacagttgaccttggtgaagatgaaaaggaattgc

SEQ ID NO: 93957 - DNA, 312 bp, Zea mays
  Clone ID: MRT4577_185676C.1
gaggatcccctagcatggaacagctcccgcgactacgctgcgcgtttgccgaggtcaagatgatgcgtacatgactgctctcctggttacgtgtcaccctgccactccgggccgttgcgaaagactggggcgctctacccgcatgaggtgaaagaggcctccgatacataaacgagcaacccgcacccgctcccggttccggtggagatcatcggtgggaagcctctgtccctactaacgacaagcatcacggacgtttagatccatttcccgcagagaaagtatgtactgcattatagtctacctccacca

SEQ ID NO: 93958 - DNA, 291 bp, Zea mays
  Clone ID: MRT4577_185677C.1
gttttaggataacagcatttcattgcatatgtggataagttctagaatattggctacacatataatcattttctataatgcatatgcattacaaaagttttctagctcctgaagtattatggagtttactagctccataatacataaatgttctacggataaacgtaatattctttctttttcagtactaaaattaattgtatatgttctctgaccactccctgtctgaaggagctaattttagtttacctctcttttgaaacagctttgttctggtattctggtgtaaca

SEQ ID NO: 93959 - DNA, 196 bp, Zea mays
  Clone ID: MRT4577_185678C.1
acccccatcgggactattattctcctggggcctagcaggtttcgtgtaactgcattctattgatgggaaaggctgctgcggagctactcaaggccgagatcaagatgccaccttatggcgctgcgttacaacatccagggcatcacgcactccaatagatcctgacgcttcggccagcgatgtagatgtgtccatc

SEQ ID NO: 93960 - DNA, 961 bp, Zea mays
  Clone ID: MRT4577_185679C.1
ccggccggtaagttcacgtatgtacgtagctacgtgtatgctagctcaatttcatttgatgcagaaaaaaaaaaaaaaaaaaaaaaaaaactcgggggggcaaacattctcgacgacgacaggtgctttcatagacgccgatgcacccgtcaccgtgcaagaaaagaaatctacaggaagactctcagctcgccggtgatcgagtggcatggatgtgccaaacgcaagcgtggaggccgagccactgctcgtgccacgcagctccaccgaaggtggctcggcggcggcaaccgagtcgaagagactgctccggctcgctgggccactggtcctgagcttcatcctgcggaacgccgtccagatggtgtccgtcatgttcgtcggccacctcgggaagctccccctcgccggtgcctccctggcctcgtcgctcgccaacgtcacgggcttcagcctggtcgccggcatggccggcgccctcgacacgctgtgcgggcaggcgttcggggcgcggcggtacgcgctgctgggcgtctacaagcagcgctccatgctggtgctggcgctcgccagcctccccgtggtgctgacgtgggtgttcgtggagcagctcctcctggccatcggcgaggacccggacatcgccgcggaggccggcgcgtacgcgcggtggctgatcccgtccctcgccgcgttcgtgcccctcacctgccacatgaggttcctgcagacgcagagcgtcgtggtgcccgtcatggccagctccggcgtcacggcgctcgcccacgtcctgctgtgctacacgctggtgtacaaggtgggcatggggagcaagggcgccgcgctcggcgccgccgtctcctacagcgtcaacttggccgtgctcgctctttacgtcaggctgtccagcgcttgcaagcagcatgggacagggttctccaccgaggccttctctttctct

SEQ ID NO: 93961 - DNA, 834 bp, Zea mays
  Clone ID: MRT4577_18567C.1
ttcccggtcgcccagcacagtcatcaaccacacacactcacacacgtctcaaactgacggcgacgatggctgtggtgagcaggaagacgtcgacgatggtggcagcagtggccgtggtggtggcgctgctgctggcgtcggcgtcgtctgcgtcggcggcgatcacctgcggtcaggtggggacggcgctggcgccgtgcatcccgtacgcgacggggagggcgagcgcgctgccgtcgtcgtgctgcagcggcgtgcgcagcctgaacgggcaggcgcgcagcagctcggaccggcaggcggcgtgccggtgcctcaagagcctcgccaacagcgtcaagagcgtcaacatgggcaccgtcgccaccatccccggcaagtgcggcgtctccgtgcctttccccatcagcatgtccaccgactgcaacaaggtcagctaaatgatgaaatctaccacgtaagtacataccagtgcacgtgatgaagctagcaagccaggaaaaataaaataaagttgtgtggtaacatacaggaggattaatagcatgctgtatctatatagtattatgtaaccgtgtgcatcatgcactgtgcacatatacatggatatatatatatatatatatatatatgtatgtatgtgtggcttgcagtgcgacctagctagcttctcgatcatgatgtgctcatgcatgtatgcggatgatgtgtgtgtgtgaacagctactacactgttgactgttcagtggcttggatcgacctacttgttcggatagttaatggtttgctatatagcggtgcttgttaatcaatatgccactctctccataaaaa

SEQ ID NO: 93962 - DNA, 593 bp, Zea mays
  Clone ID: MRT4577_185680C.1
tttgggtttatcacccgtccggatggcctcgagggcgatcctcttctgcactggcatggcggttgtgctgttcaccacctacaccatttttaaggcgtggggcttctccgtgttcggcgcgcacggcgagtacatgattggcgcttcatgtacgtggcgctcatgctgttctttctactcgccttactttggcactccctgtccatctgtttcctcaaccaggccagctttcatataaacaccatggtctgactattcttactcctcctgcgactacgacgccgccgtgctggggctctcgttgacggccacctgggactacatttgcgacgtactggatcgcggttttaccctcaaccttgttggcaacaggcttttctacgcctgtgtgcccctcctgctctggatcttttgcccgctccttgacttcctgtcctccatggtgatggatctcattactttcagcctcgacgtactaaaccttatgggccacaacggatgcgtctctcactgaggcaaatctgcggtgattaaccgttggagcgattgcgcgcttgccgattgagagctgccgacttgtgttctcacaaacc

SEQ ID NO: 93963 - DNA, 374 bp, Zea mays
  Clone ID: MRT4577_185681C.1
accaatcataccaagtgcgatcacccgttgatccattttgcctttatgcctgcgtggcctccgctcttcgtcttcgggagcccgagcacgctccgggcggccccggcccaccacatcacgttggggtggagatgaaaacggtcgactgcgccgttctcgtcgccgacgcctacgtcaccgggggcctcgacgtcgaggtcccggcgcccgacccctccagagcctactcgggcagagtacccggccgtgggggccgcgctggtggaccgccgggtctcccttttcgattactacctgcggtgacacccaaggacgaccgctgggcgagggggttggctgccagcgtctgtacctgggcgaacgccgcatatata

SEQ ID NO: 93964 - DNA, 410 bp, Zea mays
  Clone ID: MRT4577_185682C.1
cctcggtttttttttttttttttttttttttttttttttttttgagcctttttttttttgttttgctatggcccttctgttaaattacaaatactgagtctcatacatagagaactgaacttggtcaactgggtatctgataaacagaggtccatacagattactactaagtagaccaagaaaattcattagtggcgcatcttttcttaaatcagagctgatattcatcctgcaaagcatcaaatcgcaacacaaccaacttcttacatctatctttcactcccagggtgcctaacaagttctgtttacatctaactatacaaaaggccatccaaagctcattagtctccctgacttaaacgggtggatgcttcctgaacctaattttgttgtcccataagaaaccaccc

SEQ ID NO: 93965 - DNA, 396 bp, Zea mays
  Clone ID: MRT4577_185683C.1
gaatcaaatgattctttatcaggctctcaagttcaatagaaatgatattgtaacagctcatcagacttaaatatcaggcatattaaagcatctgcacatagagaactatgcatagcattcgaacggtgaagaatgcgataagcaagagcagggggctcaacgtgttgctccagcgacccatgagccccagagcgaaggggttgagatgcaccaccacatacgcgttgaacgccaaagcgaacaccgccattgggccatcccttcaacgagccacctttcatcgctgcaacattggaccgtcggtttcaccgctagcaccacggtcgtcggtaccatcagcaccgtccaccttcacgggtgtaagctcaacgaacctgttcttttacaactggcaac

SEQ ID NO: 93966 - DNA, 542 bp, Zea mays
  Clone ID: MRT4577_185684C.1
gcgtgggtatatacagaggcctgaatgtgtttatcaattgaatggtcgcgttgcaatatatgggcgaaaactgacaagctgattattctaatttatgaaccacagatagacgggcatattatcgtgcctgtcttagctgctacatgcagactgataatccttgggcatctattggagctgagcaggccacattgcatgggttcatggctcatcctaccgacgccggactaaaataaaggaggctacttgtacctcatggatgaatgagactgtacaacagggcccgcgacggcgaggcgctcgtgctatatcctgcctcaaggacgtgccgaccaacttcgatcagacgctggtgaaggccctcgttcaccagcccttctgcgttttcagcgaggcgttcttgaggcactggccgttttacagcgggggcgtgttcgatggaccgtgcgggtcggagctggaccacagcgtggcggcggtgggctacggcagcagcaaggggcaggactacatcatcgtcaaaaactcgtggggcacccact

SEQ ID NO: 93967 - DNA, 284 bp, Zea mays
  Clone ID: MRT4577_185685C.1
tttacaactttgaagaagagttacagtgtttatgtgagcctcgatcatgtttttttgcttctgaaagagaaaaaaaaaaaataaaacatgataaaaaaaagagggggagaagaaaaaaaaaaaaaaaaaaaaattccgagatgggagagacgaacaaaaaaagacgagatcctatatgcggaacgttataaagaagaaaaataaaaatacaaggggtgatcccgggacggcagcaaaccctgaaggggtgcaggggtcgccccccttccggttggcccttgttt

SEQ ID NO: 93968 - DNA, 185 bp, Zea mays
  Clone ID: MRT4577_185686C.1
tacgggtgattgcctaaatctccgctggctctcacagatttgaattcacctctctgtcgtgtcatgctgtccagttgggtttgctaagtggagcttcatcttactcacggttgacttctgtattcattaggcagctattcgagttttcacacttgacggcgtcgtaatcaagaacacacattcag

SEQ ID NO: 93969 - DNA, 234 bp, Zea mays
  Clone ID: MRT4577_185687C.1
cgaatagacagaggtggtttgatctcaacttttgcgatttgctctacataaaaaaagaaactttttgcggaaatctatgtcggctggccactatattccttgggaacagctctggaccctatgatcggaccctggtggttttcatcagaaagacaaacgatggccctactatttgtgcggggggttttccttacttattcccttgcgcattgttcatgcggcaacctggggctg

SEQ ID NO: 93970 - DNA, 296 bp, Zea mays
  Clone ID: MRT4577_185688C.1
gggacttcacatcagttctccttattgattgttagcttgatgcctcttgttctcttgttgtaaacattttctataattaggaaatgccatttaagagtgagagaggtatatatctatgagccattgtgtttggtgatttacaagaactttaccatactggagtgtagtccattctgtacagtttagaagtgattcacgatttgcaggctatttatcagatcacaaataaatcagtctttaagcatttgcttggtaaggtttcttaagattaggtttataatacaaccatctgtaat

SEQ ID NO: 93971 - DNA, 298 bp, Zea mays
  unsure (1)..(298): unsure at all n locations
  Clone ID: MRT4577_185689C.1
cccacgttttcggngacgcntgggccgacccgtgccgactttctaatattctatattaggagggggggctcctatcgcgtagaatggttccactactatgagcatcgtagcggtatacggatggtttgcaagcatgacaataattcgggcacgatatccgagatcttttacaaggtgtttgatagcatcaagcatgatgaagatacgtgcgcggacgaacagaacgacaacacccatatgcacgcgtattaggacaatgtgtgggagctcaacgccacggccagacaagcccgggaca

SEQ ID NO: 93972 - DNA, 2334 bp, Zea mays
  Clone ID: MRT4577_18568C.1
tgctcagtggaccttctttacagccagcgcgcgtggaggcctcctctgagccagcgcgtggagctctcccagacgggcgacggccgccctcctcagccggctgcccacaacagtcagccgaccggcacaggcacatcttgacagagacaaagatatgcagcttcaaactgtttgggcaaaacttaggcgtaatgaagtcaacaaagatgatttcttaagagttatcaggaatattgttggggatcaaatgctcaagcaggcagctcataaagtctttgtacagatgcaagcacaggcgcaaagaaatagccaggcaaattcaagtcagcagtctttattctctcaactttctgcacagcagatggcttccagtggttcagcacagttacatgatcagaaaattcggccacctggaccacccaaccaaggccagaaaaaccaggtgtcatcttcacctcaggcttttgcaccaccatcaggcacccaaccgcagaatagtgtacactatcttgctcatgataaccctaaccaaaaccctgatgcaaagggaacaaatgttgtaccaaatcaaccatctagaatgaacacatcagttccattgcaaacaaagaacaaacagcatcaaccaacacagttgcagcaggcctcacaacaaatatatggagcaagtaatcctggtgcccaggcttaccctcggtcaatcactggttctcttagatcaccgagtcctgttccagaaacacagccatccatgcatgctcctggaatggctcctgcaaaaatggttcctcctcctactcatccaatgatgcagcacaatgcaactgcatggcaaatgcatcaaaacagggaattgaaaactaacgctccccctccaaatgctaatatgaagcaaaattctgaatctgttggcaaagtacgcatggctggcacaggaaattcttcagctaaaggaaagcagggaactcctaactctacaccaaatgctagtggaggtacaaagagtagcaagaaatcgggtgggcagaagaaatcattggaagcagcaggctctatgcaaccttcaagcaaaaagcagaagacatctggaggctcccaggaacaaagtatcgatgaactaaatgatgtcacagccgctagtggtgttaatattagggaagaggaagaacagttactgtctgcccctaaggaagagagccttgcctcacaagaagcacgaagaattgcaaaggaagaagaagaaaatcttttcctacgtaagggtccacttctgaggaaactagcagaaatcgctcggaaatgtgatctgaaaaatattagtgacgatgtggaatattgtttatcaatgtgtgtggaggagcgattgcgacgactcataagtactctcatacgagtctcaaaacagagaatcgatactgaaaagaccggacatcgactagttattacttcagatgttggtcgtcaaattttacagatgaaccagagagctaaggaagaatgggataagaaacaagcagaagaagctgacaagaacaagaaacaaactgaggctgatggcagtggtgctacagaattggaaaaagaaaaagaagaaagtcgcccaaagaacgtcaagcccaacaaggaagaagatgataaaatgagggcgaatgctgcaaacgtcgctgcccggcaagcagttggaggaagtgatatgctctcaaagtggcagttgatggctgagcaagccagacagaagcgagaaggcattgatgtgtctgctgcttcacagccaggcagagggccaggttccaggcaattatccaaatttgggaaaggtcctggtgagcacccagaaggttcaaagaggagccattcgatggcattcggaactggaggcatgaaaagacccggcaggacagcgtttgctggtccacagcgattgatctccgtgaaggatgtcatttgtgcccttgagagggagcctcagatgacaaaatcaaggctaatctaccggctgcacgagcgattgcctgtagattctaccgtagattagaccggaatagtcatatactttattgtgggcatgcccaattgcccttgcatggtattgaacagcgaagaagcatacccgccactcccatttgttgtgctttggagcggcactgtatattggtgtaaaatttgtatcgcaaaggcggcgaattaccagcaaaaaagggtttctgtacaaaattcactgtaagcggggtctggcatttgccttttctgcaaccacgtctgtgaggttatttctagcagactactcatctcaatatctatatttttaagggttaatttgatttttgccattac

SEQ ID NO: 93973 - DNA, 506 bp, Zea mays
  Clone ID: MRT4577_185690C.1
tgctacggctccggggcaattggcggtatttttgcccccatgttgggcattgcttccattgtcagtgtagccatggcgagacatttccatttactctttcccagtcaaattcctgaacccgctgtaatggcgatcgccggcatgggagctttagtagcggcaacggtgcgagccccattaactgcaattctgttaaccatagaaatgacggacaactattttgtgattttgcctttgttagttacctgcctagtggccagtgtggtggcggaagcattggggggtaaacccatttatacagtcttgctagaaagaactttagctaaacaaaaccgtggctaagatttattgtcttgaccccgattcttttagcgaaggaaaatctggcctcccctttgaaccttgggtaaacccgtggggtctaaacccccgtaaccgccaaagaggtaggttttgttggttaagcccttagtcaatccagcggtagaagaaaacgaagctagcat

SEQ ID NO: 93974 - DNA, 564 bp, Zea mays
  Clone ID: MRT4577_185691C.1
ttttttttttttttttttttttttttttttaattttttttcatttgggttatgggtttacattcattcccttttttaaccacaacgcccccacaaaaaaaggcacataaaaaaaaacagggtgcccaacacaccccagaaaacaaaaaatcgaacgcgaaaaacaaacccggcaatatccaaaacaaaacccgaaggcgtaccacctgcacctaaagggagactccttaaaactcgaccgaaaaaaaacacatagccctttaaaaaaaaaaaatgttatccgctcccaaatacacaaaaaaacccaaccggaaccaaaaaaagaaaacccggggggcggagggagggaccaaactcacaccaattggggggcactcaatgaccgacataaaaacagaaaccccccatgcccggtggaaaaacaaacaccccaacccccagaaaaaaacccttaacctattgatcacaaaggtggtcttcttccccacaaagaaaaagacacaaatgaattgccgttaccccctgtcccccaaaaaaaaaaaaaaaacacaaccccccttacccc

SEQ ID NO: 93975 - DNA, 258 bp, Zea mays
  Clone ID: MRT4577_185692C.1
tattagcttaattgcatgcatgcagcatgagatatactagcagtgatggatcgtcacacgctgcagaccctgtcaccgattcttaaactgcagacgatagaacttacatccatgcactagtggtagagatcctcatacctgacgatgtatgctctgatgtacttctacaaactcgcgtgtttagcgctacgggccatcctgttgtcaacgtttcagcgatgttggacatttttggtatgttaccacgctatactgtca

SEQ ID NO: 93976 - DNA, 442 bp, Zea mays
  Clone ID: MRT4577_185693C.1
aggtaatggtcaggaattcccgggccgacccacgcgtcagcccacgcgtccgcccacgcgtccgcccacgcgtccgcccacgcgtccgagaacctccgcgtccgcgtgtacaggccgacgacgccgccgggggcgaagaagaagctcccggtgctcgtccacttccacggcggcggcttctgcctggggtcgtgcacgtgggccaacgtccacgagttctgcctccgcctggccgcggaggccggcgccgtcgtgctctctgcgggctaccgcctggcccccgagcaccgcctccccgcggccttcgacgacggggccgggttcatgcgctggctccgggaccagtcagcgatcggcggcgccggcgcctcggacgcctggctcgcggaggccgctgatttcggccgcgtgctcgtcaccggcgactcggcgggcgccacga

SEQ ID NO: 93977 - DNA, 781 bp, Zea mays
  Clone ID: MRT4577_185694C.1
aaaacaggagacggggattccagagagccccgttcgggtagggaagggaaggagaggcgaagcggaggcgagatgggggcggccgaatccgtgccggagacctccatacacgaattcaccgtcaaggattgcaacggcaaggaagtgagcctggaaacctacaaggggaaggtcctccttgttgttaacgtcgcctccaaatgtgggttcacggagaccaattacacgcagctgacggagctttatcagaagtacagggacaaagacttcgagatattggcattcccttgcaatcagttcttgcgacaggagccagaaggtgcgcgtaaacggaccagatgcggcgccggtttacaagtttctgaaagctagcaagcctggtttgtttgggtcatcaaggatcaaatggaactttaccaagtttctggtggacaaagatgggaaggtcatcgagagatacggaacctcgacagctccaatggcaattgagaaggacatccagaaggcccttgaggaataattttttgtgagcttgtctcgtctcatccaccacacacttgcagcagaaataggcacttgctgaaatatttcgtcgtagtaacattcagaccggacgtctttgcttatctgtagtaaaaattctgtgtaatgttaccctccttttcgccttccgttcgtgtaaagtagagggtgtattaagtagccatcatctgctagcttttgccctttctgtgtgaagaagtgaagacatggtatattgatgcaaaacttaacgttggtg

SEQ ID NO: 93978 - DNA, 2395 bp, Zea mays
  Clone ID: MRT4577_185695C.1
ggccagttatcctgttcgctaccgtgatgtttaccctagtccagagggtttatcttcgttcgtctcgtttgttgttgcccatctgtgtttttgattgcaaggtcgctctgtgtcagttgttagtgctgtgttcatcctcggctccagcagacccatgcatcaaccagcatggactgtggatcggtggatgctgttactcctgtcaggatttgttctaagttaatcctaaggaaaaaatggtgcttcttggtgctgcaaaaaaaaaaaaaaaaaaaaaaaaaaaaaaaaaactggaacaaaaagaaaaaaaacacgagaaaaatcaaatcaggagacggggattccagagagccccgttcgggtagggaagggaaggagaggcgaagcggaggcgagatgggggcggccgaatccgtgccggagacctccatacacgaattcaccgtcaaggattgcaacggcaaggaagtgagcctggaaacctacaaggggaaggtcctccttgttgttaacgtcgcctccaaatgtgggttcacggagaccaattacacgcagctgacggagctttatcagaagtacagggacaaaggtctgacatttgcctgacgtggttcttgatgtggtgcagcgcctgaaatgtgaagctctttggatttcggtgcaatgaggtcgggcgacagaggccaggtactgatcagcagatacaagactttgcttgcaccagatttaaagctgaatacccagtttttcagaaggtgcgcgtaaacggaccagatgcggcgccggtttacaagtttctgaaagctagcaagcctggtttgtttgggtcatcaaggatcaaatggaactttaccaagtttctggtggacaaagatgggaaggtcatcgagagatacggaacctcgacagctccaatggcaattgagaaggacatccagaaggcccttgaggaataattttttgtgagcttgtctcgtctcatccaccacacacttgcagcagaaataggcacttgctgaaatatttcgtcgtagtaacattcagaccggacgtctttgcttatctgtagtaaaaattctgtgtaatgttaccctccttttcgccttccgttcgtgtaagtagaggttgtattaagtagccatcatctgctagcttttgccctttctgtgtgaagaagtgaagacatggtatattgatgcaaaacttaacgttggtgaagcatgtatgatttgacgctaataatggttttcttgctactaaggccggctgcagtagtctatacatagattaacaaaaaacattgttttgcactgtagactgtattgttcgcagagtggagtttaattataggtatgggcatttgtatgctacttgaggcagtctaaggcatcaagtactgtacccacttacacttgcagcaaatttgctctgttgtgaattcagtatatggctatcaaacaatcccattgtcttttgcaactatgcctgtgtgtactttgattcagtctgcgcttgatattccattgaaatggttttattctctagatctaacagaaactgattttacttccaatcttgctagacttcgagatattggcattcccttgcaatcagttcttgcgacaggagccaggtactgatcagcagatacaagactttgcttgcaccagatttaaagctgaatacccagtttttcagaaggtgcgcgtaaacggaccagatgcggcgccggtttacaagtttctgaaagctagcaagcctggtttgtttgggtcatcaaggatcaaatggaactttaccaagtttctggtggacaaagatgggaaggtcatcgagagatacggaacctcgacagctccaatggcaattgagaaggacatccagaaggcccttgaggaataattttttgtgagcttgtctcgtctcatccaccacacacttgcagcagaaataggcacttgctgaaatatttcgtcgtagtaacattcagaccggacgtctttgcttatctgtagtaaaaattctgtgtaatgttaccctccttttcgccttccgttcgtgtaagtagaggttgtattaagtagccatcatctgctagcttttgccctttctgtgtgaagaagtgaagacatggtatattgatgcaaaacttaacgttggtgaaaaaaaaaaaaaaaaaaaaaaaaaaaaaaaaaaaaaaaaaaaaaaaaaaaaaaaaaaaaaaaaaaagggaacacaaggccacaaaatcgagaatcgctaatagggggtaaattgtggactctgtgagacagtgacattacctgttacctgtgagaaaggggtatccggtcccatgtgcacacaagatcgggggcgcgaagcataaaggggaaagcccggagtgcccaatgag

SEQ ID NO: 93979 - DNA, 1489 bp, Zea mays
  Clone ID: MRT4577_185696C.1
tttctatttctttctccaacaaatcaacaattaatactccactacggtcgctcttctcccctcctctcaatttgcgctcgtgctctgcttcttcggctccaaggagcggcgaccattgctcattgatggcgatggagggacctgttttctgccgtcctgcaatgcaagcgaaactgcctgctgctgcgctgatcaacaactccctgaccaaatccgggcagcttgggactgcattgtttggtgccatttcaaaatacagaaacatttcaagattcatttctcccatctctcaaacatctacgaagaacataggtccatgctgtagcttcagctcgtcttctgatggtaatggatacatggctggaaactctagcgagagtgatgaagactatgttaattctactgtgctagaagcagttgaggtgagaagtggatcagaaggatatgtgataaagatgcgagatggaaagaacttgcgttgtgtccatagtaattttcaagggagaaatattccagagaatacaccacaacctgctattgttttgaggattgaagatggaagcggaactttactcccgatcattgttttggagatgccaagcgttcttctgatggcagctattcgtaatgtccacattgcacgaccgaccatatatcaagttgtcaaggaaatgattgataaaatgggttatgaggtaaaacttgttagggtaaacaaaagaattcaagaagcctactgtgctgaactttatttaacaaaggtcaatgatcctacagacaacatcaccttcgatcttcggccttcagatgccataaacattgctgttcgttgcaaggttcctgtacaagtccatagaagtcttgcatacagtgatgggattagaccagtcgagccagcaagaatggcagtaacagctggcctatcagatgggttgttatttacagagcttgacagacctgatggacagccatgtgtggaggctcaagagtttggactggtgaggaacatgctcattgcagctatcgaagagagatacaaggatgctgcatcatggaaggacaaactgattcggctcaggtctaagcgggagaactgggcctgagagcgtcgcatgtctggatggtgtaaataaagatgacgctcagctgaattccagtatgcactccagacaattgatactgtttatggctctatgtaactagctgtacatattgtaactagctgtacatattgtacgtactatgctcaggtctcagctaaattcagactaagatttgaagtgaaaaactaatccttttgtaatcttggccgtattaatttgtatgttagtctgttaggttgaatgtttggcatgaatttttagctcatcgacctgcggtgagatatgcagaatttcggttgtacacggaactaagcagcgctaatattttcacaggctgctgttaagaagagagattgctgctttgtttcccattacagggaacgtac

SEQ ID NO: 93980 - DNA, 179 bp, Zea mays
  unsure (1)..(179): unsure at all n locations
  Clone ID: MRT4577_185697C.1
gcaagaagaacgacgncgcccgcggcacngcacaacggcncagncgaggcacccaangcggaccggcaccagngagaagaggcggcaaanangggccggcnccggcacggcccgggggggacnacgagcacaggcgcancgngannaacaagcncggcgggagggcgccagcaagcaac

SEQ ID NO: 93981 - DNA, 356 bp, Zea mays
  Clone ID: MRT4577_185698C.1
atgtcttgtgtcatttatctgcagcaaattcaaaacccaaatgcaatcatgattgcgaggacaactttggcataggatgacacaagtggtgttggcataacctccactgtgttttttgttggggagctaatgaagcagggtgagtggtgcatcgataaaggtattttttatttgttctgtgaacatatctaatcttctttggtttgtgtattgattttattttgtgatttatgaaacttcttttattggtttgaggtaacatggtgtcatttagaaaattaatgcacaacctaatttatacccctgtcgggtgattttctttggttacgcttttcatttttgttaggtctggctgc

SEQ ID NO: 93982 - DNA, 564 bp, Zea mays
  Clone ID: MRT4577_185699C.1
ctgggaggcaccatctctcatcaaatcgacaacgctccaacatttgcaatgaacaacacagtttaccggagtgcggccctgctggaatgggttacaattttcccgctcgaaccgggtctgtttgtctttctcctctccatggaagaaccggtcagtgccatgacatcagcgaaaacttgagtcatttctttgaggataaccagcaggtcgagaacaagctggacgcagcgccgctggacgagaaggtcaacaccattattcgccgcggcacaaaagattaatatctcctcaatcttcattcggccccctaagtgctgcatccattgatacatcgagatcccccctatatgatacgaatcgactttatacgtgacctatacctataacctctgggggggatgcgtgacccatatctcattttacgacattagagtcctagctatactcgggcgttgtattgcatacatgcagcagataaaacccgggcttatcccactataacttgcgggtagcatgtcccccattatatatcttactattactaaatataggaccaatgctact

SEQ ID NO: 93983 - DNA, 491 bp, Zea mays
  Clone ID: MRT4577_18569C.1
aatcatcactgtctgcaaaattggatcttctcttcatcacatcctctgcattccctccctccctccctttagatcgatcgatccgcgcaattggattggattggattggcatccgcagagaattgcgctcctctccgatccgatccacgcagtcgcaattgcaattgcaattgcaattggagggagccgtccgtcctggaccgccggccggccattgctcaactggatccgccccagcagagcggagcagagcagtttcagcaggcagggaggcggcatcaggccggtgaagcagtatgatgatggggaccgatgtgtgttcttcgcggatgctgtcgctgccccgttacgagagcggcgacgaggagctcaccgtgctgcccaggcacaccaaggttgtcgtcaccggtaacaaccgaacaaagtccgtgctggtcggcctgcagggtgtggtcaagaaggctgctggccttggaggatggcactggctg

SEQ ID NO: 93984 - DNA, 321 bp, Zea mays
  unsure (1)..(321): unsure at all n locations
  Clone ID: MRT4577_1856C.1
ctactccagagcgcagaaggaacgcggtcgacagcaagagggcgatggtcgttgacctctttctgctggctctcactgcgagcgccacctccacgcatacaatcggcggttgctagttgtcagccagcgctttcgactcatgtaacttcgtcggtgcatctggcagctccggtccacctgagannnttngtgcatcttgacacgactgataagctggtagccgcggtcacagctgcatcggcagtccatgtcccggtnacggttcatcatgacgacgaaggatgtcactatgctaatgaaccgatcactgcacatactcat

SEQ ID NO: 93985 - DNA, 618 bp, Zea mays
  unsure (1)..(618): unsure at all n locations
  Clone ID: MRT4577_185700C.1
gacgtttcagnatcatttctcccatctctcagccatctacgaagacataggtccatgctgtagcttcagctcgtcttctgatggcaatggaacatggctggaaactttagcgacagtgatgaagattatgttaattctactgtgctagaagcagttgaggtgagaagtggatcggaaggatatgtgataaagatgcgagatgggaaaaacttgcgttgtgtccataacaattctcaagggagaaatattccagagagtgcaccccaacctgctattgttttgaggattgaagatggaagcgaaactttacttccaatcattgtttgtacgtaaatcttttagtttgatttgataatttggaagtaggaacctttaattgacattaatgcatgtccaccttctcaattttctcagtggagatgccaagtgtacttctgatggcggctattcgtaatgtccacattgcacgaccaaccatatatcaagttgtcaaggaaatgattgataaaatgggctatgaggtaaaacttgttcgggtaaacaaaagaattcagaaagcgtactgtgctgaactttgtctaacaaagattgatgattctacagacagcatcacctttc

SEQ ID NO: 93986 - DNA, 837 bp, Zea mays
  unsure (1)..(837): unsure at all n locations
  Clone ID: MRT4577_185701C.1
aaaaagaactttgcgtgtttcacagttttatgatctgcattcattcacaggaatcacaaaagtacgctgttgttatgttctaccagcaagtcatatgttccttaaacaacacacatggacaccttccgtatccgtttcacagcacccaaaatgtatatatgttgcaagcactccaacacagagatgagagaataaatatgctacagacacagttaatcaactatacaatgctgctctgcagcaccaactgatagacttagcctcacctacctgtcatgtcagagtagggcgtgttgggacaatttcaattgtcagcacatcagactacagctgctagtggtttcatccgcaattacaattgtcagcacatcagactacttggaacagtgaaatttggcgggaggagcacaggtgacacagcagctttaacttgcagaagtcttgtgtggcgatgtctgggtaaccacacgacatggaggacttgaaggagctacgcttgcgcttctgattagtctcagacgcaagtgctcttgtagtcttcacttctcgcctatcaggtgtgacctgggaagttcttgatatatcctctaaaggtagccattcggacttagattttctgtttgccttattagcatccttcttcaacatcctccgtccttacttctagtgaacttgctcattgtagcatctacgacttacataatgctcaccaaaatgcaaggtttgcagctcatcctcaanaatgagacctctggttggatttgacacttatttgaatttatcaatttcaccatccttcttttggggctgcgttgcagtcatctacattctgagaaa

SEQ ID NO: 93987 - DNA, 1002 bp, Zea mays
  Clone ID: MRT4577_185702C.1
tccgggtatggataaaatatatatatagtaatggtcctcgaatttggtatgccgtgttacttagattctcaaacttagaaaactaggaaaacatgtgctggaacttggtggcccattcaaagctgtccaatatcaaatttgcttgaaccagatgccaacatagtgtgccacgtttagagtcatttggatccctaaactcaacatgttgtgtcactttagatccccgaacttggcatgttgtgtcatttgggtccataaacctttattactgtgctccaacatggcacgttatatccgcgtccagtttaagcaaatccagttttaaacagttttgcacgggccgaccaagttacctaacctgtttttctgagctccagcgtgccaaattgaaaggactatatatatatataagcaaacacctttttcttcttatatatatagccatgtttgtaaccaaatgtcctttttcctttcctttacatacgtatctaattaaatccccacgtgtaagtgtactgctaagtaagtagagtatacttactcttcgatttggaatgtaagcatccattatgtgtaagagatattatatataagtgtgtcgcgcgcgcacgcgcgtgcaagacctgtgtaaaaaaaaaaaaaaaaaagcggccaaaaataaaaaaaaaaaaaaaactgtgctccaacatgggacgttatatccgcgtccagtttaagcaaatccagttttaaacagttttgcacgggccgaccaagttacctaacctgtttttttgagctccagcgtgccaaattgaagggactatatatatatataagcaaacacctttttttttttatatatatagccatgtttgtaaccaaaagtcctttttcctttcctttacatacgtatctaattaaatccccacgtgtaagtgtactgctaagtaaggagagtatacttactcttcgattgggattgtaagcatccattatgtgtaagagatattatatataagt

SEQ ID NO: 93988 - DNA, 384 bp, Zea mays
  Clone ID: MRT4577_185703C.1
tattgaatgatttcatgaagaatgataatctaatgcatctgcttaatctctaagattatgttccaacctattaacacaaagatccagattgcattcttgattgtgatcacccttgcgagatgcttattgaatcatgtaaaaagctgcacatcatgaaatgtaccgaagccattgaactatcaccaagagctatggacaaatgcaacattagaatctccagttgatatcttttaataaggtccacaatattactatgttgatagcatagccagcatccgatggttatttagcacgtttactttgttactactttattatcactggtatttaaaatcatatattgtcctttttttattcattttaggaacaaaaaaataaactttt

SEQ ID NO: 93989 - DNA, 338 bp, Zea mays
  unsure (1)..(338): unsure at all n locations
  Clone ID: MRT4577_185704C.1
ttttaatggtntatttntatgtgtgtgtaaaaatttactttaaagcccactaaaaacaaacacaagcctacacacatacatataaagacctgccaaaagctcgacgcaatggtgaatggttatttcctgacttaccatgaccacaccaaattcaaatcttagcaccacgatcccccggctcgtcgccccatcttgaccggcaaaacctcattatatactcctgcgcctaacacccgctgtccctcgcggcggcggtgtcttaagcataactgtaaaatacccggcacgcctcctttaaaaagcgccaatacaccgtgcctcttcacatggcccgcgtc

SEQ ID NO: 93990 - DNA, 587 bp, Zea mays
  Clone ID: MRT4577_185705C.1
cacgtgaagaggtacattcagttgtcgtgagcgatgtacgttgggaatattgttatgtggtccttttctaaagaaaaaaaaatgttgacagtcaagggagaaaaaaaaaaaaaaaaaaaaaaaaaaaaaaaaaaaaaaaaaaaaaaaaaaaaaaaaaaaaaaaaaaaaaaggaaaaaaaaaaaaaaaaaaaaaaaaaaaaaaaaaaaaaaaaaaaaaaaaaaaaaaaaaaaaaaaaaaagggggggcccttttataaagaatcaaattttacttcccctttattgcaagttaataatttttttttggggcccccaaaataaaattaatggcccgtgttttaaaaacgttggaattgaaaaaaccttgggttaaccaaattaaattgctttaaaaaaaatccccttttcccaagttgggaaaaaaaaaaaaaagcccaaacaaatcccctttcaaaaaatttgcccaccttaaatggcaaatgaaaccccccttataggggtaattaaacccggggggggtgggtggttaccccaaaggtaacctttaaatttgcaaggccctaacgccccgttcttttcgttttttt

SEQ ID NO: 93991 - DNA, 542 bp, Zea mays
  Clone ID: MRT4577_185706C.1
ggggggggggtttttttttttttttttttttttttttttttttttttttttttttttttttttttttttttttttttttttttttttttttttttttttttttttttcatcccaacaactttttgcaaaaaaacaaaagggggggggggggggggggttttttttttttctttttttttcccccttaaaaaaaaaaaaaattaagtcgccctcctcctttttgttttccccggggttttcctcaagggggggcttgtgggggtaagcctccggattttttttttccttgtggtttttaaggcccatttggggcttgggggggatgcggtttcaaaaggggtggggaccgggggggttaaacccaaaagggagcaggccctttttaaacaggagtttgaaaaggtcctaaacggatttggggtttttttaaccctgggacccctgggggggctcctccatgagggggttttggggggtgacccccatggtttttttgggggaaatgtcccaaacaatgttggaacccctaagggccggggttt

SEQ ID NO: 93992 - DNA, 211 bp, Zea mays
  Clone ID: MRT4577_185707C.1
cacgccggttgctcagacataatgtatcactctctcttcttggttggagaagtcgcgggcaatgactactaccggactctgctttctcgcgtgctcatggagataatacgtgctatcactccgagtgctgttgccatgatgtcctcaacgatcagcgaattgcatcggctatgagccataactcttgtgggtccaggaaacctcacagttg

SEQ ID NO: 93993 - DNA, 1641 bp, Zea mays
  Clone ID: MRT4577_185708C.1
cacgctcaacacccgccacgacgcggccatggtgtccgtcctgctgaaacactcggaagccaaggtcttcctcgtggagtcgcagttccacgccgtggcccgcgacgcgctcaggctcctcgccgacgccaaagacaggcttcctctcgtcatcacggtctctgaccccagcagcagcagcagcaccggcgacggccgcggcagcaacgacggcagcgtcgcggtcgcggagtacgaagcgcttctgcggagcgcgccgcgcgacttcgaaatccggtggccggcagacgagcgcgacccgatatcgctgaactacacgtcgggcaccacgtcgaggcccaagggcgtcatctacagccaccgcggcgcgttcctcaacacgctggccacggtgctcgtcaacgagatggcgaccatgcccgtgtacctctggaccgtgcctatgttccactgcaacgggtggtgcatggtgtgggccaccgcggcgcagggcggcacgagcgtctgcatcggcagcgtgtcccccggggtggtcttcgaccacatcgtgcgccacggcgtcaccaacatgggcggcgcgcccacggtgctcagcatgctcgcgaacgcgccggcggcggatcggaagccgctgccgaggagggtccgcatctccacgggcggcgcgccgccgccgccgcaggtgctggccaagatggacgagctcggcttcgacgtcgcgcacgggtacgggctcaccgagacgtacggcccggcgacgacgtgcgtgtggaagcccgagtgggacgcgctgccgcccgcggagcgcgcccggatgaaggcgctgcagggcgtcgctcacgccatggtccaggaggtcgccatcaaggacccggcgagcatgagacgttgccctccgacgggcgcgccgtgggcgaggtgatgctccgggggaacacggtcatgggcgggtactacaaggacgcgggggccacggaggaggccatgcgcggcgggtggctgcgcacgggcgacctcggcgtgcgccacccgaacgggtacatccagctcaaggaccggtccaaggacatcatcatctcgggcggcgagaacatcagctccatcgaggtggagtcggtgctgttcgggcaccccgcggtgctcgacgccgcggtggtcgcgcggcccgacgaccactggggcgaggcgccgtgcgcgttcgtcacgctcagggacggcgcgagagccaccgcggacgacatcatccgcttctgccgggctcggctgccgcactacatggcgcccaggacggtggtgttcagcgacctccccaagacttcgaccggcaagacgcagaagtatctgctccgggagaaggcgagggccatgggaggcctgcgcaagccagatcgaagcaggctctagttgacctgttgctgggaacagtccactggctgcattcctggcagcctgctgatagttttatcttggtcaactacgcttagccatcatcgatcaaggggcagcattcagtcatgccctcgtgctttcacagccaccacgttgcacatggacctgtacggtgaaatagtattgcaggacttggccattcatggaatgctttattggatcatcccaattctaataaatacgtattcactc

SEQ ID NO: 93994 - DNA, 3551 bp, Zea mays
  Clone ID: MRT4577_185709C.1
gagcattgggaccctcgaggccggccgggaaacaagcactcaaacctccctcccaagccctcttttttccctcgccgcggcgcaggcagagcagaggcactagcatgtcgccgttcgccgcccgcgtggcctccttggccgcgctgctgctcgccctcctgctcgcggcgccggcctcggccgccaacttcacctgcgccacagtgggcaaaacgtgccagtcggcgatcgggtacgcggtgcccaacgcgaccacgtacggggagctggtggcgcggttcaacgccaccacgacgctggcggagctgctgggcgccaacggcctccccgccacgacgccggcctcgacgccgctggcggccaaggccacggtgcgcgtgccgttccggtgccggtgcgggagcaacggcgtggggcagtcggacgggggacccttctacgtggtgtacccgctggacgggctggaccacatcgcgcgggaggtgttcggcggcttcgtcacctaccaggagatcgccaccgccaacaacatcaccaacgtcaacctcatcgtcgtcgggcagaagctcaggatcccgctgccctgcacctgcgaccaggtggacggcgccgacgtcatgcacttcgcctacagcgtcgccaagggggacgacccgcccggcatcgccgccaggttcggggtcaccgagaccacgctgctgagtgtgaataagatcaccgaccccaagaccagcctgcagcaggggcagatcctggatgtccccctccctgtgtgcaagtcatcggtcggcaacgcctcggctgactacaacctgctcgtcccgaacggcacctacgtgctcaccgccgacgactgcatccagtgcagctgcagcgcgagcaactacgagcatctagactgcactccggtgaaaggcggaaggtgcccggcggtgccgccgtgcagtggaggcctgacgctcgggcaggtcaacggcaccggttgcgcgtccaggatgtgcgcttacagcggttataccaacaccacgtccctcaccatacataccagccttgtgcctgcaaatgagactgcgtgccagaacggaggagctgcgagagcggagtttgccgggtccgtgttgaggacgtctctcatcgccttcctcatgtcgctgatcctcatctgcttgctatagacgttagaacagtagatggtgtattatatgccactgtgagatactcagattgctgttgtggtctattcattggcgattggtctagctgtttgaataaagcaaacattaaagtttgcatctgtgagtgaatacgtatttattagaattgggatgatccaataaagcattccatgaatggccaagtcctgcaatactatttcaccgtacaggtccatgtgcaacgtactgactgtgaaagcacgagggcatgactgaatgcccgggtgtgcccatcagcgctcagggctagtttggatactttgggattgaagtgtttcgaagggattagagatggtgcaaattctcaatagattaaatactctctcaatacatcttaatccactccaatcccaatcattactagagtatccaaactaggcctgatcgatgatggctaagcgtagttgaccaagataaaactatcagcaggctgccaggaatgcagccagtggactgttcccagcaacaggtcaactaagcctgcttcgatctggcttgcgcaggcttcccatggccctcgccttttcccggagcagatacttctgcgtcttgccggtcgaagtcttggggaggtcgctgaacaccaccgtcctgggcgccatgtagtgcggcagccgagcccggcagaagcggatgatgtcgtccgcggtggctctcgcgccgtccctgagcgtgacgaacgcgcacggcgcctcgccccagtggtcgtcgggccgcgcgaccaccgcggcgtcgagcaccgcggggtgcccgaacagcaccgactccacctcgatggagctgatgttctcgccgcccgagatgatgatgtccttggaccggtccttgagctggatgtacccgttcgggtggcgcacgccgaggtcgcccgtgcgcagccacccgccgcgcatggcctcctccgtggccgccgcgtccttgtagtacccgcccatgaccgtgttcccccggagcatcacctcgcccacggcgcgcccgtcggagggcaacgtctccatgctcgccgggtccttgatggcgacctcctggaccatggcgtgagcgacgccctgcagcgccttcatccgggcgcgctccgcgggcggcagcgcgtcccactcgggtttccacacgcacgtcgtcgccgggccgtacgtctcggtgagcccgtacccgtgcgcgacgtcgaagccgagctcgtccatcttggccagcacctgcggcggcggcggcgcgccgcccgtggagatgcggaccctcctcggcagcagcttccgctccgccgccggcgcgttcgcgagcatgctgagcaccgtgggcgctccgcccatgttggtgacgccgtggcgcacgatgtggtcgaagaccaccccgggggacacgctgccgatgcagacgctcgtgccgccctgcgccgcggtggcccacaccatgcaccacccgttgcagtggaacataggcacggtccagaggtacacgggcatggtcgccatctcgttgacgagcaccgtggccagcgtgttgaggaacgcgccgcggtggctgtagatgacgcccttgggcctcgacgtggtgcccgacgtgtagttcagcgatatcgggtcgcgctcgtcggccggccaccggatttcgaagtcgcgcggcgcgctccgcagaagcgcttcgtactccgcgaccgcgacgctgccgtcgttgctgccgcagccgccgccggtgctgctgctgctgctggggtcagaaaccgtgatgacgagaggaagcctgtctttggcgtcggcgaggagcctgagcgcgtcgcgggccacggcgtggaactgcgactccacgaggaagaccttggcttccgagtgtttcagcaggacggacaccatggccgcgtcgtggcgggtgttgagcgtgcacaggacggcgccggtcatcggcacgctgaaatggagctcgtacatcgccggtacgttcgaggcgatgaccgcgaccacgtcgcggcggccaacgccgagacgagcgagagcggctgccccggcgaggcaccgctccctcgtctcgcgccacgagaaccgcctatcgccgcaaacgacggccgcgcggtcgccgtacacgaccgcggcgcgctccaggaagctgagcggcgtcagaggcacgtagttggcagcgcaccacatggatccgtccatggcagcgcgtgtgagactgagagatggccagatgtggcaggtgctccttcggatcaagcgcaacgcgacccaatgtggatgacgaggtgattaacgacattagaagatgacgagggagctagtcatctttggacgcttaggtgtccggttggatcagtcacatttagtcccggccggcctcgag

SEQ ID NO: 93995 - DNA, 810 bp, Zea mays
  Clone ID: MRT4577_18570C.1
ccggggacgctggcctggctcccggacagaactgctctgctatggccgtcttctggacggacggagggagggaggttgagagaaaagcaggggggcagcaacggaaacaaaactaaaataatcgtactgtagaagccgagcgcaggagatcgaacaacgaaactccccttcgttccttcctcgtgttcttctccctcctgccgccgcggcccgctccgctcccgagccccgttgcacctccacccgccgcttccgtcccgtcccctggcaccttcctctcaccgcacttgagtcgctgcgcctcctcccgcccgcctcctcccgcagccgcagcaggacgagctcgtcgccgccgtgtactagaagaacgggaggtcgctgtcggtctcccgcacaatcctgattcctggacctgcgccgcgtggtttcgcctcaggttggagtgtctcgatttgtcaggatagcttgtataactgaagctttcctttgtatgatgatgggggcatgccatggaccagaagtgagggggctagggtttagtatgtggtagtagctcctgcttcagcaaaagaagcaaggatcactacttttgctgtttgttccgtggaggatctgaatcctatcggcattggttcgggtggcgtcagctgttctaggtggggtagtatgatgaaacagatatttggatggcgcaaggcgtccaaaactgcaggcaaggagtgtggcgggaggacgttcaaccagctgccaggttctggatttgctgacctgagtggccagctgccaattctgtctagtactggggacatc

SEQ ID NO: 93996 - DNA, 121 bp, Zea mays
  Clone ID: MRT4577_185710C.1
gtcatctcaggattcccagcaagccaagcgaaccgcgcgggaaggcgcaggaagtggtccacggcgagccgagctcgagtggagcgcgagccgctagacgacaaggtccatcttatttccc

SEQ ID NO: 93997 - DNA, 289 bp, Zea mays
  Clone ID: MRT4577_185711C.1
gaagaacattgctgtcattgctggcacagtcacagatgacaaaaggatccaggaggttcctgcttttatggttactgccctgaggttcacggatacagcatggtccaggattgactatgctaattgcgcgtgccttacatcgaccagatagatcttagttctaccacttctgatgaccacgcccctatagaggttcaacctatatccagaggagccattgattcacacagtcgagcatcgtgcttggttgaaaagccactgtcacgaagctacgctgtgccagattatg

SEQ ID NO: 93998 - DNA, 245 bp, Zea mays
  Clone ID: MRT4577_185712C.1
atcccatcctccacccattcgaatgtccttatgagctgcaccctcaccccttaccatacaagattttaggggaggtcaatcttcagttccattaccatcccccatataatctttaaccccaacaaaccctaatccccccccgttgtcaatgatagaatcccgacaacacctattgcaagataattctacacattattgataccgataggatcatctccatgcgcctacgaatttgctacaccatt

SEQ ID NO: 93999 - DNA, 765 bp, Zea mays
  Clone ID: MRT4577_185713C.1
caattttccactgttcttttctttttttttctaaaagaagttgtgatatatgtatattttggttgccggtgcccttttctagagggtttaggtgaatacatacatgatacccacttgaagtgcctctcaacaaggaagtaatggaaagaaaggcaagctaaagaccagcttaacaatgatggtacacatgagaatgttctcttctgttcagaagttatttccaatacaagatatccagttcggagcaaagatagacgcctgtactgttcagaagttattccaataccaaatagcatgcttcagaagcacacaaaaactatggcattgttcttggtggtccctgtgcccgttcactaggagcgagattgggggatcttgagtaccattgcatggctgttgttaggctgttagcccatcgctatcgtgcgggaaattaactatggtgaggctagagaaaatgaactgatgtggattggacacgcgcttttggaaaaggaagctccaacagtctacctgcaacaagcgaccattatggaacgtagtcttgtgttgtagtacgataatctgcgggtgtttcgggacatctttattttcctagccatcttgtcgccgacacttcagcaatttgtagtagcctgttgccggggggctttcgtaagcagtacccgtcctaaaatattagtccttttacctcttgacttttatatctatattcaaataaatgataataaatatatatacatatataaaataaatatattaatt

SEQ ID NO: 94000 - DNA, 423 bp, Zea mays
  Clone ID: MRT4577_185714C.1
ggggcacaaaaggatttcttttttggacccaagactacctgaatcaaataaacctttacctcaaacactaatttttttttataaccccccttttttaaatgtttgaaggatgcaaaactggttctgcgggctcttaaaaaaacaaaaaaaacccgattctattataatttttaccactacttaaaaaccccgttttttcctgtcatcgggccctggaaagcacaacaaaacattttattttgcaaccttgcgggtacctgaaaaaccttttaaatacaaaggcccaacaccccatttcctttttaatagaaaacccccctggggatgttaaaaaccattttacaaaaaaaagcttctgatcattttccaatagggggggcataaaaaacaagggggtttgggtcttttccgggccttccatta

SEQ ID NO: 94001 - DNA, 335 bp, Zea mays
  unsure (1)..(335): unsure at all n locations
  Clone ID: MRT4577_185715C.1
agcaccaagggggggggagtttgaagacaggcagggatcaagaaaggaagnangagacngagcctnctcaagaagggactactttgatggctaacaagaatgctgagtaacagcggttgactggtatttataagaatatactgagcaaagctaatgtcaagttgattgaaggccgtggaaaggttatagacccacacactgttgatgtagatgggaaaatctatactacgaggaatattctgattgcagttggtggaacgcctttcattcctgacattccaagaaaagagttagctattgattctgatgccgcgcttgatttgcctcccaagcct

SEQ ID NO: 94002 - DNA, 290 bp, Zea mays
  Clone ID: MRT4577_185716C.1
ggctttcacaatttatctttaaatccttgagcaatctgtatacaattaagagatttctgacatttattcttacactaaatggatcaactctaggatttaggcatgttaacttctgttgtgttttgaatctctccagagttgcatgtagatagcatttatttctgtgcccttaaacccatttagaaaataactacaaagtaaaaatgtagaggaaatagaaatgtattttttcatgaacattttgatacaaatttcatcatttaatgattcaccaatttcttgcattaatt

SEQ ID NO: 94003 - DNA, 301 bp, Zea mays
  unsure (1)..(301): unsure at all n locations
  Clone ID: MRT4577_185717C.1
ttgggaccctcgaggccggcctggccggggttctccccctcgcctcgcctagaagaggaaggaagaacnagagataagcgacannacgcgtcccttttcctcgnnccntntncnncncattcaggcgggtgtgttgggcgctggctggcttctccagctgggtgggttagctccgacgacgggcgacggccccgccctcctggcaggcggataccntcccaccgtgggttggcctgggacatccatccgcgagggagtttgggccactccagtggagaggcactcctctggtgggtgaaag

SEQ ID NO: 94004 - DNA, 576 bp, Zea mays
  Clone ID: MRT4577_185718C.1
agatctagtgatgatgtgcagtttatcatattaagagggagtagcacaattacagtccaataagttctcgaagttaccatggcaaggacaaattatgttgccaaaattaaaaaaaatgactatatttcgtagcatttcacaatcttcgtgtcagaatcaccatcttagttattccaccaagaagtatacagtacagctagttcggtttgccattcagcaaagaacagtgtggttctaggatatacctattttacaatctaaaggttgagcaattaaagggttgtgacttgtggcatgcgaccaaactgttgaagctatcaaagaaccttccctagttcacaacaatctctggttacctgcgtaccgtgactgaccaaaaagaacagggggttgggggcaaacctgttgaagaaccccccagccactgaaatcctttgttgggactcaatcaccagtgcattgagcatgatatgcatgacagcgtcatacacaccaccatcataatgcataccatctgctgtgcactgttagccgcacccctgggtgagcttccccacatcaagcagcatgaacggg

SEQ ID NO: 94005 - DNA, 283 bp, Zea mays
  Clone ID: MRT4577_185719C.1
tcgccttctcccgccgcatccgcagccgcatgaggaccccatcgccggctactcctacatgctgaggcgctaccgggaggacctgttcaaggaggacgactagcgccaggatccgagcgcgcccaaagcgcgcgagcagcaagcggcgactccgccgtcgcagccggagactttcgccacaatgtgggccgtcggctgcccgttcggcgggttctggatgctgaccgtgtccgcgagctcggtcgtcgtggcgcggtcgtccaaacagcccatgtggtgcttc

SEQ ID NO: 94006 - DNA, 410 bp, Zea mays
  unsure (1)..(410): unsure at all n locations
  Clone ID: MRT4577_18571C.1
gagccgaagaagagggggaggaagggaggacagccgccgccgccgccggggccgccaccgncaggangcannccacgaaccgccagcacgaggagcccanccgganggcccccanccccgagcccnccaagcccagcnacnncccggcgangaccaagaacgncggcacgcggggggggaagncgcgcaccgacgacacgaacnccgccngccacaaggccggcangaccgacgcccggnacgaanacacggggggggacgccgcgnaccaccaggagacgcnggagaaccgcaagcncnccagcaagcccaccaagaagcnccgcgcggacangcacgacaccgagggcccggagccgcaggnggagaacaagagcgagaccccgaacacccccgaggagaaaggcacg

SEQ ID NO: 94007 - DNA, 957 bp, Zea mays
  Clone ID: MRT4577_185720C.1
ggtctagaatatccgggccggcccacgcgtccgcccacgcgtccgggacaaaacgagcaagcagtcacatcaataggccaaaggtgacaaggcaatgcacaagagcagcgctgtcgattggtagaggcccgggaacagcgaagcacgagaaagaagggcagcacagaagccagctcatgaaaaatagaggttcagaaacagcaatccatgaggaggtagcagagcaacacagctcagtagaaacgagccgtgaggaagcaggattattccaagaacagacctcagatacaagtcacaaagaagaagaagaagaagaaggagaaggagaagaagaagaagaagaagaagaagaagaagaagaagaagaatgtactagtgaagtaggagcgggtaaacacagctcagtaggaacgagccgtgaggaagcaggattattccaagaacagacctcaggtcacaaagaagaagaagaagaatatatgagtgaagactgggcattaagtcaaccatgcgacatgctcattggcaacaggatgaccgtacgatgtctaggatggccagattcttggcgactacgaagtggcatgatatcttcccccatgctgatctgcaggccattgggtccgtgacctcagatcattgtcccttacttatgcaaggtttatctacctttagtttctatagggggtttagatttgaagttttttggacaaaaattgatgggttcaatgaggtggttcagcaagcttggacatctagtgttcgttcttccgatgccattcttaggctgcatgtgaagatgatccgcacggctaaagctctattgatctggagacgaaagacagtaggcaattttaaagatcaattagcaatcattcagaccgtccttactcttcttgagaaagcacaggaatccaggcaactttccggggacgagctagagttcagaagaagtct

SEQ ID NO: 94008 - DNA, 337 bp, Zea mays
  Clone ID: MRT4577_185721C.1
gagtgagtgggctaatacaaaaaagaacgatggtaatggtggaggggcccggtgccagtggcgcggtgttccacgcctgccgaggacccagattgaagagaaatgagaaggaagaaaacagaacacacagccaatcaaccctcaaacacagaaactcagcgcacagcaaaacaaaaaacaaaaaaaagacaaaaagaaaacaaaaaaaaaaaaacaaaaaaaaaaaacaaaaaaaaacaaaaaaacaaaacaaaaaaaaaaacacaaaacaaaaacatacaaacaaaaataaaaaaaaaaaaaacacaaacaccaaaaaaacaaaaacattatattt

SEQ ID NO: 94009 - DNA, 332 bp, Zea mays
  Clone ID: MRT4577_185722C.1
attcggctcgagatatattctcaacttattagaacactctcacccttagatctctcatgttgttatcctccgaatctatggcctctattattttctttaaccctttacttttcatctcaccacttattatttattacgcgtccttccttctctctccctttcccatctatataaaacccaccattttccactttcatctacttgtgttctgttgtgtactctctattctcataagataactaactcactctgtgtgataaagttctcatactcatagctattaccgccgatattttccggcagaacatatcgcaaatgcttgcggagtcccc

SEQ ID NO: 94010 - DNA, 491 bp, Zea mays
  unsure (1)..(491): unsure at all n locations
  Clone ID: MRT4577_185723C.1
cgccggcgcggcggccacgncncccccccagggccaccagcnccaccgccnggcggcaccngggcagcccggccncccgccgccgccggcacggggggccncgggccgcacacnccgaggccgccccgcccgccgccnccgncgaccggcgccgcggcagcgcccacaccgccaccgcggccgccgacgccccncgcggcnggccccgcgggacccccgcggcncgcgcggacgaagggccggcgcccnccgaggggaagcgcagcgcccggcccagcgacgccggcggcgcccgccccgacagcgccggcggcccagacgaccccccccaggggggcncnccggggaacaagacagacaagacgggagacgaaagacggcggcaacaccgggggcccgcgcgccagccccgccggagaggacgaagagggcaacgacagggccgaccccgggaagccccgagggcagagagggaaggaggagcgggaagc

SEQ ID NO: 94011 - DNA, 377 bp, Zea mays
  Clone ID: MRT4577_185724C.1
cttggtttttttttttttattcattttcttttttttgtttgggctgctttttgggcaagaagctcccaaatgcccccattgcccaaaggagcaaacgggtgagtcacacccgcccttataagggccggaaatttattcatatcaagggttctcatatagcgttcaaaaatgcccaatagttttgacaggtgaaaaaaaaaacccaggccccattcattatttattaaacacttccaccatggaaaacacctttgcataatgaccgggccccagcccacttgccaaacaacaaaagattatacttttttttgctcccaaccccaagataataagggccggggaaaggattaaaattctgggctggggttaaaggcctt

SEQ ID NO: 94012 - DNA, 552 bp, Zea mays
  Clone ID: MRT4577_185725C.1
atttccatccgagaggacgagtatctatcgtcatcgtatggtaggtatgaatgaagaggccgggggggtggtggtgatgctgctggtgctacgggttatggtcaggtaccacacgacgcgccatggcactcccgctcgccgcgagtagccgtgttagtatgggtccctcgccacgacgcccaaggtgacgaggctgactgtctcgctgtgttactctcgggagacgtgcaaatacactcccatgattcactcctgtttgctcctgcagctcgtagttgcactctccatatgctacggcagagtttactgcggctgcttgagaagacgacattcccctgagccacaaatctgacagtgcatgcgccagacaaacactacaacactgcctctcgatgaagcttctgatcaagtgattcatgcctatgggaatcctaggacggtttacgcatatgtcgtattaactaggcgcggactggaagcatacagaagggagtgttgtgttattcacggatgctggcgacctaacagaggagaaatatatggtgcatgacg

SEQ ID NO: 94013 - DNA, 163 bp, Zea mays
  Clone ID: MRT4577_185726C.1
gtctcaaatggaaggcaacttataagccagaagatcttcccttggcctgatgtttctgttgaatgcggaacaggaaaaatgtacaaagcaaattttcgagatagagaggggagaactggtatcattttgaggcctacattttagaatgcatggttccatgacg

SEQ ID NO: 94014 - DNA, 208 bp, Zea mays
  Clone ID: MRT4577_185728C.1
ttactttaaaggggtaaatgaaggtatctttccagtaccgatacgagaaaggcacaggccggaacgattcaagatattactccgcgcgaaatgaagcatcactcggtagggcaataggataaagcgggccctatttgtggtgcactagtctcaaaggcaccactagtggggccttgaaaggcaaaggcgttgtgctatgaacaaaaat

SEQ ID NO: 94015 - DNA, 266 bp, Zea mays
  Clone ID: MRT4577_185729C.1
ctcgagtttttttttttttttttttttttttttttttttttttttttcttttttttttttgttttttttggatcaccaaccgacgcattacttcatggttcagcgatttgtcaaaaaagacacgggaaaaaaacgggtgcattaaaacacaccaattcaaggggttctgttgaattcttgaaccccacccccttcccttgatcgcatacaaatggaacatgaaactgctcctcaaaattactattagggagacaacgacggtccat

SEQ ID NO: 94016 - DNA, 1197 bp, Zea mays
  Clone ID: MRT4577_18572C.1
ccccggccggacccggccccgaattcccggtgtggacccacccttcttttttggacttttccaaaacggccaacggcggccttcttaagccggttgccgacaccagtaagccgcccgtaccaggtcccccgccgaccttcctccttcttccttttgccaacaggctctgagccagcacgtggagctctcccagacgggcgacggccgccctcctcagccggctgcccacaacagtcagccgaccggcacagaccagcagccagtgcgagtgtgtgtggcgtgcccgtcaagtgcggcaagtgcggcaacgcaagccttcttctccagggcgtcgtttgccagcgacgagcaccaccaggtgctttgtgctaggatagcagtgctatgtcaaaagctccagatgatcatttgcaagcaactgagcaggaaggaagtgtccattcaagtcaacaagcagggcaaattcatgtgaatacagcagaccagttctcaaaaacagaactaactgaaggttcaaaaattgaacagcctgtccaagtagagcaacagagttcccacctacaacaagcatatccagaaattcaactacagcaggctgaaacagatagcttccagttagctgaaaaagaaacagggtattttggtcaacagagttttgcaggcgccaaggtggatgtagcccagcctccagtagttcagcagaatgcaaagcaaactgttggtcaacaagcatcatctggtacccaggatacaaggaaaggaccatcgataccatttaatatgttaattccaatcctacaggcacatcttgacagagacaaagatatgcagcttcaaactgtttgggcaaaacttaggcgtaatgaagtcaacaaagatgatttcttaagagttatcaggaatattgttggggatcaaatgctcaagcaggcagctcataaagtttttgtacagatgcaagcacaggcgcaaagaaatagccaggcaaattcaagtcagcagtctttattctctcaactttctgcacagcagatggcttccagtggttcagcacagttacatgatcagaaaattcggccacctggaccacccaaccaaggccagaaaaaccaggtgtcatcttcacctcaggcttttgcaccaccatcaggcacccaaccgcagaatagtgtacactatcttgctcatgataaccct

SEQ ID NO: 94017 - DNA, 1577 bp, Zea mays
  Clone ID: MRT4577_185730C.1
gggtagctcgccgccggccgggccgggacgcgagggggagaaagaggctacacggaaccacgcgctcacggagtcacggctcatcttcggaccttccccagttccccgcgatatcgctagggtttccgcgatggcgacacttcgctccccgagcccccgcggagacgttctcctcgactcggcgccgctcctcggtggtgtcgggcggcgccgcgcgggcgcgctgcgccggccgtctctccggggcgcggcgcggctgctgcggcgtggcgggcgccgagcgatgcgggagccgtcactgctggtgcgggaggccgcggcggagcagctggaggaacggcaggcggattgggcctactcccgccccgtggtggcgctcgacttcctttggaacctcgccttcatcctcgtctccgccgtcgtgctcgtgctcagccaccacgagagcccctccatgccgcttcgtttctggatcgctgggtacaccgcccagtgcgtcgtccacatggtctgcgttgccatcgagtatcgtttgcgatacggccagctcggcgggtcgccaattcctgtcgacgaggagagcggaagtggtagtgcatcatcgtcctccagcgacgacgacagagagcacggctcccatagtcgaagtggtgactgcctcagtatagctaaacatctggagtctgctaacacaatgttctcatttgtgtggtggataattggattttattgggtatctgctggtggagaagttcttacccgtgatgcgcctcaactttactggctttgcatcgtatttttggcgtttgatgttttctttgtcgtcttctgtgtggctttggcctgcatcattggtattgctgtttgttgctgccttccttgtatcatagcaattttatatgcagtgtcggatcaggagggagcatctgaagatgacattcgtcaaattccaaaatacaaatttcggaagatggaagagcctgaaaagcagtctgttggtgtgcctggatcttctggtggaataatgatagaatgtggaaccaatcaacctattgaaaaagtacttgcagctgaagatgcggagtgctgcatttgcctctcagcttatgatgatggcgcagagctccgtgaactcccttgtggccaccattttcattgtgtttgcatcgataaatggctgcacatcaatgccacgtgccccctatgcaagtacaatgttcgaaaaaacagcagcagcagtggcagcgaagaagtataaatctctatatgagaatattgagaattcatacccaacagttctggcttctcgcagcaaattttttatcccataatcccatgagttcgcattcgtatctgtggcagtgtgatgaagaaaatgatccatgtaaattctcttgttcgtaatacggctatagcaataattctgtgtcaactttgctcgtgctgttctcggtgtgtttagatttttatagtatgtgtacttgttatagaatttctgtagagcagcttgtttgtgtagtctaatgttttataataatcatactagcagtacatgttcttgctcaggtcaggttttc

SEQ ID NO: 94018 - DNA, 1159 bp, Zea mays
  Clone ID: MRT4577_185731C.1
tccatctccgtctgcgaggggagattttttcagagctgccgctgtttttggcccgcggctcgtagaagacaacttcaacactgttggcgcgtgactggtgaattcgctgcacacacacgcgcgaacccagcatggcatgaacacgaacgagagagagagagagagaggcagggaggggtcatccatccatcagaccatcacccatggacaaccttaaggagcagcggggccacgatgccgcgggcgccgccggccgcgtctggctccgctttttatctttaataaaccggcgtctcctgccctggcggggacgccgctgctgacagggcacctgatcgattgatttcctcgggcagtcagcggcgctcaagagtcacgagcttactggttgtaagcaacgatcgacgaacgaaggggtgtagggagtggaagcaagaggctcagcgttctgttcatggagacccgcaaggaggagcaggcggcggtggggtggatgacggtgccggcgttcggggagtgggacgtgaagaacggcgccgtgccggactactccatggacttctccaagatccgcgagatgcgcaagcagaacaggcgcgagctgtcccgggccagcctcggcggcggcgacgacgacgacgtcctactccagaagcagcagcagcagcagcagcagcaggaggaggaggagggaagcaaggcccagccgcgcaacaagccctccgccgccgtcgcggacgacggccaccgtcgtgcgctgcacgacgactcccctacggggaggaagaatttcctgagctatttccagtgctgtaccagagcgtgaagaaactcccaagacttcttcttcctctgctgcgcaggtagctgcatgtttgggtttccttctgtaatgtatgtaaagcatgtctgcgtagttaaagtgtgtgatcctgtcacccatgccatgcatgagagaggggaggaacgcccatggctcacagcttctagtgcagtgtgttctgagaaaaaggattagatctgatgaagaagggtgtggcttgtgtgtgtgcttttttgtatgagattggatgcacttgagatgatgtattgacgattgtccatcttgttcttcctttttcacctctttatgtaaaaaaaaaaaaaaaaaaggccccta

SEQ ID NO: 94019 - DNA, 206 bp, Zea mays
  Clone ID: MRT4577_185732C.1
gatcacaacttccataaattcatttatacttttttagaacatattatagatcagccatggaaatttgaattttcaggtgagggaaagttcatgggtggttgaactggttcatgtgtaagtttgtatcgtaataaaaaattactaacttatctacaaaggtaaacagggtggagtggtcatacattagggcttcaaacaaccataat

SEQ ID NO: 94020 - DNA, 839 bp, Zea mays
  unsure (1)..(839): unsure at all n locations
  Clone ID: MRT4577_185733C.1
cctcgaggnnccggccaaaaaaaaaaaaaaaaaaaaaaaaaacggcacgcgccgctcctttcagggcacctgatggattgatttcctcgagcagtcagcggcgctaaagagtcacgagcttactggttgtaagcaacgatcgacgaacgaggggtgtagggagtggaaggaagaggctcagcgttcatggagagccgcaaggaggagcaggcggcggtggggtggatgaccgtgccggcgttcggggagtgggacgtgaagaacggcgccgtgccggactactccatggacttctccaagatccgcgagatgcgcaagcagaacaggcgcgagctctcccggtcccgggccagcgtcggcggcggcgacgacgacgacgacctactccagaagaagcagcagcagcaggaggaggagggaagcaaggcccagccgcgcaacaagccctccgccgctgtcgcggacgacggccaccgtcgagcgctgcacgacgactcccctacggggaggaagaagtgcctgagctatttccagtgctgtaccagagcgtgaagaaaactcccccgacttggtcctcctctgctgcgctgcgcaggtagctgcatcacgtgggaagctaaaggggcccaagtaatgccgttccccagtattgtgttctccccccgtttctaattattagtcggtagagagtgtaaaattgcgccccccagcgccaaataaaaagaaacggagggagtactccgtgtccaaaaacgtgtaatatatttgtccttatggatcagtcgttgggcctgtatgaagaacagaccagcttatggggtaagcaacgttctttttgt

SEQ ID NO: 94021 - DNA, 330 bp, Zea mays
  Clone ID: MRT4577_185734C.1
cactgagtaaacgggccgccagtgttgctggaaatcgcccctttggagcgcccgggcgggcaggtccggataaagaagcccccgaaacaagatatacctctatttcggaggcacccatctcgccccaaaagaaaataaaccaagcaaaggatgcccactgcctaacttcctgggttaccggaatggtatgcgacattggtggattggatatcgcaggattgagctcttgcaacctcggtgaatatgtcaaataaatgggcagaattcacatgctcaaatatgtgcagcattcaaaaaaaaaaaaaaaaaagaaaaaaaaaagacaagtaa

SEQ ID NO: 94022 - DNA, 911 bp, Zea mays
  Clone ID: MRT4577_185735C.1
ttgggaccctcgaggccggccgggccttcatctgctttttatctttaaataaaccggcgtctcctgccctggcggggacgccgctgctgacagggcacctgatcgattgatttcctcgggcagtcagcggcgctcaagagtcacgagcttactggttgtaagcaacgatcgacgaacgaaggggtgtagggagtggaagcaagaggctcagcgttctgttcatggagagccgcaaggaggagcaggcggcggtggggtggatgacggtgccggcgttcggggagtgggacgtgaagaacggcgccgtgccggactactccatggacttctccaagatccgcgagatgcgcaagcagaacaggcgcgagctctcccgggccagcctcggcggcggcgacgacgacgacgacgacctactccagaagaagcagcagcagcagcaggaggagggaagcaaggcccagccgcgcaacaagccctccgccgccgtcgcggacgacgcccaccgtcgagcgctgcacgacgactcccctacggggaggaagaagttcctgagctatttccagtgctgtaccagagcgtgaagaaaactcccaagacttgttcttcctctgctgcgctgcgcaggtagctgcatgtttgggtttccttctgtaatgtatgtaaagcatgtctgcgtagttaaagtgtgtgatcctgtcacccatgccaagcatgagagaggggaggaacgcccatggctcacagcttctagtgcagtgtggtctgagaaaaaaagattggatctgatgaagaagggtgtggcttgtgtgtttttgtttgttgctgtacgagattggatgcacttgagatgatgtattgacgattgtccatcttgttcttcctttttcacctctttattcattgtatgc

SEQ ID NO: 94023 - DNA, 249 bp, Zea mays
  Clone ID: MRT4577_185736C.1
agatcgcctatcgacttcacgtctctccgccagaccaccactaccccgtctatctctggtctggtcccaagtcccaattagtcggagcctcctgccctcctcgaccgctcaagccaagaaccagaagccatggagacggcggcgccggcgccggcgccgtgggcggaaatggagatggactgcatggtgcaagtgttcgtgcgcctcgacctcgaggacctgggcggcggcggcctctttcgtatgcct

SEQ ID NO: 94024 - DNA, 190 bp, Zea mays
  unsure (1)..(190): unsure at all n locations
  Clone ID: MRT4577_185737C.1
ctttcttcaacccctcctcgaccggggggaagcgaaggatgcaccatagcttagcaaaccatcccaccaatcgaatatcgcttcacacgatgactaccgaaacaaccgtttgcaaattctcccaccgcatcatgccncaccttctcaacatatatgtatcttgcccgacaacacaagacttcaaaattta

SEQ ID NO: 94025 - DNA, 1977 bp, Zea mays
  Clone ID: MRT4577_185738C.1
ccctcccctcatcaagggttttcctcctctcctctcctagccttcgccgcttcaccgctgctgccttccctccctcgcaagcctcctccgcgtcgccgccgcccgcccgcccggatccgccatggcttccgacccgaacaaagattccaaatcggaggggctgtctgaggcaaaaaagggggcttccccaacagctggtgcaggccttcccagtccttttgatttttccaacatgagcagcttgctcaatgatccatctataagggagatggctgagcaaatcgccagcgaccctgtattcaaccagatggctgagcagcttcagaaaagtgcgcagggtgcaggggaacagggtgttccaaatttggatcctcaagcatacatggaaaccatgacacaagttatgcagaatcctcagtttatgtcaatggcggagcgtcttgggaatactcttatgcaggatcctgcaatgtccagtatgcttgagaacttgactagtccagctcacaaagagcagcttgaagagcgaatggcccgtatcaaggatgatccgtctttgaagccaattcttgatgagatagagcgtggtggtccatctgcaatggtgaagtactggaatgaccctgagattcttcaaaagattggccaggctatgtcattgaacttcccagtagatgctgctacttccactgtactatctggacctcaagaaactgatgaagaaggcgaggatgatgatgagtccattgtccataacaccgccagtgtcggtgatgcacagggtctgaagaaagcattagatggtggagcaaacaaggatgaagaagatgccgagggaagacgggctttacattttgcatgtggctatggtgaggtaagtgaatctgttaaactttgttaaacggaaatggattacacaacatgcagctaatgtgaatatcctgatgcagcaggacgtccaccatttgttatgtttttttgtcactactatttgtatgttccatgactaaaaatattgtttggttgaaaatttatttttaccaggtcttcttgttgctgctcaattctattaatctgtgttatgcaatttcttcatttaaacaaatattttattgcaaggaatttgctgcattttttaatcctttgttgtggtatttctgtgttgttgtatagttgtagatatatgtagtgttctgatttagtggccagtgccacatgtggttatatcgtgacatactgacatgtctaatagaattaggtttcaatgttctttcgggttttgtctccactagaatgactaaattcaacgttatctagtcaagtctatcacaatcctcctttacttagtgtttgggacctgctatgttaacataggtggagttaattaggtttcaatgtgtgatcacaaatacagtcgagagcatgcggtgtagtgatgcgtctgtttgtttatttgcatatttagatatctatattagtggcaactaattgagtggtgttctgtatatttagttgaagtgtgcagaaattctccttgaggcgggggccgcagttgatgccctagataagaacaagaacactccgttgcactatgctgctgggtatggtcggaaggaatgtgtggatcttctgttgaagtatggtgctgctgtcacgctccagaatctggacgggaaaacccccatcgaggttgccaaactcaacagtcaagatgaggttctcaagttgctagagaaggacgctttcctatagagaagagaaccgccgaataaagtgtatcaagccgtcaaactattggttttgcattggtttatttatctcggtctggtatggttgtctgtagcttgtgaatttgatgttcttttcatagcgaatgccgtttttgaaccagtacttgtgtaagaagtacctaggcttgttcttgtcctccatatatgaatctttcacacttgtcaagaattgattacagttattttc

SEQ ID NO: 94026 - DNA, 531 bp, Zea mays
  unsure (1)..(531): unsure at all n locations
  Clone ID: MRT4577_185739C.1
cattgggtacctcgaggccggccgggnaaagtcttcgggtagagaaggctgcagctcccccgcgtgggcgactcgagcggcaaaaccctagccgctaccgccccactgccccttctctctgtctcacggctgccagaggggttggccggcatgcccgccgggcccccaggatggtggcggcgacgcatccgcccagttggcgtcgcgagcgcccagatccacgcgggagggaactcgtggccggggcgtggtcatggtgttcgtggcggtgccgtgcgctcgcgtgggcgttgcaggtagaggcgcggtggcggtggtgcaacggcccactgacggcgtgcacgtggaagctcaccgtgtcgacgaagttgggggtgaggagtgcgacgccgacccgaagcatcacaggccgggagagcaaccgcctcccacccgccggacgtcctcggcctcgttcgctaccttcttcgcgctgcacggtcggtggctgcaccgtgctgcccgccggggcgcgagctggcgccgatcggc

SEQ ID NO: 94027 - DNA, 846 bp, Zea mays
  unsure (1)..(846): unsure at all n locations
  Clone ID: MRT4577_18573C.1
ttctagtcattagtggaccttctttacagccagcgcgcgtggaggcctcctctgagccagcgcgtggagctctcccagacgggcgacggccgccctcctcagccggctgcccacaacagtcagccgaccggcacaggtacgccgccggccctcctccctcctccctctgcccacaggccactgcgccgcgccgcgccgccccgccgcgccctccaccgacctgtgacctctcacctctgcggctccccctcctccctccgcaagaccagcagccagtgcgagtgtgtgtggcgtgcccgtcaagtgcggcaagtgcggcaacgcaagccttcttctccagggcgtcgtttgccagcgacgagcaccaccaggtgctttgtgctaggatagcagtgctatgtcaaaagctccaggtgatcatttgcaagcaactgagcaggaaggaagtgtccattcaagtcaacaagcagggcaacaacatgtgaatacagcagaccagttctcaaaaacagaactaactgaaggttcaaaaattgaacagcctgtccaagtagagcaacagagttcccacctacaacaagcatatccagaaattcaactacagcaggctgaaacagatagcttccagttagctgaaaaagaaacagggtatttttggtcaacagagttttgcaggcgccaaggtggatgtagcccagcctccagtagttcagcagaatgtaaagcanactgttggtcaacaagcatcatctggtacccnagatacaagggaaaggaccatcgataccatttaatatgttaattccaatcctacaggcacatcttgacagagacaaagatatgcag

SEQ ID NO: 94028 - DNA, 224 bp, Zea mays
  Clone ID: MRT4577_185740C.1
accacgcctctgtccgcgagggcagttgtgtgtaacaccaacactcgcagtagcctgcgcgattcagctatcactccacgcctgactgtactaataagctagtattgatgatcctatcgtctagcacagagacatccgttctcgagatgagtagctatatgcatattgactgggctccgagttgccattgctgcgcctaggccgactgttcagtcagcctatac

SEQ ID NO: 94029 - DNA, 432 bp, Zea mays
  unsure (1)..(432): unsure at all n locations
  Clone ID: MRT4577_185741C.1
cgtttcttaacttggnatcctctaaacggccggcctgttttggtgtttttttttttttttttttttttttctttttttatatatatagggtcaaatcatatcatcgtgggcccattaatttttggttcccgcggacccaatcgggtcaacccacattcctgtggacccccgtccctgtgcccaaaggctggcgcccaacctgccgngggggagattgcaaactggagaactctgtttttctctctctttcacaccccccacatttcctttgtttggcagcccgctcggcctcgctttttattggtcaacccccccccccggctcggtcggtggtcttcctttccctggtcgtcgttcggtgtggtccgccgttgctggggtcgcccttgcggctgctccccgttccgccggcgtgggcggcctcgccggcct

SEQ ID NO: 94030 - DNA, 364 bp, Zea mays
  Clone ID: MRT4577_185742C.1
aaggggggtattgaaacaggtaaacccaactctttacttatcgaatgcatgacaaggccagactgaatttggaacaacacgttttaacacacagtgctgcatagtttgcctccagcgaacccttcggggcataaaaaaacagatatattgtttgttcccgaaccagacaattactatgggctgagcccacatcatgaggccggcgttttttaacctggcgtatgaaacttccagctgggcttttaatgggaggtggactctttcaaccacttgtaatactgctttttaaaccgcgcgcaataaccgttgcggcagccgtttacaatggcttaacggttggtggaggcctcaaaccctttaaagt

SEQ ID NO: 94031 - DNA, 702 bp, Zea mays
  unsure (1)..(702): unsure at all n locations
  Clone ID: MRT4577_185743C.1
ccggccgggtcgggttgaacattgtatgcaaactcaacaagtcattgtatgatctgaaaagaaaaaagaaaatagaaaaaaaaaaaaaaaaaaaaaaaaaaaaagaaaaaaaaaaaaaaaaaaaaaaaaaaaaaaaaaaaaaaaaaaaaaaaaaaaaagagctttagggagttgttgcaaaaagcaaaaaatatcgtctagcatcagaagcatccccctgcagggttggccacataagggggaaaaagtccgttgccgttgccattttgttcgccgccgccgggctcggttgttttgtctcggggtcgttcgccgaccagggaaccgccacttattacaccgtttaaactccgtgggggggttacggaaaccaggacaagggcacgttgatcgggggggcgagggacgggctttgaaacgggggncccggggggggaaccatgtacacggtcacttgcgtggggggaaccaacgaaaccccgaacccctgtaaccccggggcttccgtcaccgccaaaatcgttgaccgttgcccgtcgcccggttgccanaccacgttcgacctctcccaataggccttcgccaccataggaaactctcgggccggnaagatggtattcgattacagccaggggaaaaataatacatgcatgttgtgggaagcaagcacgaactacgtacatacatgcaaaagtttcattc

SEQ ID NO: 94032 - DNA, 235 bp, Zea mays
  Clone ID: MRT4577_185744C.1
gccgggccggacttcatcaccgcggcgagatcaaatcccacaagcttcttgtagcacaccactgtcttcctccaactcggcggcgatgtctgggcgcggaaagggcggcaaggggctgggcaagggcggcgcgtaaacgccaccgtaagggtctccgcgacaacatccagggtatcacgaagccggcaatccggaggctgcgcgaggaggggagcctgtgaaccctatctccggg

SEQ ID NO: 94033 - DNA, 291 bp, Zea mays
  Clone ID: MRT4577_185745C.1
tccacgcgtccgcccactctacctaggactccaactttacctaccatatatacatacatgagcccgggtgcaccttgatcggaccaccaaccttacagctcaattccaacagtagccccacgttcctcatcatattcacataccaagcctaccaagtgctcgacatctattactagaacaacttcttccacatggtcagactcacaaccttccactcagcatcggctgccaaccgccaaccgtcaacctctcactcttatatcccaatacattcgtattaagcacagccaa

SEQ ID NO: 94034 - DNA, 1150 bp, Zea mays
  Clone ID: MRT4577_185746C.1
gccaacctgcatctacttcaattgatgctcaagggatgtttgatgaaatgcagcaaagtgatacctctgttgccatcgcacatactgccttcaacactttcttcaacacggaggagctagataggtggcttgaaagctgcgatgaacagggtgaatcaattggagtcaataagatccatgtgaagcctcagttctttgatgtgggcaaggactataactgggcgaggggcattcggagcaccgagatccagctcgctgatggcaagaactgtgagctacataggtgttgggcagatatcttggatgctataagcaaggctcaacattcgactgacatcactggctggttgactatactggtgagggatgatagcaattctgtcgacctgcttacgaaggagggcttgctgactacccatgatgtggagattgcaaaaggagagcaggaaatcatgaacgaagtatttccagcagagagccggtcatctgggtttggtgtggctatggatcttccagacatatggccttgctatgagtccaaaccatctgatgcgcaaggctatgctgtaaaagggataccaaatctcagaaacacatgctatcggagtgcagtattgcagtgcctgtttatgctcggtaagctgctagaaaggatactaacatcgacatggttagccatccaagggtgctcacaaattggagtcggcggggttcttcagctgccgtatttgcttgagttctcacctgttctcgaggagctttttgtggaggcaagtgcttgggatgttctttacaactttgagcaaggagacacatggaatgttcaactcgtcggatccattgatggtgctgctgcttttggttttcccgagactcctgagcaagctgcaagagctagacttgtgagtggaattaagcaaccatggcctccacctatggcgtttgagtgcttagatttgtgcatggcctccgacaactcgacgatcatggtcagcggcttgggggcaagccgcatttcaagcggtgggaaatgttaggaatggttgccatatgaggcattagacggggataagtgggtatcttcacctataaaaggagagctgtaccggctgtaggggcatcaaagaatcattttacaacagaaatctct

SEQ ID NO: 94035 - DNA, 475 bp, Zea mays
  unsure (1)..(475): unsure at all n locations
  Clone ID: MRT4577_185747C.1
gcggagcccacgcgnntccgggagatttcttctccagatcacgccccgtggaacaagggacaagacacacnnttcttttggtttctgtggaagtgcagatgnnatattcagcttagtgattcgtatgcgccacgtggaaaatagactgggagaatcacaactaacaaaacaaggagtgttttagaggaaacgtgacaagaatttctgtggatgaacaaaccaagggcaatgggcgttggcttcatttatgacctcnttctctggtttanttcctaaaaagaagttttctttgaaaccaaggatatggaaagcaaccacttatttccgagctgggtatttnncaaaaccgnntcatgcaatgtagttgttgcttccacaatcgcgnncagtctggtcaaggtatttcaagggcgtcactttcctcgnngcatcttaatgtatatgnnggtgtcaattcaaggtgccggatgaatgt

SEQ ID NO: 94036 - DNA, 387 bp, Zea mays
  Clone ID: MRT4577_185748C.1
aaccaccaatttttaattggttttctggttaaaaaacccggcctttattattcggttgccagggggaaaacacccttaccgggtggacttaatttacccggggcccccacttggttaaaaccaaccttctttgacaaaaaaccttttaataaaataagaacggcccctaaccgggttttttttaaaaggaaagggggtttggctgttctttcccatttcctgggagaaccaacaaccccctggtttggttatggcaaaagggaaataaaccttttaacaaagcaatttgttttaacaaattttttaacccccaattggatttatccacctttttaaaaaattcccctttaaaaccaaaattcctggaaaatttaaaaccaaggggcc

SEQ ID NO: 94037 - DNA, 557 bp, Zea mays
  Clone ID: MRT4577_185749C.1
cttgcaagttcattgttgaactggactaccgaacgaaaggagcaaaaatatggtacaggggggctgaggggagggggagaagagaggtgagaaattggatgggataatccaccctcctccaatcctggcatgctcgtcatcactcatcatcagagtgcaacaaatccgccatgattaaacaaaagcaataagaggaaaaagggcgtggagcaggaggcgctccctgatcaaaacagccactactggcactgatgagtactgaccttgacgagaccacgcagtccttgctggtggtccccttcccctaatctacaagaaccggcgagcggcggcggtgggccacagcccgatcagttccaggcgccccaaaccttctccccgatgaagcgcaccagcctccccaccgtgctcttctcggcgctgccaccgccctcgctgtccaccgacgcgtcgtcgccgtccacgctgctggtctcctcctcctcctcgtcgccgtcgccgtcgccgtcgtactctccgtggcagcggtggtccatgtccatcccggagccgccgtc

SEQ ID NO: 94038 - DNA, 189 bp, Zea mays
  Clone ID: MRT4577_18574C.1
gcactattgtgcccccactgtcgcccaaaatattttgctgcggggggctccttgggctctctgcaagagctcttaccccgaccacattcccacacagcgcacaagctcctatatctttctttttttccccatacctctcacaacaggtgtgtttagtatgtgaaaacacaattttttaaccctacatga

SEQ ID NO: 94039 - DNA, 221 bp, Zea mays
  Clone ID: MRT4577_185750C.1
ccgtgtgctgatcgcccttagcggtgagaacgggccttagcgagaaaaaaaaaagacagctttttttttaaaaaaaaaaaaaaaatttttcttggcgtcccgcttggggaatcgggagtcctccatttttgtcgtcggctcaggggggggggggttcccttcgggcggttcgttcctgggcgtgggttctcgcgcgactgggcggcctgggttcccccttt

SEQ ID NO: 94040 - DNA, 714 bp, Zea mays
  unsure (1)..(714): unsure at all n locations
  Clone ID: MRT4577_185751C.1
atttctgcatcgccgacatccgcgacttcttactcacctacctccgcgactctgacctttcccccttctcagaattccttgcgccggtcgcccctcttccctcacaacaacagcttgtcgcagcgcctttcgatccagatcgcatctccccagngatccaccccgagaaacctgggctgctcgctgccctgcctggatactgggatgcaatgtgtcgcattgatggccggggacaaaacccttgatgcaggcgccgttgctttcaacatcgtcttcatggaaactgcagttgaacccctcctgtcgcgtgtggtgtttgcgggccatgtgcgcactgtcctcgaggactcgacacacgcaactcagcgtgagctcttcctctcagagaagatctgcggagaaagtgctactgcaactggcgccagagcccgaggaaggttttccctaggtatgctctctgatatgaaaatgatgctgtcaagaaggaaattcagctgcagcttgagaagatgaacaaatatgcttctgctatccgtgtcattgctcatacccagattaggaagatgtagggtttgaagcagaagaaggctcacctgatggagattcaggtcaatggtggtaccattgctgacaaggtggactatggctacaaattcttttgagaaagaggtcccatgctgatgctgtcttccacaacgatgagatgattgacat

SEQ ID NO: 94041 - DNA, 800 bp, Zea mays
  Clone ID: MRT4577_185752C.1
cattgggtacctcgaggccggccgtccctcggtcctcccaccgtctcgcgcggcatctactgtctctgtacgctgctgctgctgccgtccatccacgtccctcgcgcacgctcgctgtctttcgacctcagcttctccaagccccagagccccggcctctcccagctggtcaactgcaccggcgacgcgtacatcaccccggacacgctcgagctgacgaggaaccggcgtgaccagagcagcacgtacagcctcggccgggccacgtacatgcacccggtgccgctgtgggacgcccgcaccggcgagacggccagcttcaccaccaccttctccttcctcatcagcccggacccgagcacgttccccggcgacggcatggcgttcttcctcggccacttcgggacgagcatccccaccaacagcagcggcggcatgcttggcctcatgccggccttcaccaacggcacgggcgacggcaccgtcgtcgccgtcgagttcgacaccttcctcaaccacgccaacgacgacatcagcggcagccacgtgggcatcgacgtcaactccctcaactccacggcggccacggacaccagcagcacctcgcgggccaacaggaacctcacgtccggctacgagatggtggccaccgtgtcgtacgagaatgtcaccaggttcctggccgtccagctcaccatctacgacacgtcgtacaacgtcacgcgaccgtcgatctcaaagcacctgccgaaacgcgtcgcggtcggttttccgccgcgactggaaaaggggcgagcaca

SEQ ID NO: 94042 - DNA, 650 bp, Zea mays
  unsure (1)..(650): unsure at all n locations
  Clone ID: MRT4577_185753C.1
nactcaccttatgcggcgctgtgggagcagagttgcccacgtcgcccatcccctcccccctgccgaaatccccacgcaactgcgcagcaccggaggacacaaaaccaccaccgcgaggcagagccggaggaggaggagaaaaatctgcggccgccagctcctcgtcggccagtcagtccccaccccgctacttatacgctcagctcggctcacccctctcccctcacagccccccctctccctcttcttccccggccccgatccaactcagtaagcaaacatggcgccatccatgagtcttgcagcgaaagggctgctccccttcggagcactcccctcgagcggcgtcgcgcagaggccagtgtccgtgaccgcctccctggagcacaagccgaatgattctaagaggaagcttctgaagcttgcgctcggaggagtcggcctgcccgccttgctgactgccaacaaggctctcgccgatgaccagggtgtgtcttcctccaggatgtcctactcgaggttcctcgagtacctcgacaaggacagggtgaagaaggtcgacctgtttgagaacgggaccattgctatcgcggaggccctttctcccgagctcggaaccgtgtgcagagagtcgtgtgcagcttcccggc

SEQ ID NO: 94043 - DNA, 410 bp, Zea mays
  unsure (1)..(410): unsure at all n locations
  Clone ID: MRT4577_185755C.1
tgatacncccgacaaggggaagcacgacgcggggggggctctacaggacaacagcgccgcctccgatggcgacctccaccagactgaacaagcctggacacgggacagcgtgcgtgatctcggaagagcgatcgggtgcccaagcgggtgccgtgtaagtacgcggctctcacaggggaccaggacggcatgcgggacggcatcaacgacggcgtcgacatcgacctgaccgaccagctcgggaacacaccggggctggaggcactcaaccaggggcacgaaccgatggcaccacatactcttcacaagggtgctaaccttaacctcaataacgccggcagccacctgtgcacggcgattgtcaaaaggtggctcaactttactgcgcaccgggacggcgacccgagcct

SEQ ID NO: 94044 - DNA, 368 bp, Zea mays
  Clone ID: MRT4577_185756C.1
aatcatgaaataggaaagaaaagactgcagctaggcagcgcgcgcacaggatcagctccccaattaggggaaacgcggggcaatagaacatctaactatccttcggtggacattggaccgtccggaactactaaagtgaacgcccacctatgtcgctgtttctcgcgccctgagcccagctccgccttcggggtcgcggggctccaaccgcacgcgcgaagcagcaatttttcttatcctccgtctcttcgggctggctagactccatcggcgacgagcctatagactccgcgtccgggcagctagatgtatggggctagtacagtaccgggcggtgtacgggtttgtcaagtgcatctacgtgctgg

SEQ ID NO: 94045 - DNA, 689 bp, Zea mays
  unsure (1)..(689): unsure at all n locations
  Clone ID: MRT4577_185757C.1
aaacccacttctkacttacyactgtwccgcsccgtggtcaccggacggacacacagaacgacgatggccgcctcggcgctgcaccagaccaccagcytcctcgggcaggcccyggtctcccgcmccgccggstcgatkccggcgccgcatcaccatgcgccgcaccgtcaagagccttccccacaacatatwgtacggcccttatcgcyccaagtatyttggcycgttctccsagcagacgccgtcgtaccttacccgcgagttccccsgcgactacmggtkggacacscsggcctctcggccgacccggagacattcggamtthmcccgcagcyggaggtkatccactcccggtgggcgaagctgggcgcwcygggctgcrttttcccsgakatccttgccaagaacggcgtcaagttcggcgaggcggttttgttcaaggccggcgcccagatcttctcggagggckgnctggactaccttgggaacccaaccttggtgcacvcacagagcatcctggccaactkggckttccaagggggtgctcawtkggcttygtygatgggctaccgctttyggcygccggcgccctctggggaagggctccacaaagktgtacycyggcygsyscttctacccgctgggcctcgccgacgacccgcacacycccgccgaactcaaggtgaaga

SEQ ID NO: 94046 - DNA, 369 bp, Zea mays
  unsure (1)..(369): unsure at all n locations
  Clone ID: MRT4577_185758C.1
cctccccatccaggaaatgccnnaaagggagagcaagatcaaaaatttctgggggatccatacgctccgccatcacgcccacgtggcgatgctccttagagcagctaggtcgcttcagtctcggaaggacgatttaaacggtacagagaagcccgtctaccagccagccgaggcgggacacgccggcccataccacgcactcaaggaaggcaacctggacaatctgcacgccatcttcggcatgcacgtggacaccgcgtacacggtggggctcgtcgggtccaggccaaggccgcccctcgccagatcggcgcggtccacggcgaccatcacggcgaaaggcgggcacgcaacggacccatagcacgt

SEQ ID NO: 94047 - DNA, 320 bp, Zea mays
  unsure (1)..(320): unsure at all n locations
  Clone ID: MRT4577_185759C.1
tgcgtcgcagcagggatccaatataagacgacaactgcgacaagctcttaggtggtacaggatgcaacccttgcttcccctgatactacgctcggacagcgagctcatgccatcacgaggaactcacacgaccattggcagagtcacttcangactgtacgacagcattgatctcccatatcaagaggtgtaagagccttcgatccttgactgaagaggtgagggtgctatcacacctcctaagtgtgtgtgcagaactcactccaaaaaactcatttagcagcgatggagatatgctagtcatgtggtacaggaaccac

SEQ ID NO: 94048 - DNA, 685 bp, Zea mays
  unsure (1)..(685): unsure at all n locations
  Clone ID: MRT4577_18575C.1
cattgggtacctcgaggccggccgggatcatacatacgacatagaggaggaggggtttatatatgacactgatactgatgtgggccgccctgctcctaactatcaccgtattgagcgcagagcatgagatcgcggacgatcgtcactgcggcgcatgttccacacgatgctgagcccccacaagtacagccggaggcaggaggtctttgacgcctacgacgtcttcgtcgacgacagctacaagctgcccggcttcgacatgaccagggtcctcgacacgcgagatgcggcagctcgacgtcttcttggtcgagaacgcctgccaaaactgcggtgtctgtcagattgctcagcatggaccgtatgactgggtgatagtgccggatgaaagaacacaaacagacggacttcccctactatgtgcacagacccgtacagctaactcataaagacaactactgggtcggcgtccaagagctgtaacctgaacctggcgggggacccgtgcctggtggagagagactgcgtgtcatcacttcaagacggccatgctgggtatgtgtgacatgcgcactagacctagccctcctgtcacgccgtgatgtacggtgaatgcaggacatatgatcagcgatcgcaatgcggntactgtccccgatgacggcctgactacgaacgtcatcaa

SEQ ID NO: 94049 - DNA, 306 bp, Zea mays
  Clone ID: MRT4577_185760C.1
ggaaacaaaatcgggtgtctttttcccaacattataccccccttatttttcccctacatttggcatttacaacagccatagctttagcagaacggggggcagcccttttttgatttttggcacaaccacaacttaaaaccgggttactaaaaaaacaaaaccgggggggctccaaattttcaacagggccaaacaaaggtctcccaaccaaaaacttttgaggggcccagggactgaattatccaggtggtttttgggttgggcgaacgaccacaggcctttgaaaaaacccgcaaactggggggg

SEQ ID NO: 94050 - DNA, 443 bp, Zea mays
  Clone ID: MRT4577_185761C.1
tatatttttttttttttttttttctttttttttcggggttttttttttttttgagggggcatgaaacattggggaaacatgtaaaacttcacaccccagtgtggggtgccaactataatcttaaactttacaggctacagccgtttttagaccgaaacatacacaacgtcattttttgttggaacaatatggggatagccttaatgtccaaatcaaaaccctatgcatgtgggaagggaacccctgcaggagccatattccccgaagaagaactcctttagaatttaaaccagggccagccagcttcgaaaggaacaaaaaatttgtttttgcttacaccacatgcttgtccaaaagaacagtttgatgctcccctacaaagggttgaagatgttcacattgactatcgtgatggtcaagaaaaggggcaggcttttttttct

SEQ ID NO: 94051 - DNA, 204 bp, Zea mays
  Clone ID: MRT4577_185762C.1
gtacaaacttttatgacatatgggaaacatcatgtatttgatcaaaaaccatcccatcaacctaacattacataaatctgcgactatgaccaccacaaatacccgtaacgcacacacacacttggtataaaacagtgaacagcgatccaaatttgctgatcgccacatgctattcacaagactaatgtacaattcttgccgacc

SEQ ID NO: 94052 - DNA, 673 bp, Zea mays
  Clone ID: MRT4577_185763C.1
gcgacccctgctgaagaacccgtggaggacatctttttcatttcccatgggggtatctccatcggcggcaagcggctcgacgtgccggaggccatcctcgcgctgaggcccgacggcaccggcggcacggtgctagactcggcgaccacgctggactccctcggggcgattgctttcaaggaggccggccgggccgtcatggaaggcatgaagctgccggcggcgaacaggagcatcgacgactaccctgtgtgcttcgagctgccgcgtggcatgtccatggaaggggtgcaggtgccgcctctcgtgctgcacttcgctggcgacgcggagatgtcgctcccgcgggacagctacttccaagagccgagccccgggatgatgtgcctggcggtgatgcaggcgccatttgaaggcgcccccaatgtcatcggcaacgtgcagcagcagaacatgcatgtgctctacgacctgggcaaccgcaagttctcctatgcgcccaccaagtgtgacagcatttgagatgctacttatcacatgcatgcaacgcaactagtaccatgcaaacataattttcgggtgtttttttttgtgcgtctatcttcaaaattcagaggcccagataatttctatagtcgactaattatttcatcaagaaataaagtttttttta

SEQ ID NO: 94053 - DNA, 182 bp, Zea mays
  Clone ID: MRT4577_185764C.1
tcggctaggcagcaagttgcattagtttaatttggagctaccaacaatggcggccagacgaggcggcatggcgtccaggacgccgccggcaacgaccccaacatcctccccgcgctggtccgcctccagttgtacgactgcctggtgaaggcgtgcgacgagacgctgatcgactccctccc

SEQ ID NO: 94054 - DNA, 111 bp, Zea mays
  Clone ID: MRT4577_185765C.1
ttgtgaatattatacaatgcagatgggaagtttttttgaagacttcattctattctaattatggatttatgttcaaaggtgattagaactggaataaattttagttgctcc

SEQ ID NO: 94055 - DNA, 682 bp, Zea mays
  unsure (1)..(682): unsure at all n locations
  Clone ID: MRT4577_185766C.1
gggaccctcgaggccggcccgcgttctcccggcgccgttccgcctgcgtgacggcgccggcgccgccgccaggtccttctcggcgtccttcgtcttcgccatcgtgtccaactacaccgtgctcagcgacaacggcatggcgctggtggtcgcgcccagcaccaggctctccgccttcaacgcggggcagtacctgggcgtcctcaacgtcaccgacaacggcagggacggcaaccgcgtcttcttcgtcgagctggacaccatgctcaacccggagttccaggacatgaacagcaaccacgtcggcgtcaacgtcaacagcatgaggtcgctgcggaaccacagcgccggctactacgacgacgccacgggggcgttcaccaacctcagcctcatcagccgccggcccatgcaggtctgggtcgactacgacggctccgccgcgcggctggacgtggccatggcgcccgccggcgtgcccaggccgcggaagccgctcatctccacgccgctcaacctctcggcggtcggcgcggacgacggcaccgcctacgtcggcttctcggcggncacgggcgtcatctacacgcgccactacgtcctgggctggagcttcgccacgggcgccgcggccccgccgctggacatctccaggctttccgcgctgccggggttcgggccc

SEQ ID NO: 94056 - DNA, 107 bp, Zea mays
  Clone ID: MRT4577_185767C.1
cattcacggaccggtgacctcgcaaggcgtagccagctattccactataggtgagtctcattagaggcttggcataagtcatggtacatagctgtttgccatgtgtg

SEQ ID NO: 94057 - DNA, 614 bp, Zea mays
  unsure (1)..(614): unsure at all n locations
  Clone ID: MRT4577_185768C.1
agtaccggccgccagtgtgctgngatnctccctttccggcggccgggccgaggggctcgctttgggcgtgattttgtgcatgtgggcgttggttgtttagactggccttgaaatatgattgcgttcgctgcggggctctgcttccttgcccgtgggtggcctgcgggcgtcctcggtgcggcctccctgtgggcgccttctgcggtctgccggggccttgcttttttttttcgccttcttggtctggggcctttttgccttttttcctgcccgttttccttcccccgggccgcggttttcccccccgcccccctgtggttgccccctgtccttcccggtcttctcccttttccccctcttctccccttttcccccccccccccccccccccccccccccccccccccccccccccccccccccccccccccccccnnnnnccgggcctccccgccccccccccccgcccccctcttcccgcccgcccccccgnccccccccccctcccctccccgcccccccccccccccccccccccccccccgcccccgccccctccccctccccccccccttcccctccccccctccccccccctcccccccccccccccc

SEQ ID NO: 94058 - DNA, 851 bp, Zea mays
  Clone ID: MRT4577_185769C.1
aaatgacgagcagggaccgccccaggctgctcttcgacacggtgtgcgcgctcaccgacatgcagtacgtcgtcttccacgctaccgtcggatcccaggggcctcttgccattcaggagtattacatccggcacaaggacgggcgcacggtcgacaacagcgccgagaggcagaaggtctcccggtgcctcgtggccgcggtggagcggagggccactcatggcgtcagggtggaggtgcgcgccgccgaccggtcgggcttgctatcggatttcaccagggtgctgcgggagcacggcctgtcgctgctgagagttgagctcaagaggcacaaggacgaggccttcggcatattttacctcgtcacggacaccggcggcgaggtgcgcgctgagtcgttgcgcgccgtgcaggcgagggtcgccgagatggacatctcgctcgacgttgtgaaggaggcccctggctggctgccggtgaggaagactagcgtaccaaccccgcccgccgccgggtctcagcctctggagaggcccagaccttccctggggagcctcctatggtcacaccttgggaagctctcgaataacttcaacaacatcaggtcttgatacctgttcgcagaatgcacctgttgttctgcatagacgcttccattggtgcgtcggttccaataacttcctggacctcgagtaccaagaatttatgtcaggaagcagtacaaaactgtacataaagtgtatcagataaaagtaagcagagtgacgttcaatttatcaagaacttaggtgtgtttggttcgagaaataactttatctaaaatgagatgatgcattataagtatatttctc

SEQ ID NO: 94059 - DNA, 523 bp, Zea mays
  Clone ID: MRT4577_18576C.1
ccggaatttcgggcgcgactccacgcgtccgatttagcatgcacacgaagcctaatcgagattaacatctagcctaacaagaagaggctagcaatatattaatccttagctaccattcttacgctttctggaagcggatcagatgcgctcattcttacacaatgctcacttttttatagttccattattccacagttcctcccacattcctgggtggcctttaaacacccacctgtttaagcctatcggctacaacaagccattgctgttagctatttacaccaaccaatagtccaatggcaacaactttccttggcacatatagcaatacccaccattgcaccgaatctaaaacaacaggtgctaacaccacttacccaactagccataatgaaccctagcccctacttgaaacacctgctgattagttgcaacccactaactgtaacagacgcactccctttccagtaacaaaaaccactgccgccggtggtgccacctctcagttaactagccataggtg

SEQ ID NO: 94060 - DNA, 1190 bp, Zea mays
  unsure (1)..(1190): unsure at all n locations
  Clone ID: MRT4577_185770C.1
gcgcaatgttcttctaaaaattaatgctaagcttggtggaatgaactccaaactggcactggaacatcgtcaaatgataccagttgtgactcaaataccaacattaattcttggcatggatgtttcacatggttctccaggtcgagcagatataccatcaattgctgcggttgttggatctagatgctggccattgatatcacggtacagagcatctgtgcgcacccagtctccaaaggtagagatgattgattctctatttaagccactggatgatgggaaggatgatggcataatgagggaacttctactagacttctaccaaaccagtcaacaaagaaagcctaagcagataatcatcttcagggatggtgttagcgagtctcagtttagccaagtactgaacgtagaacataatcaaattataaaggcatatcagagtatgggacagggggaccttccgaagttcacagtgatcattgctcaaaagaataccacacaaaactcttccaagctgattcaccagagaacgttccacctgggactgttgtggactccggcatagttcatccaagacagtatgatttctacatgtgtgctcatgccggaccaattggtacttcaaggccaacccattaccatgtgttgcttgatgagattggcttctctgcagataatctccagaagctagttctttcactttcatatgtgtaccagaggagcaccactgcgatttctgtggtggcacctatctgttatgcccacctcgcagcagctcagatgggccagttcatgaaatttgaagagtttgcagatacgtcgtcagggagtgtcaattcatcatcgccaccatcaataccagaattgccacggctgcatgctgatgtctgcagttccatgttcttctgttgacgtgattttagtttgaccgttgtggggtagggccaattctttgtgaaaggaaccttaccttatatgttggcacacagcaggctaaccgtttttgtgaagaaaccatgtaggtcgttagttgtcgtatatcgcacgcgtgcatctttttggagcggttttcggctccccccacccacaggtggcggttccgttaggtacagtttccagattttaacgatgctaatacagtaaaagcagtttgtacattctacgcagattttgcagggatacgtggttng

SEQ ID NO: 94061 - DNA, 498 bp, Zea mays
  Clone ID: MRT4577_185771C.1
gtcggatcccaggggcctcttgccattcaggagtattacatccggcacaaggacgggcgcacggtcgacaacagcgccgagaggcagaaggtctcccggtgcctcgtggccgcggtggagcggagggccactcatgtcaggctcgaccattcctcgccgccatacttatcgggcgccgaccgccgcctcgttaaactaacacgcggccggcgttgaacgttgcagggcgtcagggtggaggtgcgcgccgccgaccggtcgggcttgctatcggatttcaccagggtgctgcgggagcacggcctgtcgctgctgagagttgagctcaagaggcacaaggacgaggccttcggcatattttacctcgtcacggacaccggaggcgaggtgcgcgctgagtcgttgcgcgccgtgcaggcgagggtcgccgagatggatatctcgctcgacgttgtgaaggaggcccctggctggcccgcggtgaggaagactagcgta

SEQ ID NO: 94062 - DNA, 932 bp, Zea mays
  Clone ID: MRT4577_185772C.1
atgtaacaacagaggggcttcttactgtatgtacccgttcacacaaaacctggaacgtggctaagtgtctcagcaatgggcacaatgtacacctctttgtaattccatggactgtatacctgaaatgaactccattttagactgacactcttgatataatcggaggccggctcgcaaatggccagtgaacaggctctgcaatctacagctctcatgggatgggagagatgactactttgccggttgccctcccggtctcaaggtaggagaacgcctccacaacctgcgagaaggagaagggcccctccgggtcgatgagtggcttcagcttccctgactcgaggtacgggttgagcttctccaagacggagccgttggaggtgacgacgaaccggaaccctggagggctgacggcgccggtgagaaccaccacgctgccgccttccttcactaccttgacagctttgtcaccctgaccgactccgtcgaagacaatgtcgtatttgtccggtagctcttccaagttctccttagtgtagtcgatggcgacatcggcacctaggctcttgagcagctcgatcttcttggtgctggccgtcgcagctaccttggacgcgccgtagacatgcttcgctagctggatcgcaagggagccgacaccgccggcgccaccgaggatgaggacggacttgccggcggatattcctgccctctccaggccctcgttggcggtctcgacggctagcggcaggctggcggcctgcgcgaagtcgaggcccttgggcttgagcgccagcagcttctcctcgacggcggtgtattccgccagcgagccggactgcttgggcccctgcagcggattctcgctgaccatgccgtacacctcgtcgccttccttcaacttcttcgaatggctgcccaccatgacgacg

SEQ ID NO: 94063 - DNA, 3692 bp, Zea mays
  Clone ID: MRT4577_185773C.1
cattgggtacctcgaggccggccgggacacttcccatccccggacgcccactccagtactccactacgcctctgatcccgtgccgagtgccgccatttcccgtgccccccaccgccgccccgccgccgacgcgatccccatcacgcgccgcccatggcgccccacctactcaccccaccagccctcaccgttacgggcgccgccgccccaggtcgcctcggcagcgccggatcggcggacccgcggacgcccaggccacgcgcgccgtggcccactttctgctcctcccccagcagagggcggcgggagctgaggaagaggaagggcttgagcgtcgcggcggcggcggaagtagcggagccgggtgggcccgctggggcgatgcggctcaacgagtacatggtcgctgtggaccggcccctcggcgtccgcttcgcgcttggtgtcgacggacgcgtcttcgtccattcccttagaaaagggggaaacgccgagaagtccaggatcatcatggtcggcgacacgcttaagaaggcaggcgccgacggcgaaggcctcgtcaccatcaaagacctaggactgcgctgagggacaagtcaggaccatgcagccttgtccttgagagaccatttgctccttttccaatccatcagttgcatcaaaatgaagattaccacattctatttaacagaggacgagctgctgtggcctcttggaacagtgctgtttggtctacaaagatgaacgaatcttctactggggatggaaaattaggttttgctgtattctccccaaggttgctaagttctcaaggatgggctcttctgtccaatgagaaaggtggactcaatcagagtagcactaaccttgccaatcgcgtaagtgagattgttggtttatattctgatgaagacgatgacaatgctgagtgggcacatggtagctttcctttggaagagtacattaaagcactagaccgtgctaaaggtgaactgtactataatcattcactgggtatgcagtacagcaagataacagaacaaatatttgttgggtcatgtatacaaacagagaaagatgtgaagatgttatcagaaactatgggtattactgctgttctgaatttccaaagtgaaagcgagcgcattaactggggaatcaattctgagataatcaacagttcctgtcgtgagaataacatcttgatggttaactatcctatacgagaggttgattcattggacctaagaaagaagcttcctttttgtgttggtcttctgttgcgtcttataaggaagaactaccgcatatatgtgacttgtaccactggatatgatagatcaccagcatgtgtgatatcatacttacactgggttcaagatacacctctccatattgctcacaagttcatcactggtttgcactcttgtagacctgacagagctgcaattgtttgggcaacttgggatcttattgctttagttgaaaatggaaggcatgatggtagtcccacacattcagtttgtttcatttggaacagtggtagggagggcgaggatgtagagttagttggagattttacaagtaactggaaagacaaaataaggtgcagccacaagggtggctcaagatatgaggctgaagttcgacttcgacatggaaagtactattacaaatttatagttgggggccaatggaggcattcgacttcgttgcctacagaaacagatgaacatgggaatgtcaacaatgtgatcagagttggcgacattgctcggattcgtcctgctccaagccagctacatataaaagacccatctgttgttaaggtcatagaaagggcgctaactgaggacgagcggtttttattggcgtttgcagcacgccgcatggcatttgcaatctgcccaatcagactgtccccaaagcagtagacgtgtcggtcgtccttctccgagcggaaccaggcgtcatcgaggatcagcgattttcgaagctacagaaaactcatgtatgtaacaacagaggggcttcttactgtatgtacccgttcacacaaaacctggaacgtggctaagtgtctcagcaatgggcacaatgtacacctctttgtaattccatggactgtatacctgaaatgaactccattttagactgacactcttgatataatcggaggccggctcgcaaatggccagtgaacaggctctgcaatctacagctctcatgggatgggagagatgactactttgccggttgccctcccggtctcaaggtaggagaacgcctccacaacctgcgagaaggagaagggcccctccgggtcgatgagtggcttcagcttccctgactcgaggtacgggttgagcttctccaagacggagccgttggaggtgacgacgaaccggaaccctggagggctgacggcgccggtgagaaccaccacgctgccgccttccttcactaccttgacagctttgtcaccctgaccgactccgtcgaagacaatgtcgtatttgtccggtagctcttccaagttctccttagtgtagtcgatggcgacatcggcacctaggctcttgagcagctcgatcttcttggtgctggccgtcgcagctaccttggacgcgccgtagacatgcttcgctagcttcattccacatcaagagcagaggcagcagcattgcaaggttgagttcagtcttcggtacgtacgtacccacaccaacatgcaaacagtacctggatcgcaagggagccgacaccgccggcgccaccgaggatgaggacggacttgccggcggatattcctgccctctccaggccctcgttggcggtctcgacggctagcggcaggctggcggcctgcgcgaagtcgaggcccttgggcttgagcgccagcagcttctcctcgacggcggtgtattccgccagcgagccggactgcttgggcccctgcagcggattctcgctgaccatgccgtacacctcgtcgccttccttcaacttcttcacctggctgcccaccttgacgacgacgccggacaagtcgtaccccggcacggtcgggagaggggagtcggtggcctggaacttgccggcccgccgcttggcatcgacggggttgagcgccgcggcgacgaccttgacgagcacctggtcctcgcccacggccggcacagccgcggcctcgtcgagcttgagcacgccggcgtccccgtacgcgtcgtacacccaggctttcatcaccccgggcacctccgtcgccatcgcggccgtggccggggacgaggacgcggacaccgcgacgacgcaccgtcccgaccgaccagcttccgaagctgttcttctaccggcggcgaccctcggcgctgacgacgggacgacgagcttcacgggagcctgaggtggccacggcaagaagtatgatctcgagtacgaagtggccgggatcgacgtagagaggaacgcgtgcatttttttctctctctctctcgatggctcgtctctgatcaactcagttcagagcctgtgcttatgagcaaattgagcaggatgaacgttgcaggtgttctctgctgctctgcttcactggctgttgttatccgtttgcggccgtcaggagtggcgggtagcgctcggggagacgacacttgtggcttggattggcgcgagtcgcactgccagcgtcg

SEQ ID NO: 94064 - DNA, 282 bp, Zea mays
  unsure (1)..(282): unsure at all n locations
  Clone ID: MRT4577_185774C.1
ctgcggactccgcctccagtttggtctgtttcttgcaagttgctcttgcggtagttcccccaactgtcaccatgcagnaacgaggagggtaagactgtggacctctatgttcccaggaagtgctcggccacaaacaggatcatcactgnccaaggaccatgcctctgtccagatcaacattgagccacttggatgcgaatggcctgtatgatggtcacnttcacaacatttgctctctcttggttgtccgtgctcaggcgatgcagacactccttgacagct

SEQ ID NO: 94065 - DNA, 339 bp, Zea mays
  Clone ID: MRT4577_185775C.1
catactgtcttttttttttgtgggcggggtcaactaggattttcattgcgcaacataactgtgttaaagttgagacatatttttacacttttgttgtatacaataacacaatatttagctttgtctcatacccaaacatgataacgatgaggggcttcacgctgaattggtaaacccggaagcattactttctggtcccttgaaaaaattttcgggggaaatcactcccgcaggggtcgataaagaaccccattggtgtttgggtttttccttgggcctgaatcttgaataccacctttgttgccccacctttttttaacactgtaagagcccacattg

SEQ ID NO: 94066 - DNA, 244 bp, Zea mays
  Clone ID: MRT4577_185776C.1
agagaaagctcagggagccactgatccatttggtcagcttcgccagtgatcaagcattcgggtgattgaccctgatgacctgctggtatagtcgctagggaggagcgaactaagcgagagcgatcccacatttgatcagaggatgtgggtagagacattcaggggattatagacctggtccttgacaagggacgagattacatattggaacgtaaacagcatttggctacagatctatcacgat

SEQ ID NO: 94067 - DNA, 615 bp, Zea mays
  Clone ID: MRT4577_185777C.1
cttctccgcgagatttccccacccgtcttcttcctccgaaaccctaatccccaaatcggggaatcggacccagcccggcgccgcggaaagcatccccccatcgaccggcatggcgattgctcgcactggcgtgtacgtggacgactacttggagtattcgagcaccctggccggcgacctgcagaggatcctctccaccatgcacgagctcgacgagagggcccatggcattttgggtcagactaaagggcagatcaaatttctcctaggggtgccatcccatgggttcgacaggccaaacgtggtgcatgatgagaatgcctcggagaacatgacgagggatatcgaaaatagccaggacaatgcgcttagtctctgcacggagaaagtgttgctcgcacgccaagcttatgacctgatagagagccatatcaaacgtcttgatgaagacctaggccagtttgcagaagatttaaagcaagaaggaaaaatacctccagatgaaccgcatatccttcctccaatgccggtgggtggcagggatgaaagacggaggtccagttttagtacaccccaagcagcaaggaagtttgtcagagagaaggaatgggagag

SEQ ID NO: 94068 - DNA, 655 bp, Zea mays
  Clone ID: MRT4577_185778C.1
ccggccgggacctatcctgacctccgaagcactggccttgactgatgtattgtctccactctgccgctgagacagaaaggccccgccgccgcccttcccgcaagcagccggaccttccggcagccagcttaggcagcggcgtggcagggagaggcccacgatggggcggcgcggctgctgctagggattatggggagggcccgagtcgcccgacgcatgggcaaccaggacgcttctatctttttcaaagctcccaagctacgaacatgcgtcacacgcacccattccaatgacaacagctgaagaaaacaaataacactgcagctgctgcacactcagacatgtacaaatgaatctgcacatgcgtcacatccattacttttacaaataaatatgcaattggagaaagacacaatcgtgccggacgaaatgctcgtggctcgctggctcgctcggttcatggtcaattcggttcggctcagatcggctcgtttgaattttttctcgagctgagctgacatcctagctcggttcgttaacgagtcagctcgcgagttaaacgagctaccatattctaacaaaatgaaactatattcatatcatttataaaataattgatgaacatgttatacaaaaaaaaaaaaaaaaagcggcc

SEQ ID NO: 94069 - DNA, 321 bp, Zea mays
  Clone ID: MRT4577_185779C.1
aatcttgactgttcctgtcgttgatatggcccctgggctatgaaaccgatgttaaacccacgcctttgcttggattccgttatcccttagagatttaaagtgtagcgatttttaaaaaatttaaattttgtgtaaaagttaattgaaagcaaaagaataaacattcttaagacatttaaatttattaaattctaatttaaaatgtaaccgttatctccagggcctacccaagggtctgcaaatttaaatagaaggccagttagtctttgaaatcgtattttagtctgtgttaaataaagtaataaatgtcgacgcggccgc

SEQ ID NO: 94070 - DNA, 219 bp, Zea mays
  unsure (1)..(219): unsure at all n locations
  Clone ID: MRT4577_18577C.1
cctctanagcatgctctttgcgcgcccggcaggtacttggcggagttgggtgtcttaccaaaccctttgcatgggctcgccggcatttgttggtctggtacgcttacttgtcttatggttgaggtgctttatctatttttggttcatcgcttgttgttttttctggtccattcttccgcttttccaggggggggctgcgggcccactgcaccagatgct

SEQ ID NO: 94071 - DNA, 128 bp, Zea mays
  unsure (1)..(128): unsure at all n locations
  Clone ID: MRT4577_185780C.1
ggggtgggctaacaaaagggtgggccattcttcactccactcctttcatatcccaaccaaacaaccgacacaacangtctaccaacccctaatccaaatgtaccactctcactaacacaatcccaaaa

SEQ ID NO: 94072 - DNA, 396 bp, Zea mays
  Clone ID: MRT4577_185781C.1
gtggacctggacgcggcctacgatcctgcgacagacgcaggatagatgtgcgcgctgcgaatgcgaccgacaactcgaataataaacacctgtgacgcaccagacgaacggcttggagatgagacgagagcaacacatagcggctctctagtgacgaagaggactgctttataagctccacaccgtacacaaatgccggatctgctatggcgagcgagggtgttagaaaaccaaagctacctgcacacaccatcctacaacgtgaggagaaaaaaacggctcttggcctccgtcatgaccaacggctactaccaacaatacgtcctcgcgctgaacgatgagccaccgctgatgctgatcgaccagaaacactggatggcagacagcgagctgatc

SEQ ID NO: 94073 - DNA, 638 bp, Zea mays
  Clone ID: MRT4577_185783C.1
ttgcggtttttcccatccagcttctctcgcctgtcggctgtcgcgttcgcatcgcatccatggcgggagcctccgcggtcgccgtgctgcccgtggccactccagccgcgccgcgccgaggaggcgccgggccgtgctcctgcttggcgccgcgaggcagcagcttctaccgccgcatgaactgccggcgtgatagccccagcgcggccgcgcctacgaggcgacgcgtcgtcgcccgtctctccgggcgcgaccccggcgaggccgggaccgacgcgggcgtggggcaaatcctcaagggtgatgactccggctatctgtggacattggtgcttgggtcccttggtggcgccgcggttatcaagtacggaagcatcctgctcccggacatcacgaggccaaacattgtggtagctctgctgatggtgtccctgcccgtggtagccgcggtcttggctttgctcaaagcgagctcggtggactgatagtgatacgacgcgaggactccacgaaacctagaattcgagattactgaaacttgtttctaatgatagcttcatcgcatcttgtaagatgaaaatgtttgaactctgctgaatgatctttttttggtaaaaaaaaaaaaaaaaaggccccta

SEQ ID NO: 94074 - DNA, 135 bp, Zea mays
  Clone ID: MRT4577_185784C.1
accccaaaaatgggcccataaataatttttgggtaagtttcggtccgggtgtccaaatttttaacataataatgccgcaccattaaaagttgctagaacacacccccggttttaaaccgatccgggtaagtttct

SEQ ID NO: 94075 - DNA, 254 bp, Zea mays
  Clone ID: MRT4577_185785C.1
gatctgtagatgctatctgctcaggagatcatatggcacttatcggaatgtcgttaggtgatatattaagagagtcacatgacctaacaagaccctagtgaattcttctaagtgagctatgaggaagaatatataatgactggtatcttcagcttcttgactactttacctttgatgtctgagtcatggtacacgatgaatgaactggactgcagtcttaatcaaatctgacataagagatgaataggaacatc

SEQ ID NO: 94076 - DNA, 918 bp, Zea mays
  Clone ID: MRT4577_185786C.1
cacccgaactcggacgcgtcgtcctcgcaccagtccctcctccttggaagcgagggaggagagtggagggagagggaggagcgaggcaccggtgagctcgggaggcggcgtggggcttgcacgccggccctacccccagctcactcaccacgctcttctctcaccaactctctctctctcttatctccttccaagattcccccatttttttgttgttgtcccccccattcttgctaggatcattccttgatctttcgctcgctccagtacgcccgttttccagctccggagatcccatctcggccacctcctgcggtctccaagctccaagaggccagattccagcacaaatttgaggtcaatttgcccgctgagctcgaatcaatccgctcggcaacaagtgtcctttgttcccccgatccccgggcttcgattcgatcgaatccgacctaattttattgtgtgtgtgtgtgtttaaccttctctcgctgcacttttcctttctcctccctgtcgcaaagtgggttccatcgcgtcacccgcacggctcctccgatcgggcggagaaagaaagcgcataaaaggcgagctcttgatgcggtcttggtcgtagcaacagcagctccactgctcccggcatcgcctgctgttgtttatccatatacggacggagcagcgggcgctccggcagaggcagtggcagcgcgctccccccgccagcgcgtgctgatgcttgcccccctgctcgccgccttcgctgtcgtcttcctgctcctcctgtccaggccatgcgcccgtgacatgagactgttcctcgcctccctgtgccagcagctcgtgctgtccctgctcgggttcctggcaggcctccgcctgctcagcggcgtcgcggccgctctagaggaagacagatccaag

SEQ ID NO: 94077 - DNA, 830 bp, Zea mays
  Clone ID: MRT4577_185787C.1
ctcttttccgccctccacccctcgcgagctctccacccctccacacgaccctcctcggcggcggcggcggcgatgcagatggcggcgaccaccaccgagtcccaggcggccgtgccgcctcaacaccctcacgcccacccccacgcttccccgcagcatgctcacccgcaccaccacatgccctagccacgtagcggtctcaatcccgtacccgccgccgacgatcatgccgacctcatcaccaccgccagcgattcatggcgagtacttctctactgcatccaccacaccgacccaagcttcctgtgggagttcttcgtggagcacgccctcgtctggatccgggtgccaacggcccgcaagaatacaaatactaccgcgactccttgataccgaagttgcaggagcaaacgtatctacatatcaggctcacggacgctcgggaagggcgcttgactgtacgacgtcatgctcagatacgccgcagacttcgatttccatgaggaatgagggcttatcaactactgtgctttgccatcggagacaaatcaagctaaagataatagggaagaggttgcacaacaggcctcgttgtcttctgtggcaattgcacccaataagctctgtaccgattgacgcaccgtgtgtgcgcttgcttactacgcctgcgacaaggcagatataagtctttgtgctagatgctatgtaaataataactaccggccggacctgtctcctgctaacttctaaagagttgaaattactgacgatgcaaaccacattggacagacaaagaaactcttcacttgcttgaagctgacttgcattat

SEQ ID NO: 94078 - DNA, 446 bp, Zea mays
  Clone ID: MRT4577_185788C.1
aaataacatataatttctatgccaatccatctttacttgaacattttctatccatcttaattgttttgctcattttatttgatgttaatattaccaacaatttggatgtatcttgtagaagaaagtcaatacatgacgaaggacgccccaaggacgccataggagaaatacaaaataaataaaggtaccaaacactggaacgaaccacctggtggtgctctctgcgaaggcgtggatggtccgcgacatgggcgcagaagcggtccctcctctgtgtacgtctggacgatcgacacctgggtctcgaatggtctgcgatggcgcagagcgtcgtcttcttcgtagccgacctagattttgcctcccgggaaggacccgtcgaggaggagagatcctagggtgtgtcttggcgtgggtagaccacctaagacacctcttgtcgacgt

SEQ ID NO: 94079 - DNA, 123 bp, Zea mays
  Clone ID: MRT4577_185789C.1
aatgttacttccatgagacttgtcggtagtcgggcggtcttgcagctgcatcctgcactcactcttagcctcttattgcttgtaggcgctagcataggcgggctactcctttgtgaagaatga

SEQ ID NO: 94080 - DNA, 806 bp, Zea mays
  Clone ID: MRT4577_18578C.1
aaaaattacaaaaaaaaaaaaaaaaaaaaaaaaaaaaaaaaaaaaaaccaaaaaaaaaaaaaaaaaaaaaaaaaaaaaaggaaatttcgtgtcctggtatccgcagagagtttgttccgtccaggcaaccagaaagcaagttgccccgccgcgcagaggaagaagagagcagaggaggatggctcgtacgaagcagaccgcccggaagtccacgggaggcaaggccccccgcaagcagctcgccaccaaggcggcgaggaagtcggcgccgacgaccggcggcgtgaagaagccccacaggtacaggcccggaacagtggcgctgcgcgagatccgcaagtaccagaagagcacggagctcctgatccgcaagctgcccttccagcgcctggtgcgcgagatcgcgcaggacttcaagacagacctccggttccagagccacgccgtgctggcgctccaggaggccgccgaggcctacctcgtcggcctcttcgaggacaccaacctctgcgccatccacgccaagcgtgtcaccatcatgcccaaggacatccagctcgcccgccgcatccgtggcgagcgcgcgtagccatcatctccgaggatctgatgaatgtctagttaccaaaaaataggccgtattagcgtcgttgttctgtattcgttattttggattcggttgcagtgaaaaacagctttactaatcttatttgtggcctctggtggttgcttcgcttctaagcgatcatctgtggtgcaaaattcgtgctggctattttgtcaaaaaaaaactaaaaaaattgaaa

SEQ ID NO: 94081 - DNA, 165 bp, Zea mays
  Clone ID: MRT4577_185790C.1
gatgtgttcattatcatcatcagaagatgtgcccaaccaagaagggtatgaccctagagccgagctcgacatgcaggtcggcatcagccttgaccttaccggagcaccaccagacggtgtgggcgtagccggcgaagaggccagtgtggcggaccaagtcccgga

SEQ ID NO: 94082 - DNA, 455 bp, Zea mays
  Clone ID: MRT4577_185791C.1
gccggccgggcctcgcatcgaacatattattgagaccaactatcaacatagaaagcgcaatacagtaccaacaatggaagacaaaagattttgactacttatgctccttggacgttctgtgagcgctgttactgcgaccattttcccacaatgttcacaagatgctatagattccctacttctcccgtacctctcaccaacgttgcattcgtgatgtgaaaaccaagttcttcaaccctacaggatccaaaagggaatcacagatggaatcttacctatatcatacttgtacctccaacgatgatcagacctattacagcagtaaccttgggggaattaatgggaacaaaaaataagggaacgacaacgacaacaacttgggttagtgaagcctgctgactactctcggcaacaacagtctcttacattcaaccaaatagatgtattgaactctg

SEQ ID NO: 94083 - DNA, 238 bp, Zea mays
  Clone ID: MRT4577_185792C.1
aatattttttattagtaatacctgaagagaatcccatccacacctctggttcagaaaaaaaggctccaattttttcagaaaggacctggacctgttcttgagattaatgcggaaaggcactaccttaaaacaggcattgataacacccaccaccttagcacgcactaagtactccagtaacactcctactctaacaggagtgttttggaataatttcgtatcagaaaaatgaaagaag

SEQ ID NO: 94084 - DNA, 289 bp, Zea mays
  Clone ID: MRT4577_185793C.1
ggggacaccccaccaaatttgggggtgccccgggtaaacccccccaactatacgccgttatgtaccccgcccttaaaaaccggccccccatcgtgtattctaaaagcccaaaaaaaacgggcaaaaagggggaaagacaacccctagctaaggacgacaaaggtttgccgctaacttcccccgaacaaactttgcacggggggcaaaaacggggtttaactatacaaaccggggccatgaagggggggccgaattccccgtgacgatgtaaaccttaaatttttaaccc

SEQ ID NO: 94085 - DNA, 277 bp, Zea mays
  Clone ID: MRT4577_185794C.1
ccttcttgttgcctatccaacgttttgtcaggcttatgcgttgcgaataatctcagtgtcacaatgcatgctcttgtgggcggatgcagaccatattcatagagctggggcggtgagctctccacagtattttactgtctacgagccggatccctcttaagcattctctgtggcttgagagagagagaggcttgattttattgttgtttccgcaccaggtgttcaacaagaagccccccacacaatctacggctgaatctcccccgcttcgccttcc

SEQ ID NO: 94086 - DNA, 716 bp, Zea mays
  Clone ID: MRT4577_185795C.1
taggggcctttttttttgatcttgttagctagctgattaaaatattaaacttatctgtcacgccattaactagatcatacaacgcctccatatctaccattatactttgcataattatgcacctaaaatctaaacctcatcatacacatatgatacagctatttcacaatcatgaacatcacaacatacgtatgctcaattaataaaaattatcgtgaccaacaattctatttaatccatctatatacctagttgactgaaataacgaatcatcttaccatcattaaatacgacttgaaactacgaaatcgacgacgttgtccgacttgcgcatatcaccaatacttgacgagcgtggcactggtgcttccctttcgtcttccggcgtgaacgcaaggtgtgacaaggctgctgaaacgatgacgataccggggatgcggacgttgatgcctcggagtcggatgtggacacgaccaccaaaccccgtgcgaggacagggaagccagagcgacaacggcgcgacgacttcgacgctaagcacccgagctcgacgatgtcgcggcgcaacaggaaatagtgacgccatgatggccagggaggcgtggctggcggtgcaaggcgctcagcgctagggcgagaccgagcagttggaagacgacgcaaagagcagagctgggcgtgcgcgtggcctgcgtcgagcgagccggacgcgtggg

SEQ ID NO: 94087 - DNA, 215 bp, Zea mays
  unsure (1)..(215): unsure at all n locations
  Clone ID: MRT4577_185796C.1
acgaaaacaaatatttgagttttccccaaaannacaaaaaaaaaaataaccaacaacggaagggagtgataaaacaaaaaaccttgcccaagtagacttctgccaggattgaaattggacattcggaatggagggcactattttgtaaaagacgcaaatctgggggcaaaacggatatctcctgaacctcctcttcagccaagcaaccccacctc

SEQ ID NO: 94088 - DNA, 610 bp, Zea mays
  Clone ID: MRT4577_185797C.1
gttcataaaaacaatgtagcacctggagcattacagtcacaatgttcgggcataccagtagctccagcaatgggagaaagcaatgtgtatatcagatcacaaaaacaaacattggatatcggctgaagtctttgcatgacaacgtgatgtactcatgtagctcctgctacttttatttactcatgagaaaatgtatggtgcaatcaaaataataaaagcaaaccaaactaaatgttcctcttggcagaagaacaagccttcgttctggaacagatcatttcttgcagtttaccccaaattctccattcactgtcatttcatactgcagcttacattgcacaatttactgtcattttgatactgcagcttagaggttaactggacaacacttgattcttttcaatctgtcccttttgggcaaacgctttaaaaaaaactgatgaaactattcctgaaatgaaccctatgctttgcatacacgccgcaactactgcggcaatagctacaacacctgcaatccgaggatgatcgatggaggtagctaaagatttctatcgcacaagttcagcgtacacgcggcaggtactgcggccatttctacagtcacaat

SEQ ID NO: 94089 - DNA, 281 bp, Zea mays
  Clone ID: MRT4577_185798C.1
ctatacatactaaatactatgagagagctagcctgccacatcttctgcttcttcaagagagatcttcttaaattattctatcttccacagctgctgcaacacctgatatgtttgtttgtgttgttattaattattaaggatagctagctcacctttattatttttaataataattcttatctgtacttaactatatcaatcatacttatttatacacttatatttatttgttttaccgtaacttgaatgcttataaaatgtaatttcattgtcttcttttt

SEQ ID NO: 94090 - DNA, 291 bp, Zea mays
  Clone ID: MRT4577_185799C.1
aaggatcaacaacatttattttcattactgatattgacagccattacaaaactgtaacaatcttgagaatgtaacacaacaactcaactccacaacaaatattgctcaacaaaacatagcctaatggttcatatcaccaccaatacaaaaaagggaatgctgttgctaaaaaataaggaatggaatgtagaacataatctacgggagacatctgaagctactcctacttctgctgcagatcatttccataccaagcccagacaacgtccttcagccctggtcggatgccct

SEQ ID NO: 94091 - DNA, 1037 bp, Zea mays
  Clone ID: MRT4577_18579C.1
cattgggtacctcgaggccggccggggctattcgtgtcctggcatccgcagagagcttgttccgtccaggcaaccaaaaagcaagttgccccgccgcgcagaggaagaagagagcagaggaggatggctcgtacgaagcagaccgcccgcaagtccacgggaggcaaggccccccgcaagcagctcgccaccaaggtccgtccgtctgcccttctctacccgtttcggatccgctgttctgttctctagggttcccttctgagacgcgccggcggttgtgctgtggttgcaggcggcgaggaagtcggcgccgacgaccggcggcgtgaagaagccccacaggtacaggcccggaaccgtggcgctgcgcgagatccgcaagtaccagaagagcacggagctgctgatccgcaagctgcccttccagcgcctggtgcgcgagatcgcgcaggacttcaagacagacctccggttccagagccacgccgtgctggcgctccaggaggccgccgaggcctacctcgtcggtctcttcgaggacaccaacctctgcgccatccacgctaagcgcgtcaccatcatgcccaaggacatccagctcgcccgccgcatccgtggcgagcgcgcgtagccatcatctccggggatctgatgaatgtctagttaccaaacaaataggctgtattagcgtcgttgttctgtattcgttattttggattcggttgcagtgaaaaacagctttactaatcttatttgtgatctctggtggttgcttcgcttctaagcgatcatctgtggtgcaaaattcgtgctggttattttgttatggccccgtgtttggtctggcggcctggtccatctcaagtgcccgacggaagttgtcgtgcagcatcatgtgggttttactgcgtcacagctcacgaccatccttctcttccgagatgctaatagttggccgtctatttcactgagataatattaatagttcgacgctgttgctggctgtctaataaaaaaaaaaaaaaaaaaaaccgatt

SEQ ID NO: 94092 - DNA, 715 bp, Zea mays
  Clone ID: MRT4577_1857C.1
gccggccgggctgggatccctcttccctcatctatgtccctagcctccccctgtccgcctgtcctcctcgatttcacgaggtcctgcctacttggtgatctatctctcctgccgcccgggccgcatcgtctctctcgccacgctgcccctctagcgatcgagataatgactgctcaccgtacatcaatcatggaaatacgccaccctgattttactgtactgtgaaggcatgaataaagcagatcctgacgacgttacctatgctcctgtccctgatgatcactgagtatctcgtacctctgtggcctctatcaaaaattgtccagcatcattgactcgtgtgctgaaattgcaaatgagttgaagactgacacccccgttaacatcaggattgccgatagtgcccctgtatgtgatgaccgaggtgttaccatattcaacaccttcatggacactaataccatccactgacgctgaagatgacgattgtcctgctcaggatgccctctttaaagatcatgataggcttgtcagtgatgatgcccttgcaaaccatgacggcgcagacatttcacctgcaagctactgttcgcttgcttgtgccatcagaccagattgcctgcattattgcatcaggtgagcatatcatccagcgaatccgcagtgagagctgagcacaaatacgcggccgttagcatggatcctatccccggat

SEQ ID NO: 94093 - DNA, 461 bp, Zea mays
  unsure (1)..(461): unsure at all n locations
  Clone ID: MRT4577_185800C.1
gctctctctctagtcgaatgtggtctatgcatgctggtcccgcacttatcttgtgcgggatagatgggtataagaggtgggtatggnngtgcggtaagaaaaataaccctttcaaggtaattncttaaggtaaaggttaancggccttngggccttaaccttttggtttttttaagggggaaagccncnnagtacaaccagggcccgatactaatactgcnccaaccaagatggaaaaatagggatgacagtaaataggccctgttagcgtgccgggagcatagttaaatacatacacttacatagtgtagtcataggtcccgcagaaagtggcggcagcaacttcagccatccccagggcgaacccgagctagactacggtgttcaattggtaatttattgcgacagatgggtcctcctttggcaggtataaaagtgctagttctcgattaggttattgg

SEQ ID NO: 94094 - DNA, 121 bp, Zea mays
  unsure (1)..(121): unsure at all n locations
  Clone ID: MRT4577_185801C.1
atgctttaacagctgaactctctgatgataggctaagtcatcaggacgacttagttanatacagagatctcgaggagatgattggaaggtatgagatggagatgagttcatgcttgtggat

SEQ ID NO: 94095 - DNA, 297 bp, Zea mays
  Clone ID: MRT4577_185802C.1
agacggaagacatacatgcttatgtgcgtgcgctggcatattacccttaccgacaccctggggtaatggcaaggaatgctcgcattcctgtctcatgttaccaacaccttactcacagactacagctggcatgtgaggaatccagacaacgacgccgaaccatctatatgcctcctagcttctatctaccgcatgacatatgccatcaccggggcatgtctacacgacgtgtcaccagcttatggctgtccagataacatcgtcacatcatgtgcggacgccggtttataagctctt

SEQ ID NO: 94096 - DNA, 434 bp, Zea mays
  Clone ID: MRT4577_185803C.1
aattcggcacgagggcacgactgacacgcatccatccgagagagactaacccaccgccgcacgctacagcccatctccgctctgctctctcgcccactccgacttcacccatggccatgaccacgacctacgccaccccgctatcagcacctctcaaggaggccgcggccgccttcccgacccgtcgcccaccttccgtacccgccaggctggacctcacgcacgcctccctcaacgctctcacctacgcggcgggcgcacgactcccacccactcctgagtcctgccgtgacacttggcaccatctctccttacccaccaccggcgcgctgccgatcatgttcctctcagtcatccccacgcgcggcgcaacggctccggtcaacccagcctacacgcaggaagagttctagttctacctgtccgactcggat

SEQ ID NO: 94097 - DNA, 331 bp, Zea mays
  Clone ID: MRT4577_185804C.1
gtattaacctcgcctcccgttgcataatgaagcttcacaggtggccttaccctgtgggacggggccgttcgacacgagccaatactcacacccccttcccgccgctaaccacctaacgcatatttttacccagctgagaacataggcaccgtcaactagctcatatccatactctactgcacccagtcattaacctacactcctgacctttacgccacttatttttacaccatgcccgattacaccaattgaatatctactgcctctcacctaccttactacctttctattcaggcacgaaactaagaagggtctaactaacctcattaca

SEQ ID NO: 94098 - DNA, 375 bp, Zea mays
  Clone ID: MRT4577_185805C.1
cccgcttacgtaagctcggaattcggttcgagctgaactgaacaggccattcttgcgggcgatggagactcgattgctgccggacgagctgtaagatgtagccaaggcgtcatctgacggaactgggccatcatcgtactatggcgcgtgcccggactgctacaactactgagtgtcccgcctgcatgtgcagggacatgtacatgaaaggctactgcagacacaccatggataagacctgcttgcctgacacggagaccctgcgcccatcggactgactccgcataaactgtcgactagcttgtgccatggactcctgcagccgtagccgcgctgatgcgagctacatgtatgcctgatgaagtcagtgctacg

SEQ ID NO: 94099 - DNA, 759 bp, Zea mays
  unsure (1)..(759): unsure at all n locations
  Clone ID: MRT4577_185806C.1
gggtacctcgaggccggccgggatatcccatccatcacagctagctagcgttcctaatcaccgacgaataatctcttcttcacctcactaacaccgagctagcagctcgctctgtcctgcaacaatggccgctcgctcctcctcccagcagctgatcgcgacggcggtcctggcagcgccgctgctgctgctggcgaaggggaccaagacggcgtcggagaagatgagctgcggcgagaagacgtcgccggtggcgccaagcctcgggtacacgatggccagcgcgacatcaccctccacggcgtgctgcaccgcaatgagatcgctcaacagacgcgcgtcgtcatcggcgaaccggcagaccacctgcaactgcctcaagagcatgacggctcgcctcggcggctgccgtcagcatgaccaaaaccgccaacatccccggaaagtgaggagtctccataagtgcgtccatcagccccaccgccaactgcaccaagatcaactgatcgatgagaaccatcaaggacgcagctcgctcgatgcatggcagagtacgagggcatcaacagcatgcaatccccatcggagcacagacgaactagctaccagtgtgacatgcatcacagtggctcatgacaaagaagtacctaatgcacgcactagtgcatcacttcgtctagagtacctccgttcaatgtcgccctcgacgncatgtaccatacgtgacatgctgtagcacgtacgctagcagagcagcac

SEQ ID NO: 94100 - DNA, 670 bp, Zea mays
  Clone ID: MRT4577_185807C.1
gtgcggcgctcaggcggctggctggaacacaaagaaaaaaaaatttatctctccatccagatcgcaaagagacagagcgaaaacatgatcgtgtaacacaacagctgaacacgcctgtctctctctgcgagggcctgtctctgcatactgccagcgcctgtgcaaggcagatgccctgcccctgtcatctactgcaggcgttgtatgtggctgctcccggtctgatgacaatgatgggcgtctgcgacctgcacccctactggcagtacctgaggcaactcggcaccgcacgccgcatggggcgggcgccctatctatctcgggcgtgcaccataccactaccatgaaccacccgctccggcatacagcgtcttccagcaagcacatgaatatgatggacgagaagcccatcccacaccatgtgcaacatgatgatagacactttgagcgtgccactgcccccatcatgagcctgtacgacccatttctgatgcatcagcacaagcagatgttgacagcttacgtgtctcaaccccatggccatgatgatggcccagaagcatgccggcacatgagtggactctaccacgaccaactgccacaataccataccaccttctgtggtgcatccgatgctattccgccctactactgattcatgatatttggg

SEQ ID NO: 94101 - DNA, 165 bp, Zea mays
  Clone ID: MRT4577_185808C.1
atccgacctactcatgatacctctagaacggctggcgtgtagccaacttgggcaagtaatgggattgttaaagggggaactgaacgcttgatgggaaaacggcaggtggcttccatattcaggccacttgtatatgtacttctgataagaaaaatgggagttcgt

SEQ ID NO: 94102 - DNA, 169 bp, Zea mays
  Clone ID: MRT4577_185809C.1
taaatatcaccggaaacatcacagcatagtagcaatcggcgccatttgaaaaacctggcctggccttcctgcgtttcctgatccttctcactacttttgcttgcttgctggtcaggtgctgaacgcgaccgtggcgaagcagaaggcgctggtggaggaggtggctctg

SEQ ID NO: 94103 - DNA, 927 bp, Zea mays
  Clone ID: MRT4577_18580C.1
gtcctggcatccgcagagagtttgttccgtccaggcaaccaaaaagcgttgccccgccgcgcagaggaagaagagagcagaggaggatggctcgtacgaagcagaccgcccgcaagtccacgggaggcaaggccccccgcaagcagctcgccaccaaggcggcgaggaagtcggcgccgacgaccggcggcgtgaagaagccccacaggtacaggcccggaaccgtggcgctgcgcgagatccgcaagtaccagaagagcacggagctgctgatccgcaagctgcccttccagcgcctggtgcgcgagatcgcgcaggacttcaagacagacctccggttccagagccacgccgtgctggcgctccaggaggccgccgaggcctacctcgtcggcctcttcgaggacaccaacctctgcgccatccacgccaagcgcgtcaccatcatgcccaaggacatccagctcgcccgccgcatccgtggcgagcgcgcgtagccatcatctccgaggatctgatgaatgtctagttaccaaacaaataggccgtattagcgtcgttgttctgtattcgttattttggattcggttgcagggaaaaacagctttactgatcttatttgtgatctctggtggtcgcttcgcttctaagcgatcatctgtggtgctaaattcgtgctggttattctgttatggtcccgtgtttggtctggcggcctggtacatctcaagtgcccgacggaagttggccgttctgcatcatgtcggtttactgcgtcacagctccagctcactaccatccttctcttccgagatgctaatagttggccctctatttcattgagataatgttaatagttcgacgctgttgctggctgtctaataaatttacgattatgatactctgcaagacagtctaccattgtat

SEQ ID NO: 94104 - DNA, 1962 bp, Zea mays
  Clone ID: MRT4577_185810C.1
cgttcctcctcgcgcgtccacctctctcccgacgtccacgtcgccactcaccagttcgccacggcagcaccaccaaccaaacaagcagctctccctcccacttctcattcaaacaacaaagctccctgcgataaaccgtcgtcggtttcggcatttcttggccccaaagcacgcgcgcgcagcgctaatgccttcgtcgccaacgtcgcctactcgcttcgcgttgtcgtcccctttacttgttgggcagcacctttaggtggcgcgtctcttcgtcgtcgttgtcgtcgtccttgcttcccaagagaccgtcgccttacacctatcgctcgctgccttattgcctgcacctccgtgctgtgctgtactgcacctccgtgcatgcgctccgaggctgctgctgctgcagagcaagtgcttctttcctcacaaattaaagcgtatagtcctgtgcgacgcgtgccgacggccggagcaaggaatagatctcgggtcctggtcacgggaaggtatcttggaagagctggatacacggaaagttgtgagggccgccgccgccggccttgaattagttcgtcctttcaactggagctatactagtaggagggcatttaagatgttcaacatagtttcgtcgtggaacaagaggcggagaagcaggtcactcgaccagctaaatccctgggtgtacaagccggctgagctatggcaggcgaaggagcaggagcaccaccacccgccgcccaagaagcgcagctgcaccatggtgttcacgctcaaggagatggaggaggcgaccaacctgttcagcgaccgcaacctcatcggcaagggaggcttcggccgggtttacagaggcgtgctcaaggatggccagatcgtcgccgtcaagaagatggagctgccgacttgcaagcaggccgacggcgagcgcgagttccgggtggagatcgacatcctgagcaggctagaccaccccaacctggtcacgctcatcggctactgcgccgacggcaagcaccggttcgtggtgtacgagtacatgcccaggggcaacctccaggacatcctcaacggcattggggaggtgaggatggactggccgctgcgcctgcggatcgcgctgggagcggcgcgggcgctggcctacctgcactccagcacggccgtcggcgtccccgtcgtccacagggacttcaagtccagcaacatcctccccacgcgtccgctacgaggcaaagatctcggacttcgggctcgccaagctgctgcagcaggaccaggacctgcacaccaccaccagggtgctgggcacgttcggctacttcgaccccgaatacgcgctgacagggaagctgacgctgcagagcgacgtgtacgcgttcggcgtggtgctgctggagctgctgacggggcggcgggccatcgacctgagccaggggccgcaggagcagaacctcatcgtcggcatccaccaggtggtgggcgaccgcaagaagctgcgcaaggtggtggaccgggacatgcccaggggctcctacacgctggagtcggtgtccatgttcgccgcgctcgccgcgcgctgcgtctgctttgacagcgccggccgcccgcccatgcaggactgcgtcaaggagctccagttcatcatgtacgctaacatgaagatatgatcactctcgcgggtgcaaaccgcgcgtgggttttctttacttttgagacggggggcggggcatgcggatgcggctgctggattgcaattgcaggtccgcagcttttgtttggttgatgaaacgaattgtctaaaagggctttatacagttacatagtagtgctcgtttggtagagcttgtagctctagccaaaccagttctactagtgatttctcccatgaagtagatctgtgtgactctgatttatccagttagaaaaaacgttcgttagaataatttttattggtat

SEQ ID NO: 94105 - DNA, 177 bp, Zea mays
  unsure (1)..(177): unsure at all n locations
  Clone ID: MRT4577_185811C.1
ccggccggtactcgcagccgatgcgcgtggtctccggacgtgtcattcggaagngaggagaccaaggcggttgggactttcgatctngtgaaagaacactgttntataaatagacatgtnnaaatatataaaataaaaaacaaaaaaactacaaaaaaaaaaaataaaatatataaa

SEQ ID NO: 94106 - DNA, 684 bp, Zea mays
  Clone ID: MRT4577_185812C.1
ccggccgggaccgtgccccgagacagctgccactctagcgtctcctgcctcccaagctcgagacagcctccccgccgcaggctcccagatctggttcgaaggattggaacccgaggtaccctaccatcaagtattgggacccaccgcctgtctcgcctctcctatttcccctcgctccctacccatctcggcaggatactgtaatgaatcgggctcctcaataaaccaatcgactttccctctcgtcatcggtatgctgaagcaggaccgcgacagcgagcgtcggcggtgctcctcattgtcaccatggcgacgcagctcgtccccgcccgacccggacgccgcctctgaatccagtgtgggattgttggattcttaatgcgaaacttgaagcccaaccaaccagcaggaggagcaggccgaaggggaaccacatcagggtgaggagcctccacaatcatgattatttagtttttttgcgactgtgagggcgggctagaaagtcatgattctcagctccagatcgaggagctccacgcaccggctgtcgcagtcgacacagcgaaagaacatgaccttcatcttttgaggtaccgtcttcatcaccgccgctaacggtgctgctgcacaaagtggaggaggcgccatggttgggaccggagccacattgtcgatggggagcat

SEQ ID NO: 94107 - DNA, 748 bp, Zea mays
  Clone ID: MRT4577_185813C.1
cggcacgagagaacggctcctgcttccgagtgctgaagccactcctcttaaagctctccgattcgctctgccttgcgctacatccgcgaagtaataatagttctcggcgcgtgtcctaccgtctctgtggtgctcctcctgtgacagcgaaggcgacgagatacttcggtcatttcaagcttgctgtttccctaagtaaaagcatcttatgctttgttccttaggaaagaatatattaagcgtcttggaataaagaaagcaccttcttgcacgagtgatttgattgcgagcatgctgtgatcaacttcgtggattgattcgcctcgctacccaggtggtgttgtggcttttaggccaaggtagcatcatagtgtggggactaattgtgatatccggtggattatcgccagtgatcaccggagagaagagagaagaaaggggaagaacacaggcaagagaagcagacagagatacttcggtcatttcaactcaaagctttaagcaagtaaagcattcttatgctttgaaaattaggaaagaatatattaatcatcttggaataaagaaagcaccttcttggtttatatgccctgactgttgaacggaagcttgctaaagaatgttaggcaacaaagaaatgagaaccatggatgttccttcgctgttgatagtttgtcaaagtattccttttctttttcaaagattaaccatgcacttatatgattcatgcatggggatatctctcttt

SEQ ID NO: 94108 - DNA, 558 bp, Zea mays
  Clone ID: MRT4577_185814C.1
ccggccgggacgaaacctgacgccgccacttctgaattaaccatccggagatcaccagatggcctaccctccggtaatatctagatatccccaaaacccactccgtcggatttctgccgacttgggcgcatgggtcgcttatagagatggaatgggttccgcgaccaaaggacgtaagaacggaaccgtctccgcgcttcagctgacagctctaaaagtatcttcttggaagcacagcaccatatggtgtcgtgtggcagtaatgtcgatatagaactcgcacacaggtacgctctactcaaatcctctccgtataggctcattcatgagtgcataaaggtactgccacttatagctacgacttgcaattgcaggaactgcccttgctgtccgatatggcatccaagcttgacaagattataatgaaatgcctatatatccatggatgccaaaattctatgaaggtgaatttcaacctacaatgagaccgaaggcaagctgcattaatacatgctgccatgcaaactgccaacacacagaatgtaaaagaggcgcaca

SEQ ID NO: 94109 - DNA, 452 bp, Zea mays
  Clone ID: MRT4577_185815C.1
gggggggaccggccatttttttaaaaaaagaaaggggggaaagttccctgttaaaaagttggccccattggccgagcccccaaagttttgccacaagcccataaaaaaagtttttttttgcagccccgctacatatgctttgctaaaacgggggggttatgggcccccctttttggggggcccttaagtaccgccttcgggggcttgggaattataaaaaatggggaccccctcaaaacccagggggcccccattcatgggaagaagggggggcctataagggggcccccccttccgggccaaaattagcaaggggggggggggcaaaagcccggcccaaaaaaaaatactttgccaaggatttgaggggtggcccccaactggcagccaatatttcccccgggggattttaggcgccatcctttggcctccatccttccgggggagggggt

SEQ ID NO: 94110 - DNA, 481 bp, Zea mays
  Clone ID: MRT4577_185816C.1
gcggccgtttccgtatcgtggaacgagcagccacggtgacccaccgaatacgtccaagatctctatgcccaaaggcgaggaggaaaagggccttgtcgcctctcacctcgcccccatccgcttggacctctcctcctgtcgtccatggcgtccctttccacttccacctccacgacgagtcctcaccattgacatgcacgacggcactggtacccagctttccgttttggaccccagtgtctgtcgccgttccacggctctacctgtgtgcttttcaaaaaaattctacttgcccgcgctgccgcgcagataattgtcacccccgcgccccgcgctataaaaaagctcacctcgccgatttctcggtcaaacccaaacacagccgaaaaccagaacagctacaaaaaccaaaatgcctcatttccaccactactcacccgtgctactgctcctcgccgtcttcgtctacctatcgacacgc

SEQ ID NO: 94111 - DNA, 1519 bp, Zea mays
  unsure (1)..(1519): unsure at all n locations
  Clone ID: MRT4577_185817C.1
cctcgaggccggccggngaaaaaattaaaaaaaaaaaaaaaaaaaaaaagaaaaaaaaaaagccttcttgtatgggggcgagggaggccggggccgggtcgagttccgcgcactgccgtctgtccactatggccttcgccgcctccccttccctctccgcactcgcttcctcctcgtcgtcaaccgccgccgcccccacgccttcttccaaccctttgcacgagccgaggcctctccacctctcgctcaagcccgtcttacccctccccaaaccgcatgcgctctcctgctccgcgccgcacatcccccgcgccgccgctggggacggatcgggcgtcgggaatggaggcaaggatggaggcggcggcgggggtggcgaggatgaagacgactgtgacgatgcggacttcggtccgctgctcggcttcaacgaggtgctgcacctcgccgcggcgcgcggcgttgcgctcccgggcgacatgctggaggcggccaaggacgccggcatccgggaagtcctcttgctccgctacttcgatctgcaggccgcgccgtggccactaggcgtgttgatccgcgccttctcgatgctccgcaaccggatgctcgccgacccgtcgttcctcttcaaagttagcaccgagattgtgatcgactcttgctgcgcgacatttgcagaggtgcagaagaggggaaaggatttttgggcagagtttgaactgtacgctgctgatcttcttgtcggtgtagcagttgatattgcacttgtggggctgctggctccatatgtgagaattgggaagccatctgcttcaacgggtctctttggaagattcagcaggatggctggatctttgccaagcagtgtttttgaagctgaaagaccaggctgcagatttacagcccagcaaagaatcggaacatacttttacaagggtgtcttgtatggttcagttggatttgtctgtggcataattggtcaaggaattgctaatatgataatgactgccaaaaggagtgtcaaaaaatcagatgaagatattcctgttccaccacttgttaaaagtgcagctctatggggtgtgttcctcgctgtatcatctaacacacgctaccagatcatcaatggcctggagcgggtagtggaggcatcgcctgtcgcaagacgtgttccccctgttgctatggcttttacggttggggttcgttttgccaacaatatctacggtggaatgcagttcgtggattgggctcggtggagcggcgttcagtaatgggctcttggttgcagttaccaaaacatcaatacattgtacgttcaaatcttagttgcagtaatcgttcaggtggatccgtgttgttttctcgttacatttcctggtaagtagcggaggctggggcagagctctatgaagttttaactcatttactatagaaacaaggaagtacttcgcatcataggcatttatttgctgctcctattgatcatgtgcactttgccaaaaaaaaaaaaaaaaaa

SEQ ID NO: 94112 - DNA, 813 bp, Zea mays
  Clone ID: MRT4577_185818C.1
cttgtatggttcagttggatttgtctgtggcataattggtcaaggaattgctaatatgataatgactgccaaaaggtaatagtgtgccattattcgtgcttctgcacatcaaaatctctatctgctattaattaaatgactaagttcatagttgattacttcccattttggtgttttgttgatccgatcacactattgtattctttggcacatagatttataggtttcctattaatattgtgtctgcttcacccatgctcagtaatgctgattaatctttattttttccctgctatcttgacttgtatactgatgtttgttccttgttcaggagtgtcaaaaaatcagatgaagatattcctgttccaccacttgttaaaagtgcagctctatggggtgtgttcctcgctgtatcatctaacacacgctaccagatcatcaatggcctggagcgggtagtggaggcatcgcctgtcgcaagacgtgttccccctgttgctatggcttttacggttggggttcgttttgccaacaatatctacggtggaatgcagttcgtggattgggctcggtggagcggcgttcagtaatgggctcttggttgcagttaccaaaacatcaatacattgtacgttcaaatcttagttgcagtaatcgttcaggtggatccgtgttgttttctcgttacatttcctggtaagtagcggaggctggggcagagctctatgaagttttaactcatttactatgagaaacaaggaagtacttcgcatcatatggcatttatattgctgctcctaattgatcatgtgc

SEQ ID NO: 94113 - DNA, 555 bp, Zea mays
  Clone ID: MRT4577_185819C.1
catgacgaataatttatcttattacttactaccatacaccagctacgatcgttgagcgctgtgatacatggaatagctggccgctcgttcctcctcccagcacgctgggcggggcctgggacctggcatggtggctgttgctgctggcgccgggacccggtacggcgtggggagctgcgagcaggggacaggtgacgtggccccgggccccgtgcccgcgatacgcaatgggcagtgcggctccgccctccgctgcgtgctgcagcgctgggtgatcagctcaacagccgcgcgtggtggaccgcggaccgacctgccaccggctaatgactaaaaagcatcacgtcgcgggtctgcggaggcattacaatggccaacgccgccaacatacgcgcggagtgcggggtgtccgtccgagcacccataacgcccaccggagaatgaaccaataacaactggtcccaggaaccatggagcacgttcctcgcatgttggatggcagagacctcagccataagcagccggcagtcgagcagatatcagataggtactagc

SEQ ID NO: 94114 - DNA, 688 bp, Zea mays
  Clone ID: MRT4577_18581C.1
cattgggaccctcgaggccggccggaaattcgtgtcctggtatccgcagagagtttgttccgtccaggcaaccagaaagcaagttgccccgccgcgcagaggaagaagagagcagaggaggatggctcgtacgaagcagaccgcccggaagtccacgggaggcaaggccccccgcaagcagctcgccaccaaggcggcgaggaagtcggcgccgacgaccggcggcgtgaagaagccccacaggtacaggcccggaacagtggcgctgcgcgagatccgcaagtaccagaagagcacggagctcctgatccgcaagctgcccttccagcgcctggtgcgcgagatcgcgcaggacttcaagacagacctccggttccagagccacgccgtgctggcgctccaggaggccgccgaggcctacctcgtcggcctcttcgaggacaccaacctctgcgccatccacgccaagcgtgtcaccatcatgcccaaggacatccagctcgcccgccgcatccgtggcgagcgcgcgtagccatcatctccgaggatctgatgaatgtctagttaccaaaaaaataggccgtattagcgtcgttgttctgtattcgttattttggattcggttgcagtgaaaaacagctttactaaaaaaaaaaaaaaaaaaaaaaaaaaaaaaaaaaaagcggcc

SEQ ID NO: 94115 - DNA, 705 bp, Zea mays
  Clone ID: MRT4577_185820C.1
ccggccgaagattgcggatctctccttcctcggtcttcttgcagtatctagtcctacctccacctcgctagtcgtcgctccgcgaatacgccggaaaatcctctcacctgaggataggagcagcaccccgattgacgaccaaccaccgattaccaatgcccctggctgggcccgacggaaccggagcacttcaaggtcagaaagaacctacccgatatgaagatgcaggaggcgatcgatctgctcggctgtgcacgtcccgcgtatcgcactatcgggagcaagatgctcaagaatgacggtgacgcggtctgtggtcatctgtcaggagcagcgcccagggagtagcggaacgacttgagcgacaatatcctgtaggacagacacatcaatttcactgctgaagatataccagcttcttctagctgagaggagcaagatgaacacatctcaccaagacgactgttgaagattaagaaccaaggtacagaatcacagcaagagcgttccagagaacgtgtacaataactaagagagatgcctgcgctgatcagaaccttcactggtacaaaatcaggtatactagctattgctcgcggatactcttatgtgaccatttacccgtgcatatgatgacatccttggcatgacaatggctgatacattctttatctcaaaatggcatacgatatggatgcctgcttc

SEQ ID NO: 94116 - DNA, 589 bp, Zea mays
  Clone ID: MRT4577_185821C.1
atagggactcttctattcctgccgccgctcgcagtccgcctgccgcgagccgcagtagccgagcgcagcacatcgctgctcttgatctcatctcctggatgtacgtgatgcagcaacaggacacaccgaaggtacttcaaccgatgtcatcccttccagtgaggacctagctagtagctgacatactgctgcatagagacgatctacgcttcgactcgtagcatacgctgcacgtagatgcaccggcggatcgtaaacctagccgcgcatcgacacgctggcgcgcgactacctgccgaaggacagctgactccgacaaaggcgcatccgcccagatcgcatggccgccttacaagctcgctcatgatgctcgctcgtgacgacgggaagaaggaaatggatgaaccgcatcgatctggcatactctgcgagatatattcccgtggatcactgatgccgatcccatacgggagcccatccagggatcatcaacagcgatcctcgagaggatgccacccgaaatgcctcccgtgatgttgccagaaggcggggcgagaatatctcacccctgtatgacacgcctgaggac

SEQ ID NO: 94117 - DNA, 590 bp, Zea mays
  Clone ID: MRT4577_185822C.1
tgattaatgaagttccagaagtacatgttgattcccggatggatccaagttatgaatccgctgaagaaccagattataagaaagctgttgattggaccatgcatcggaatgggccagatctattatttccaggaagaaaagggacagaattgaattatgtggagaatcatacacaaaagagtctggatacaagcagtctacctacagaggacgtggaccatagatcaggtgcaggaagtaacattaatttaaacaacatggcacctgagcctgcatcacttggaattttatcaaatgacactgagccagaaaaggtttggcactacaaggaccctaatggaaatgttcagggcccgtttactcttttgcagttatccaagtgggcaagttttttcccacgcgacctgagagtatggcttacatttgagagtgaggagaactcactactgttgactgaagtgctcccaaagcagcagaaagattttattcagctttcaacagttactaccagtgataaatcaatgtgggcaggctctggtcaagatagagctaatgcaaataactcttcctcccctatgggctataacatg

SEQ ID NO: 94118 - DNA, 418 bp, Zea mays
  Clone ID: MRT4577_185823C.1
atttcatctcactctccacttagaaaacccgtagctcgccgacaccgaagcggcctcccaagtaagcatgatcagtgccacgcccgccgccgccatgaagcgcaatccccgcgtgacgagctcccgccggaagtgccgcaaggcggactttacgggcccgacgctccgtcagccgtgatctcatgtacgccgggctgtcgacggagctccgccacaagtacaacgtgcgctccatcccgatccgcaaggacgacgaggtgcaggtcgtgcgcggcacctacaaggaccgtgaggagaaggtggagcacgtactgaaaattgcctgcaggatgctagacccgatcaaggaccagttgaccgtgctatcctacactgagttctagtagcttgctgcatccgtgtgatccgaggtaaccgg

SEQ ID NO: 94119 - DNA, 638 bp, Zea mays
  Clone ID: MRT4577_185824C.1
gggcgcgtcctcgcgctcatctgctgcgcgccactccacctcctcgcgcgcctcgccgccttcctctgcgtccccttcctccccgggcccgcacacaccccgctccgcctccaccgccgccgcttcctcgtcctccgccccccggagtttgcgccgcaccctttcgcttactccccctcgtcttcctcttcttcgtcggatgaggaagaggacgacgacgatggggacgggatccacgaacacgtcgattgaggttgcttgaggttaaggctcagaaaaggagaatttggggttgaggagggaagaatgaacattggcatgttgtgctggatgctgaactgctcgcccttctatgattctatctcgtagttctcaggatatggcattatgacgacgctcattataaaaagccaggtcagaagctctgcaaaaaggataccaacggatgaaactggtttgagttgtcattattgttgctgttgtttaaacgaactactgatttttttttatatattgaaaagaagaaagtggatgaggttaaaccttggtaaagaggatggttgtgttagacttggcgagtcaacgttaaacttagtcattttaatagtaatggaatctgaaagaaattcattgtggcg

SEQ ID NO: 94120 - DNA, 1178 bp, Zea mays
  Clone ID: MRT4577_185825C.1
acgccacaatggatttctttcagattccattactattaaaaatgactaagtttaacgttgactcgccaagtctaacacaaccatcctctttaccaaggcttaacctcctccactttcttcttttcaatatatataaaaaatcagtagttcgtttaaacaacagcaacaataatgacaactcaaaccagtttcatccgttggtatcctttttgcagagcttctgacctgtctttttataatgagcgtcgtcataatgccatatcctgagaactatgagatagaaccatagaagggcgagcagttcagcatccagcacaacatgccaatgttcattcttccctcctcaacccccaaattctccttttctgagccttaacctcaagcaacctgaaataaaaggaaattcgagatgaaagtttaaggttttaaatcctgacaaaagtatttgattctatatataaaccctctcttttagtatatttgataactttaagaagacctgtttcagtaacttagttccactaatgaggataatagcttattgaggtaacagaaattttttaagtgtgaacaagatacagccagaaacaaatgcagctcaagcgcgcagtaattgaccaaatagtacttgacaaaggcaaaacatgtttcccctctgaaataaaaacattggaacgcgaggctgcaaaactcattcaggatactaatatattgtgcccaaagttccagatggccaacccaacaaagtacctcttatcaaaggcagatgaagtggcaacattagatgtgtgaaatcagcaagattagatgtgcagaactagtgttcttaaaatcttatcatcatcttccacattgcagctttcagattattcattactgtagggccataatttcaagaagaatgcacaatgctcttagagacttcaccccacctctcactatgagcaaactgttgttagatgtcaaaatcttgaccttacaaaaaatattacctggtcgtcaactccatttatgtttcccccttttgcatcagtttaggcaaaaggggctgactgtgtggtgcccgaaattacaacttgtactactgttcatactaaaaaaactcggtcggggagagaaagaccaccataagttagcatgctacgaccaattagagacgcagaggatatcaggatcac

SEQ ID NO: 94121 - DNA, 402 bp, Zea mays
  unsure (1)..(402): unsure at all n locations
  Clone ID: MRT4577_185826C.1
gggggcccaaaaggcccggggggttacaggggaaacggcccctgacaaacggggggggggggggcgcccaaaccggccagaatgggggggtgggtggacccacggggggggggaacaaaacatcggggcaacagctttggggtcccaccccccccctcccccatgggccgggccttttcccggggccaaggcagagcaggggccaaaacagggggggggggggtcggatcanaggggctgcgggatcttgggggtttcgccgatgggcttttcgggctggaactggggggggggnacgtcccggccgaccccctgtttggcccgcccgtccgtttgggcccccgggaggntcccgaacagggccggggggacccccccctccttgggcccgggggtcccctt

SEQ ID NO: 94122 - DNA, 1039 bp, Zea mays
  unsure (1)..(1039): unsure at all n locations
  Clone ID: MRT4577_185828C.1
tgcgcaggagttgcttcgaaaacatgacctggtgacttagtgagcagctctcacccctgaacaaattgatcgcaaaaaggcnccttccctagtcagcattaaaaganccacancgaatgttcgaaagaatttaaaccattatagaaagtggtatgaaaccgacagggggtttggatatgttactggcttcagctaaaaggagtcctaaattttgttgttagatactgactggtatgtggctacagaactattcatgtaagtggtagcaaaacaatactatacatactagtcaagttgaggatttgattctgcagaaacaaataaaaagtagagaaaataataaaaatccaaccattttggtgctgctacagaataggtacaaaacggtcaagtcgtggctacagaactattcatgtaagagtagcaaaacaacattatacatactagtcaagttgaggatttgattctgcagaaacaaataaaaagtaaagaaaataatataaatccaaccattttggtaatgctacagaatagatccaaaattttcaagtcgtggctacagaactattcatgtaagtggtagcaaaacaacaccatacattgccaagttgaggatttgattcttcagaaacaaataaaaagtagagaaaataatataaatccaaccattttgatgatgctacaaaaatatgtcatagattttcaagtcaggtattgtcgaacccatggctacaaaaccattttgagcaatttaccttgtttgtttcaccattggagaactggcacctaanaatcgcttgatctactgtcagttacttgggacttccccttcccctcttctttccagcaaagattntacaagcaaaataacaatttaanncattgaagcacaaacttgacaaggataaaaaaaaaaataaggataatgcagattgggcatgttaagaataaggagaagaattatttgcaggaaaaggggtggaaaaattgggatgggatcaagataaatagggaaaggacttgcttgaaaaattaggga

SEQ ID NO: 94123 - DNA, 230 bp, Zea mays
  Clone ID: MRT4577_185829C.1
gccttcctttttttttttttttgttaactgggaagtggtttcataagcaatgtctcccacaaattatgggggctctatcttcactttagctatactttttagtagcaatagatggaacatttggttatctaactctaagtgtcaaacaagttttttatcatatgtatgacactttgactgtattttcctccccattttaccatgttctttacatcaacaccatgatcttc

SEQ ID NO: 94124 - DNA, 494 bp, Zea mays
  Clone ID: MRT4577_18582C.1
gagaaatagaaatattttatttcattcgccttcctcccacacttattttactcgtctcctacatgcatgctcctgcagtcccacatggactcgctaccctgaagctagcagcgccgcgagctcggcaagcaaagcatcgacgtgttgtggcttgacgaacttggaggacacgaccaccccatcacattcatgcctcttcgccgtgctgcgcgggcacaccacacagctcggcaccattgccctcctgtcgtgcctcaacagcacccgctccggcggcccaccgccgaagtcgactgcgtccaagcccaggttcctccagtccgtcacggtgaacgtctcgtaccaaaaagacggcggcggcgcgtgctgcccctgacaatgatctgcttctgcccggctgccgggcgtggaaaggaggtccggtaccatctccttgacgcgcctgatgagcccaacaaggtggccgatgccgctgctggccaccacgccggccg

SEQ ID NO: 94125 - DNA, 235 bp, Zea mays
  Clone ID: MRT4577_185830C.1
actacacgtacggttcaatacaggaacatgaacaaaaggagcctgatcacagaagaggtggtggcgatgccgacgcgggcagcgcagtcgacatctctcttgccggtggcactctccggcgccgcatacgacctggaacttaccaactgctgttgttgcgcacccaccgatgttcctggcctgggagcggtagacagagagatggcgctcaagaagtatgccaagcgcacctggg

SEQ ID NO: 94126 - DNA, 258 bp, Zea mays
  Clone ID: MRT4577_185831C.1
atggcccatgaaataatgaagaagagcgaaaaggatattcacgacgctcgagaagcgccaaaagcggctgaaaaagctgcggaacttgaaagacggatagttgaactatctcctcccccagagccattcgacccactggccgacccagagacaaagaaggcaatagaaattattaatatggccgaagctattgtagacgaagttgtcaccaaattactaaccgaagctgcagaaaaagtcctgaaggaagaagattag

SEQ ID NO: 94127 - DNA, 637 bp, Zea mays
  unsure (1)..(637): unsure at all n locations
  Clone ID: MRT4577_185832C.1
tcccacgaggttatccgctggatcgcgggccgcagcttgccgacgggaccgaccaaccccaccagcacgagaagactatccgagatgccttcgtccttcatcccttcaacggcggcgttggcggcggtgacttccctggcctcatctcgcacccggccgatcttgtcctccagggacgccaggggccgctcgtgctcgcggccactggcgtcgtcgtccgcgccacggccttcggcggccacctccgcgctcagaggtgggacagaagaagacctgctcagacccttgaacacgtaggacgcgctcagccgggtgatggtggaggtccgcttcaggttgctcgccagctgctcgagcacgaagtcgcccttgggcatgtcgccgtacagcgagaacactaggaagctggaagccggcggcggcgacatccgtagcatctccctcgcggcgtggagacgtaccactcctagtatggttctggagtgcacctcccatctgtggacggnggacactatgctgtacgctgagatgaaacggtggatggacagcacttccctgatcagagcgagccacgtgttgcgccttgtcgagctggtcatctccgggaactncaagaccacagctctggtagtgactc

SEQ ID NO: 94128 - DNA, 477 bp, Zea mays
  Clone ID: MRT4577_185833C.1
cggaaacacacctctgccctagaacttgcaagacagctgcagctcctactcgcaacacgacctcaaaaccgcctctaccccacaaccccaaaaagcccaacacccaacataatgccagttcacccagcagaagagaccgccagcggtagcattaccgacaaggttgcaaaggagtcgaaggattccaacgcctcagatcatccgcttcacgacgaggagaaccaggccacaagtggcggatcagttgccgccaacgcacacaaggcgaacccgggccccgtccacgccgacaacctgcccgagccggcgtccaaggaggagctcaagaagagggctgaggagctcaacaagtaaggcactcttgtctttggagcgggtacgatgttaaatgggtcgtctaggcccaacaagtcgaagatataaccttataatgaatgatgataaatcttgacgaaaaaaaaaaaaaaaaaagcggcc

SEQ ID NO: 94129 - DNA, 269 bp, Zea mays
  Clone ID: MRT4577_185834C.1
cgaagatagcggaagcataagatcagccgcgcaaaggagagggagccatgctcgctctcgcggcggtcgcgcgcccactcgttcgcggcgtccgtgtatggaagcctcctcgtcccctcgcctcccgtccccgcgccgggacgtcgcgcggcggtgtgcgtcgtcgccaaggtcaatgtggccacgccccagtgacgaccgcatcggccgccacgtgcgcgtccgcaagaaggtaactggcaccactgataggccgaggttgagtgttt

SEQ ID NO: 94130 - DNA, 553 bp, Zea mays
  unsure (1)..(553): unsure at all n locations
  Clone ID: MRT4577_185836C.1
accgccgccgccgccgtggggatcgagtttatcctgcgcggtgtgctcatctccatcgtctcccgtcgctatccctcttcctgatatttctcgcgatgcttatctcctccccgcgcgcagctttttcctgctcagttccttgccgcgccgccgccgagttccctgcccgctcctttttcagctcccagtcgtcgaagctctctgcgcgcaggggcttcctagccatggcagcgcccgcctccctgctcccagcgccgcgcccagctgcctctctctctccctcagcgcgcctcccctgcatcgcgcgctccctgctccaagctcgccgtcaaagctcccctgccgcgccgcgcgcgctgctccccgagctcgcccaaatcagacagttccttctctgctcctccccgtctccttcctctacctccaactgctttcccatggcgttcagtgtttctccctgctcgcttctccctcaagcacgctgtgttcctccctccagccgcatcctcccgcgcccagntcccagcgccgncggncaagctcgccggccgag

SEQ ID NO: 94131 - DNA, 284 bp, Zea mays
  Clone ID: MRT4577_185837C.1
ggtcgacgcacgagtgtaatcgccgtcgtcgtggggcttcacttctcctagaacgccgaaggtcaagaagagaagaaggcgagacgtgcagtccgtcaggcagcgctcgataagagggaagcaggaggaggctagacatcgaactcatcaacgaaccaagtcgtacgtcgtgctcatcatcacgtgacggcgcgtgccgcgtcaagctaagtgtccaggaaggggcactccgcagcgatgacggtggtggaggagtccgtggggaaggtggaggacactgcggt

SEQ ID NO: 94132 - DNA, 185 bp, Zea mays
  unsure (1)..(185): unsure at all n locations
  Clone ID: MRT4577_185838C.1
cttcananaggcanagcagagctcgcaagcggagaggctacagnacggtatgggtcactccgcggcctcaccgccgcgcgtctcctcgcggcggccttcctgctctccgttgccgtcacggccgccagagctcaggacagaaccgagcacgaggaggagttcagctacgtcgtcggcgacgagaa

SEQ ID NO: 94133 - DNA, 355 bp, Zea mays
  Clone ID: MRT4577_185839C.1
gttcatggcctgggataagcccccgctgacgcaccctgttaacctcacaacagagcattttgatgcgatggctaacaacggggcgccatttgcacactccttcgccaatgacaattcagtcctggatatgattgacgccaagttgttgggccgggcaccttcttggtaaaatcctttattctcaggccgaccaaaggttcggccaagctagagaagttgttgaaacttttggaacctgataacttcaggcctaaacaatgtaaataggactcattttgcatgtagcatttttttgggtactgttcagaagccaaagtttgacgaaatctttctagttattgcggcagttaggcat

SEQ ID NO: 94134 - DNA, 160 bp, Zea mays
  Clone ID: MRT4577_18583C.1
acatgggacaatttttttttttttggaccacaccaatttaacacggaggggagacacgggcaacacttacccagaaacgcgaaatacccaaacaccggccagtttactgccgaattctcaatgacaaggaggataaatggtcacatgcggggcaaataat

SEQ ID NO: 94135 - DNA, 166 bp, Zea mays
  Clone ID: MRT4577_185840C.1
caaaatgcggtagcattggtgaagcacgagctgtatttgagagcattacatgcaaagacctggtgtcttggaactacttgatctttggatattcacagcatggccttgcgtgagcattgactatactggctaagagacttggatggacacatgataccggatgcac

SEQ ID NO: 94136 - DNA, 268 bp, Zea mays
  Clone ID: MRT4577_185841C.1
aaaggtgggccccctgcgcgtggccgggccagattccgagggtccagccacgcgctacgcctgccgttcctgagcaaggatgtccagacggcactagtgctgggagggcgatcgcacaccgtcagccttctggactctgcacgtgcgcaagctattgaatgactcctaacagtccttgcagagaagccgagtacaaggagggtaaccttgacgagcaatatatcgcgaggtgcctaatagctgcctcagcatgttatgaacatagagg

SEQ ID NO: 94137 - DNA, 457 bp, Zea mays
  Clone ID: MRT4577_185842C.1
acttctctatattacagttggtttgtttttatttatttactttcatatcacatcacacctgagttcggggagcctcacctgttctgctcattgaaaagaggatgaccacgaaacactgaacagcacacgttctcaccagacatacgggagcacagcatccacaggaccacccccacggaggccataacctcaaacccaagacccgataccgagacgcgaacgcgacgcgaccattcaccccccccccatgtctcccccacccggatatctgaacgctaggaaccccacgcggggggacctcggccttggggagggggaccgggaacacacccctctcaaaagaggccctgaactcctcggccttaggcgttctcggggacgccgaagagggggacgatcggggcgcccccaccctccaagcggcgccacttgacgccctggccctacaactccctgc

SEQ ID NO: 94138 - DNA, 493 bp, Zea mays
  Clone ID: MRT4577_185843C.1
ggcacatcgccggttccactttgggggttctctcaaccgacagttttacacacatggggggggctaaagctcaactaaaccatatcgggccggccaggtccttcctagcccccccaaaaataaaccaaacatgggggaaaaaaaaaggaggcattacaagtcccccagtaaataatccccctgggaggggagggctctcattttggaaagccaggggcaaggcctgcttcagctttaaaaggggcgggctttggtgtctgctcacccacccccagaataaaaggccgatcacagggcgggctcgggcttgcccaccccgtcgccgccgcccatttgaggttgggcaaccccccccgaacaaactgggggaacaagggggggggggccttgtcgtcgtcatcggggtgggggctcgcccgggccaccaaaaaccttaaaatgctgccggggaaaaacgggcaggccgggaacgggggggtaagcggtcccgggt

SEQ ID NO: 94139 - DNA, 1242 bp, Zea mays
  Clone ID: MRT4577_185844C.1
taacgcattattttctgctatgcttcccatcacaagcgatgtccccgggggctgtgtgatcatcagagagcacatccccatcacgaacctgttcacgtgcgtatggttcaatgaggttgatcgcttcacctccagggaccagatcagtttcagcacggtccgggacaaaatcagggctagagttggctggatgcctgagatgttcatggactgcgaaaggcgcaactttgtcgttcaggtataccacagggagctactggagcagatgattgcatctggtaggatgccccctttggcggcggctgtgacgcacgcgaatgtccgggtaggtagcaggaaagctcctccgacaaagaagccctccgtgaaacggaaaagggagaaaaaatcgagctcgcgacggcgtctcccgaaacccatcgcccaggggttggatgccaatgtgacgcaagtttttttctcagtagcagagtctggatagtcccacacaggaacattgttccattaggtctggggcctgtaatcgtgccccggcgagatttgttcatagctattcttcatcattgttgtacataacagcggcaacccaacattcaattttctccattcatattatcttcggttccattgatattatgttctgttattgtatgctcgtctcagttcgcccttttgttttggaaaaaaattgtacaagcacaactagtactacacagccgagccagactgcgaaaagaatgagcccactaggcccagaccgcagaataacaattgggccacgcacagtcgacccagacgtcaaaaaaatgagcctaccagacccacacagccgaggcagaccgccaaaaaaataacatcgcccaccgtggggctcgaacccacgaccacaaggttaagagccttgcgctctaccgactgagctagacgggcaacttgttacaaaaggataaaatatattatccttgacgtaaaatatatgtgagtataaccaatgttcccaaggctgcagctaaaggaccatttgtttcggctgctcgacgattttgtgcttcagtttttggaccattcaatagtaaaaaaactcacgaagtcaagaatccaaagctccctaggatgagcttttaggcttttggatatgagagttgttggaagtccaaagtagtggctaaaagtgatctgaaacaacaagccataagcacaccatagaaagctgaaaacaaaaagtggaaagcacagacatgc

SEQ ID NO: 94140 - DNA, 1803 bp, Zea mays
  Clone ID: MRT4577_185845C.1
gggtgagatggcagttggggaaaccctaaccctaacttagggtagggagatgtattaatagactcaggttgttgggcttgacccattacataggggtataagactatccgcaacggttccctttaaatttctccccctatatcactttttttttgtgtcacatcattaataggttgttccctactttttcatctcccgcagcggtttcccctataccccactacaaccataaaatatcatttcctatacttttcatctactatcaatttttcatccactaacaattactcttggacccactactacaagaatgaacagtgatggagaggatgaacagtgaaccgctatatacggagggagagagaagagggccgacgcgtagggggccgaccaggggtcagcgctgcgggtctaggggcgctccctgtagccgcatgcaagaggcgggggctggcacgcggagaccgctgtggccagcctaactgtaattacaatgggctaaccctaaaaccctaaacgggtactctaacaccgtgggccgggtcaaaggggccactgtgcctacatatctgggagggagcaccggcgccatggacgaagacgaagggcacaacgcagatcgaagaagggcgttgttgctattagtggagacaaagggaacattgacgtctgcagctcttggaggggggaggcggcgactgcagcacttggttgtggcggcggtgtctacctctcgttgggggcagagctcggggaaaaatggtgcgagaaagaaaagaaacggctgcaggagaaatattgcacgtggaactgatagattgagatggcagttcttcgactggaattagagaactgtgccgatttttggtgttgccaaaatattgggctacgagttggatactgttggagcagtgattttttcgccttatttgccaaaactagttttgggggacatttattaggagctcttggagatgctctaatagtcagtgcaccggactggatggaaacacaagaaaatctctcataacctaaaatttcttgtatggtcacaattgtcaattatctttatggtaattgcgacatgcacgagtcatgcatttttattagcacaagaggttcacttgctgacttatgtgcagtgatggtggactgtactgtacagctttattagacaaaaagaaaggctgtcctgttgtagtgaatggcttttcatgcactctaaaaaggcccatactgtaaaggggaaaatactgacgttattttcttttccccgtctatgtgcattatcggtttgaacttaaaaacaatgcaggttgggttgattgcaacaccagatgtccattcctttgaacttactaagaaagaccatttcatcattctagggtgcgatggcttatggggagtatttggaccaggtgatgctgtcgaatttgttcagaatcagttgaaggagacctcatcagccacacttgcggtgcgccgcctcgtgaaggaagctgttcgcgagaggcgatgcaaggataactgcactgctgttttgatcgtcttcaggcactagcgatcggcctaattcccttttgctttcgtcaggctggaaagaattagctgataaagaacaatgtttgaagtgtagcgagttgaacttggaactcttgctttgtctgttttgatttgatgtgacctattaatacaccatccatattcatttggaaattactctatccgtccaaatgacattgtttaagtttaaaaaaaaaaaaaaaaaaaaaactcgagactagttctctctctctctcgtgc

SEQ ID NO: 94141 - DNA, 306 bp, Zea mays
  Clone ID: MRT4577_185847C.1
caatcatactacatggtatctatgttctactgattagccaaagtaactgaagacaaccataggatgatgatgttggaaacatagaggctagagccaatcatacactgaggtaaatgaaaccaagctatgatcttcaggatgtattaacaggatgtgatttttctttatggtcagatagcaatttgagggtaaattttcatattggagatgaaagataagtaatttgtgtttactggatatataatgttgttatgaacaacatattttttattctttgattgtgagggtgacatctcatctttacct

SEQ ID NO: 94142 - DNA, 202 bp, Zea mays
  Clone ID: MRT4577_185848C.1
ggggggggtgtttttgggggtggggggtaccccgctttccctgcacaaaaggaaaagggcacccgagcggggaaacagcgagaaaggagcacccgggggaaccgaaaaccaggggggggacaacccgacgcaaaccgagggaggaccagaacgaaccaaacaggggagaccaacggccacccgcccagagaggtagggcaag

SEQ ID NO: 94143 - DNA, 831 bp, Zea mays
  unsure (1)..(831): unsure at all n locations
  Clone ID: MRT4577_185849C.1
cctcgagttttttttttttttttttttttttttttttttttttttttttttttttttttttttttttttggggaaaaaaaacaatgcaaatgtcccacctcggttttataaaaaacaagtacacgggcaccttgccttaaaaaccaccaaacagatagtaaaaccggtaccgggggggggggagatcaaaaaaactagaaacctaaccacaaacgggccacaacaaaacgggggacacagggggggaaccctgttttttggaaacaaattggctttgaccacccccttcttggaaacaaaaaaggcaaaaaaaggggctcacttggcgctggggatctgggcgcaaatgagcttatcagcggaaaccatgttggtcagggcgggcttgacctccgtgtacttgggggttttgaggccccattcggggttcacccaaaggatgttgggggccccccggccaacattttgtcaatgcgggcggggatctccttggccgacgggatcctgggggagtgggtgttttaaaccccggggccgaggcccgccccgtacttgacaccctcaaggaaaccggaaagcaatttttcgtcggcccgggagttttctttggggaccaccctcccgtccatgtgctagatccagggggcgatggccgtaaaattggtaaagcacatgggggggggggccctggggggggtcccgggaccccgcgcctgggcggttcttggggaatggtcccccctggggcgagagggagcgaagctgcgccttgggggggggggggtttgtgggggggggggggggtggggncgcgcggggccgggggggggg

SEQ ID NO: 94144 - DNA, 1104 bp, Zea mays
  Clone ID: MRT4577_18584C.1
ccggccgggaccgctattcgtgtcctggcatccgcagagagcttgttccgtccaggcaaccaaaaagcaagttgccccgccgcgcagaggaagaagagagcagaggaggatggctcgtacgaagcagaccgcccgcaagtccacgggaggcaaggccccccgcaagcagctcgccaccaaggcggcgaggaagtcggcgccgacgaccggcggcgtgaagaagccccacaggtacaggcccggaaccgtggcgctgcgcgagatccgcaagtaccagaagagcacggagctgctgatccgcaagctgcccttccagcgcctggtgcgcgagatcgcgcaggacttcaagacagacctccgattccagagccacgccgtgctggcgctccaggaggccgccgaggcctacctcgtcggtctcttcgaggacaccaacctctgcgccatccacgctaagcgcgtcaccatcatgcccaaggacatccagctcgcccgccgcatccgtggcgagcgcgcgtagccatcatctccggggatctgatgaatgtctagttaccaaacaaataggctgtattagcgtcgttgttctgtattcgttattttggattcggttgcagtgaaaaacagctttactaatctgaaaaaaaaaaaaaaaaaaaaaaaaaaaaaaaaaaaaaaaaaaaaaaaaaaaaaaaaaaaaaaaaaaaaaaaaaaaattttttaaaaaaaaaaaaaaaaaaaaaaaaaaaaaaaaagggccccccctttaaaaaaccccaattttccccccccgcccttccaacttaaaattttttttttgggccccccaaattaaattcccctcccccttttttaacaccccgggacttgaaaaacccctgggttccccaaattaattccctttaaaaaaaacccccttttcccaatttgggtaaaaacaaaaaagcccccccccatccccctttccaaaaatttcccccccctaattgcaaaaggacccccccccttaaccgccccttaaccccccggggttttggggttcccccccaggtaaccctttacttttccaaccccctaagcccccctccttttgcttttttccct

SEQ ID NO: 94145 - DNA, 399 bp, Zea mays
  Clone ID: MRT4577_185850C.1
tcctctatagcggtcgccctctacttttttatcagtaacaagagagttatcaaacgatctctgatctgcctttgccctgcacgatgcgatacacagcggctttttctacttgtgcaacatccgcccctaccgatagtacatcttgcatggctgggtggagcttgcagatttgattctgccctcccagaggacatagttaatacacgaccattactactaggaccatcacaagctcgtcctgagcgagaactctaacggtgcaatgccacgacacaccacatcaatggcagaacatcattttgctcctctatcaagctgacgtcatggagctgctctcgatgagataactccggctctagacacaatctaccctcgggaaccgactcaccgccgcctggg

SEQ ID NO: 94146 - DNA, 259 bp, Zea mays
  Clone ID: MRT4577_185851C.1
tatttttggagaaaatagcaaggaacatttcacttcaacagccaaatagatacatagttcaagtgttacaaaaaacaataaggttcaatgcagccccttaaaagcgaatattctgatcgaattccccaaaaaatacaatggttgacccaaatctccacaaaacacacttatagaatacacagcaacagggaggcaagatatatcggttaaaccatctgacgagtaaaataggaagccctttaaacagatatgggcagaa

SEQ ID NO: 94147 - DNA, 554 bp, Zea mays
  Clone ID: MRT4577_185852C.1
ggtcagcctaaacctttggttttcatggttgcctacagtaatatactgtacaaacacaaaaggacctctagatgagtttgaacccaaaatagccttaatacaatgcccgacatcacacaggacaattcctgttcgtataagaacccaaacgaaagtctgaattagtaatcaatcaaaacccatacacatttcctggtgatgtccatgccgaccttaagccatggaaagaaattgccaggcacaccgtatagaacaggctacgaatctgaacggatcaactgtgccggaaccttatttattaatggtttcaaagtgtccataatatttgcaaacgagggtcttcgccatggttcattggcccagcaagattcaattaatacggctactagaggattcagatcttttgggatttcaagccttcttcctttgaaacctacagcagcaaccacctgggcaggattcaggttacaccatggttgttgcagtgtcattagttcccataggataacaccgaagctatagacatcagatttctcattggatggttcatctcg

SEQ ID NO: 94148 - DNA, 420 bp, Zea mays
  Clone ID: MRT4577_185853C.1
tggaggagggctttagcgatggtcctgttcatcggatggagccgcgctgctcgccagggccgccggcgccggcgcgcagcacgccgcgtggagcatcatcaccccgcccatgttccagagaatgatgagccaccgcggcgacagcgggcgccagggcgcctcccacacctacgacccctacatcgagggcgccagccagttccccggcttccgcaccaccggcgacgaccagacgcgcaggcgggagctcgtcgccttcttcggccacacggcccacgacaccaccgttggaagggcgactgctccggatcgaccgtttgtctggcgatactgccggccgaaggcaacacaaacacaccgacccaccctactatggacgcggacccatacagctacctcacaactaccactacagggtcg

SEQ ID NO: 94149 - DNA, 2181 bp, Zea mays
  Clone ID: MRT4577_185854C.1
tcaagtcaagtacaggatctgttgtgcttcatcttggaaagctcccggtccggccccgcgggcgtcgcgcgttgccacaggagtggtgcaaaggatagttctagatgaaagacgccgattaaacatggcatttgatgtggccaaaggaatgaattaccttcatccgacgcagccctcctattgttcatcgtgatctgaagtctccaaatagggatccaggccaacttactgatcctgattcctttgtcaatggtccctactcactatcagtatcctcacctctccatcccccaaaatttaggtcattggagataacttcaaattttggttcagtagccaagcaatacttctcagattgccattccctgaatctcttgttcagtgattcttccacaggtgttgctaatagcacagtaatttctctggaccatccctattctaagaaacatgttgctggggatgatgttattaacagctgggtgccaggaaaagggcaaggaataatgaagccagatattatggtgccagaagctcctcgggtggttttgccacttgttacttcctccaatattaagcttgaacttgacaaaaagaaagaattggtgactacacagttgcggaatacagtcagtgatctgtcacttgctgcggatgatttgatcattccatggaatgagttgattttaaaggagaagattggtgcaggttctttcggaacagttcatcgtgctgattggcatggatctgatgttgcagtcaaaatacttatggagcaagattttcacccagagcgtttcagggaatttatgagagaggttgcaatcatgaaaagtctgagacatccaaatattgtcctattcatgggtgctgttactgaaccaccaaatctatctatagttacagaatacttgtctaggggcagtttgtataaacttttgcacaggagtggtgcaaaggaagttctagatgaaagacgccgattaaacatggcatttgatgtggccaaaggaatgaattaccttcatcgacgcagccctcctattgttcatcgtgatctgaagtctccaaatcttctagttgacaagaagtatactgtcaaagtatgtgactttggcctttcaagactgaaagctaacactttcctgtcttccaagtctttggctggaactcctgaatggatggcacctgaagtgcttcgagatgaaccatccaatgagaaatctgatgtctatagcttcggtgttatcctatgggaactaatgacactgcaacaaccatggtgtaacctgaatcctgcccaggtggttgctgctgtaggtttcaaaggaagaaggcttgaaatcccaaaagatctgaatcctctagtagccgtattaattgaatcttgctgggccaatgaaccatggcgaagaccctcgtttgcaaatattatggacactttgaaaccattaataaataaggttccggcacagttgatccgttcagattcgtagcctgttctatacgggtacgggaagatgtattttactgagtggtcctgataacatcaacatgagtgtcctaatactgatctgctataattgaataatccttggatggtattactcattatgataatacaattctcataatctttcaaatgaagtgtgcctggcaatttctttccatggcttaaggtatgctgccattttcagagggctctgttcccatcaacattttcaagtatttatggattgttgaatgtgaagtttacttaaatatttgcaaggatgtttaagttcacttcaatacaaaatcaaacacatatcaacattttcaactatttatggattgttgactgaggtttacttcaatatttgctaacatgtttagttaaatacaaaatcaaatacatctacaatggacaggaagtaaagcaatgctgatgttaagcaaactatgttgatggacaagttaaacgaggctaaatatcaaacacggactgtgctagctgtagttccttagtgtccattttgtcttgtgttaattttcagttgttctcttgcaacctatgttgtataaaaggttgactgagttaaaaccattttgttcatttatataattatatgtatcaagttcatagctacggactgcagcaattcattgattactcaaaattatacttctgataatttaataaaa

SEQ ID NO: 94150 - DNA, 309 bp, Zea mays
  Clone ID: MRT4577_185855C.1
aggctgaacaattggcatttatcaaaattgaattacggtttggcaagcacaaccaatcattgtgcaaactatgtttcgatttttcacaagggatgactttcttttaaggccaaacaatagaacttaaaccctggctaattgtaactgataaacctgacaaatttttatccaatttaaaggcacctctttggtagaaaagggccatgtttaaaccacctcggaagatatgcctctggaacgaaagggttaccaactcaacttttttttaaagcacaggtgttgcacgccataaaaaaacttggttaaaaa

SEQ ID NO: 94151 - DNA, 518 bp, Zea mays
  Clone ID: MRT4577_185856C.1
gcctactgggatcagctgggttaatcctggccgccggggcaagcacatgtcctgtgcacccgtgctggtggcctccattgccactacacgggctgcatggtggtccgggtcgggattaggcctgggcggacaggggaagcctgctccggataagtgtagatatacatttgcctatctttgaccggccgatgcggtgttccctgtgccctgtgctccatactaccatgtacggctggctggtgccgcgactacggtttcgacctttccttgtctgttagcccgtggagtacctgcagttcgagttgggctcggctggacctaaacctggccaataatgaggccgggggtatcatcggctccctgttctattgctccgaattaaagtacacccctgtgcagccctacacagaggtgttactgctacaaccgttgcgttagtgcaatctcatccactgccgctgggccatgcttggcaccctgggggccctctccgtagagtggctcaccggggtcttctg

SEQ ID NO: 94152 - DNA, 523 bp, Zea mays
  unsure (1)..(523): unsure at all n locations
  Clone ID: MRT4577_185857C.1
cggaaaaccgcgatctgtgaatttataaattcaacgaattcatcgatctatcgatcctcggaacatctctaaaccggaacgtgaccacgctaattagcctacccattgaaccgctggcactgaagaacctatcacatccatcgtttttcaatgaccagccagtatgcaacatgctgcgacgatctctaactagttcgctccaactctgcgtctccgtatcttgcaaatttttttatcaaccagattatgcccgtcgttttccaattctgcctgctgctggtcgaagaataagctgtcctcctccaataccgcggcgaggttccgattctcggcggcgtcaggccgtggcctggcgggcatcggcggtcttgggaaccctgatctccagggacccctcgctgtcgtcgaagcatgcctccactttcctcactcncgcgtcctctggcagctccacccgccggacgaagccgtgctcccaccaccggcccgcgcgccagtcccggccgtccgccggcggcgcccg

SEQ ID NO: 94153 - DNA, 440 bp, Zea mays
  unsure (1)..(440): unsure at all n locations
  Clone ID: MRT4577_185858C.1
ttaattcggcacgagggcccctcgtgatggggaggaccataaatctcttccttacggggactcttccattaaagctcccccttacttgattccggcgtgcatggacggtaccccggcagatgcacatgatgacacctcccgctgagaggtccccaaccctanccaacggcatgaggtgcgggggtggagagatccatctgattgtgctccgccaccgcatccttgcaaacttaatgacattcattgagcagagctaggcggccacacaggacgattcttgcaaggacagggaaactgcttgttctatgtcataagggctataccggacgggtgctttattggcctataccaacaccttggtaacattggggcctttgtaatcccacttcatgatgactaacccgctctgatgcgggggatcacggggggcaacctctttc

SEQ ID NO: 94154 - DNA, 384 bp, Zea mays
  unsure (1)..(384): unsure at all n locations
  Clone ID: MRT4577_185859C.1
tttaaaaattttttttttttttttttttacaggcttacaacaactgtgngaaaaggggaaaattagtgcatgatgggcaaaaacattcaagagctggaagtaaattccgagtaaaggtgcaacatacaaaggttttgggggggggggtgcacaacngtgcctttttaaaacgcggacaggggccacaaaaggggggattgtgagttttaagggaagcattgggaccagggatcttgggctcctttgttctgtggaggacctttcttagctggtttggaagctttatgatcgaattattttnntgggtaatggtgggtaatgggtttttcattgagaagagggaatnnttattataggcaagagggggattgggtttaaaaattt

SEQ ID NO: 94155 - DNA, 354 bp, Zea mays
  Clone ID: MRT4577_18585C.1
cttcctcaggcggtggctggaggcttcgcatctggggctttaaacatacaaaggtgttggggggacctgcggcggcggcggcggcagcgggggctggggcgcgggggccggaccatgagccgctgagccgggcaaaccctaggccaccgagccagcggaccctcggagcgcagccctgcgccgcggagcaggctccaaccaggcggcgaggcggccacacgcaccgagccagcgacccccgggcgacgcgcggcgccagggagcgctacgatggaggcgctaatggcccgaggcgcgctcacgggtcccctgagggcgctctgtctgctgggctgcctgctgagccacgccgtc

SEQ ID NO: 94156 - DNA, 299 bp, Zea mays
  Clone ID: MRT4577_185860C.1
gcaaaacgggtcattcttcaactcaccggggacaactgccgaggctgcgagccacggcaacaacgaccgagcgctccgctacttggattccctcgtcaacatgtttggcagctcagtgccaactgtgtatccccggagcacgtactctcgtctccacatggtggatacactgcaaaagatgggcctctctcgaagctttgtctctgagataaacgaaatgcttgacatgacatataggtcctggttggccaacgacgacgaggagatgatgctggacatgtcgacgtgcgccatggcgt

SEQ ID NO: 94157 - DNA, 503 bp, Zea mays
  Clone ID: MRT4577_185861C.1
gtggacacgacccggtgagagcacccgtgaaaggtccgtagtctcaaccactgcaaaagaggacataagagggatggacaaggatctgacccatcatgcaacactgcaagccggactgtgagccgaagcaatgcacccaccgacgcccccaacaacgatgacaagacgataacaccgcccgccacgccggtccccagatcgataccatagaacaattccatcactgaatccaacaatgctgcatacaacggtacatccatcaacacctacctcctcaacaaccacaccgaaaacctcacccatgacctagttccaaatcatcttaaaaagaatctgatgcaaacaatgctgcataaaaagctgacacaggacactacttgctgaactgattaatgagaagacacatgtgattccagagtttaaatcaggctatgaattacgcaacccactgatcattaacaagctcattagggccctggaaacgaacttgcgaaccaagaaat

SEQ ID NO: 94158 - DNA, 2920 bp, Zea mays
  unsure (1)..(2920): unsure at all n locations
  Clone ID: MRT4577_185862C.1
tttattcggcacgaggattcggcacgacgacggggcactgctcacgggaaagagagaggattcctccgccgcgtccgcgttggactggacagctcacgccgctgcgaaagcaaccagccagagccagatccgtcggttccaacgaaacatccattcacgcccgccaccggcatccccatctccgatccgccgcagccgcagtcgcaggcacgtcctcctctccggccacccggcgcgcggcagccagcgagcgagccactgtggtcgccgtgcaggtacctaatttttgcagcccccacaaagtcagagggtgggggcaaaaaaagaaagggggaagacacaagacagtcacagagaggtgcagggccaacctgcgtggtgcgggtggtttcgagcacgggcaagcgccaccccgctcgctgccgatcccaatccggcacagcagcggccgccccgcctgcggggcctccctccgaccgttccccccgccctccatggcaggctccatggtggaccgcgccaccagcgacatgctcatcagcccggactgggctaagaacatggagatctgcgacatctgcaaccgcgaccccgggcaatcgaaagatgtcgtcaaggcactgaagaaacggattggccacaagaatccaaaagttcaacttcttgcactaactctgttggaaactgttataaaaaactgtggggatatacttcacatgcatgttgcagagagagatatattgcatgatatggtgaagatagtgaagaaaaagtctgatcctcgtgttaaagagaaggtattggtgctgatagatacatggcaagatgtgtttgggggatcacatgcaagatatccacaatactatgcagcataccatgagttggtgcgtgctggagctgaattcccgaagagacccgagaaacctgcacctttgtttaatggccagtctcaggcagcaaggaatatgcgtagtcctgaccaacaggaagcggaatcttctgctgccaatgattttcctgctttgagcatgtcggagattcataacgctcgtggtattatggatgtacttgctgagatgctgaatgctttagacccaggaaacagagaggggctaaggcaggaggtaattgtggaacttgtggatcaatgccgcacttacaagcagagagtagtgcagctagttaattctaccacggacgaggaacttatgtcgcaggggctcacactgaatgatgatttgcagcgtgttctagcaaaacatgatgcaatagcagcaggcattgcagtccgagtggagaaaaaatcgaagtctttgcaagcacttgtagagaccgaggattcgacaaaccaggattccaaaaaggagcaaggactcatagatattgaggatcccacaagtcaagatgctgcaaaagatccaaatcaaagtacaagtgaccaatctccttttgagcaattagctcttccagcaccaccagtgtcaaatggcgcagcaccttcagcaacacaatctgatcttggcattgatcttctgagctgggatgatacccctgctacagcacaaaatccactagctcttgttcctgtcacagatcctcttgctgactcgacttcatcgaatcaaaatgcactagcaattgtggacacattttcacagaacagcaccgttaacagcaacactcaagcagctgacccctttggtctcaatccaagttctgctattccaggatctcaggcatacaacactccaactcagcagcctttccagtcgcaacaggcgacgctgtatccgaacgggggtgctggaacgtcctatgatcaggcatcccagtttaataatgttaattcagggtggaatgatcaagctgccagccttccagcagagcaagcactgaattacgatgatcaaagtggaaaccttccgccacctccttgggaggctcagccagcggcaagcaacgaaatgccaaatggtgaattgggaggcgtgcaacctctccctgggacagctgggcagttcggcggcatgcagcaggcactgcaaccacaagttaaccacatgggagttccacaaaggcagccaatgtacagcaaccagtcaggggttggggtggcgccaacacagatgcaggcaggcttggggaaccagcagttgggttcgacatccatgatgggcatgcctccacagatgtatggcggcggatcgcaggcagccatgatgtacccgcaacaaatgccagtggcgcccgcagcagccgatgtatggtggtggtggtcgtctggcagggtacatgcagcatcctgctgtggccgctgcacactactacagcaacctggggacggcgggaatgtatgggtaccccggcgcgaacgggctgtcccagagcatgtatggcctctcggtgcaggttaactcgtcgtaccagactaagacggcgccaccctctgcggcgacgaagcccgaagacaagcttttcggcgacctcctgagcattgccaagaccaagaaagcttcatgagacgagcacgagcaggagctttgtcgtttgatcttttacacttgtgtaacattcattgtatggctgtcgtataagctttttggggtcctctttttttttaaaaaaaatatatatatatatttgttcccacgatcccattggattcgttataccgtacgtaaatgatgattcaataaagggtgtgcagtgcagtacgtacttaaagaccaagaaagcttcatgagacgagcacgagcaggagcaggagctttgtcgtttgatcttttacacttgtgtaacattcattgtctggctgtcgtataagctttttggggtcctcttttttttttaaaaaacattatttggtcccacgatcccattggattcgttatnccgtacgtaaatgatgattcaataaaaa

SEQ ID NO: 94159 - DNA, 285 bp, Zea mays
  Clone ID: MRT4577_185863C.1
tagcgccgcccggggggaagggagcttcgaggcggcccgccgcggcgccgcggccgggcgggctgagccaatggcacgggcccttggggcgcgaacgccctaacgtgggtcggggcgggcggcgagcagaggcggccgctgctagctcggattcttttttagaggcgggctgcaccaccccgcacaccgtaacttccccccactggcttttcaacccagcgcgatgaccaactgcaggaatcaacgggtgcttttagaccttcggtgaatactattcgcggtgcg

SEQ ID NO: 94160 - DNA, 2001 bp, Zea mays
  Clone ID: MRT4577_185864C.1
tatgtcgcaggggctcacactgaatgatgatttgcagcgtgttctagcaaaacatgatgcaatagcagcaggcattgcagtccgagtggagaaaaaatcgaagtctttgcaagcacttgtagagaccaaggattcgacaaaccaggattccaaaaaggagcaaggactcatagatattgaggatcccacaagtcaagatgctgcaaaagatccaaatcaaagtacaagtgaccaatctccttttgagcaattagctcttccagcaccaccagtgtcaaatggcgcagcaacttcagcaccacaatctgatcttggcattgatcttctgagctgggatgatacccctgctacaacacaaaatccacttgctcttgttcctgtcacagatccgcttgctgactcttcttcttcaaatcaaagtgcgctagcaattgttgactcattttcagaggacagcaggacgaaccacaacgctcaaccagctgacccctttggtctcaatccgagttctgctattccaggatctcagctatacaacacaccaactcagcagcctttccagtcacaacagcctccgcagcaggcggcgctctatgcgaatgggggtgctgtggaccctggaacgtcttacgatcaggcatcccagtttaaaaatgttagttctgggtggaatgatcaagctgccaaccctgttgtgcccctgccagagcaagcactgaattacgatgatcaaagtggaaaccttccaccgcctccttgggaggctcagccagcgtcaaacaatgaattgccaaatggccaattgggaagcttgcaacctctcccaggttcagctggccagatcggtggcatgcagcagccactgcaaccacaagttaaccacatgggagttccacaaagccagccaatgtatagtaaccaaccaatgcaacccggtcaggttgccgccacaacacagatgcagcctggcttcggaaaccagcagttcggttcgctaccaccaacatccatgctgggcatgcaattcggtggcatgcagcctccgcagatgtatggcggatcgcagccagtcatgatgtacccgcaacaaatggcagtggcccagtatggagcaatgccggcggcagcagccgacgtatggtggtcgattggcgggttacatgcagcatcctgctgtggctgccgcacactactacaacaaccaggggatgtatggctaccccggtgcgaacgggctgtcacagagcatgtatggcctctcggtgcaggacaactcgtccatggggatgaggtcgtcttaccagactacgacggcgccaccctccacggggcaacctatgaagccgacgaagcccgaagacaagcttttcggtgacctcctgagcattgccaagacgaagaaagcttcatgagacgagctggagcgggagcggccttctgatatatcgtctccccttttttttgtggtttttcgtgctgtttgatcttacacttgtaacattatctgaatgtgtaaacttttttggggtccttttcttttattcccacgtcgtgtgtgatcctattgatcccattggattcgttataccgtgtgcgtgtactgatcacgagcgatgggaaactttggccgtaaatgatgattcaataaagggtgtgcagtacgtgattaagaaaaaaaaaaaaaaaaaaaaaaaaaaaaaaaaaagaaaaaaaaaaaaaaaaaaaaaaaaaaaacaaaaaaaaaaaaaaaaaaaaaaaaaaaaaaaaaaaaaaaaatttaaaaaaaaaataataaaacaaaaaaaaaaaaaaaaaattaacaaaataaaaaatattggggcccggcttaataaatgaaaaaaaaatttttgcccgggcttacgagaaaaaaaatcttttttagctggaaaaaaaatataacctccggcgcccagtttaaaaaactggaaaaaagaaaaaaacgcaggatcaaaaaatataatgtgttgaatgaaactcccc

SEQ ID NO: 94161 - DNA, 442 bp, Zea mays
  Clone ID: MRT4577_185865C.1
tttccatatcgccctcacactgcacggacttgctcctccttctcccctctccttgtccacagcccccgtaaaccatggaagatgcgtgcgtcgaccatctgtatgcctctcgagagttcaaggtgaacgacgatgtatagcggaaacggagcttctcgagaagcattcgttttcgtggtgactttcacgacctccttggcggtgagctgatgggctcaccaaccgagaagttaccatacggcaatggctctagtccattgagagtcgctccttttttatttctttaccccctttcacgttctagtgtcagcgattgtgccgaccccgaagctagaagacaaagaacctcaactattcatgagaagaagcgcttatatacagagatacattgcgtgagacaatgattgccctcatgtgtactctccctgtccctaaacaagca

SEQ ID NO: 94162 - DNA, 811 bp, Zea mays
  unsure (1)..(811): unsure at all n locations
  Clone ID: MRT4577_185866C.1
ttatgagtgaacgacagtagagatgtcaatggggacccgatacccgccaacctgtggggaattccctattaggatacggatatgtgacaaaaattgttcccatgagtatggatatgagataaaatctccatccattgggtaaatgggtatggttttgagaagcaataatccgaacgtgattacccatagatatttcatacgtgtacaccggtcgtgtttgtataaataagttgaagccgagccggccaccaagcccagcacggcagtgcaccaggtcccaggtcttagcccaacaaggcaacacgacaagacaactagcagactagcatatgctacgccctgcccaaacgacgatgacgactatggattctaatgcgccaaggaactcagatggtgaccaatgaaggtgagcaaactccatttctccatttcttctatcggtcccaaagacttattttttctgatagatgaatgaattgatcatggttcatggaagagtgcttgccgatatggtgatgtctgaaatttagattgtttgtgctacctgttagtacctagttatcccttaattggggatgagacccattgggaacccgaaactcaaatgaggatggatatgaaatgagttttgcacccatgataggtatgtggataggtatgtggatggatcaaacatgatgggatgngtatgagatgttataacccgatggggaattccccgttgacatctctaacgacaagagacgatcgtgtgtttagtatagcttcagagcanaactccaaagagttggttagagcctaccaacaccct

SEQ ID NO: 94163 - DNA, 648 bp, Zea mays
  Clone ID: MRT4577_185867C.1
gtatagctagctcccactcggtccgtccatgtcccggggctgtgattacaaagagagaggctcgagtggcgcgattctgggaggaatcgtttctgggacggtggatcacgccgtgcgtgcgtggcgcccctcggcgcagcggccttggtctggatcggttgcgtggaacgcgaggtgccgccctgagcgagccgagtcagatcgtctcgcgcgggcttggtatctcgtgtccctcggctcggttccgcacggtccagccgctgcggactgggaggcgtcgcgtgcttccggcgccaccgccgtctgctagggttcttccccggccacggtgaagtggaagaagaagcgcatgaggaggctcaagaggaagcgcagaaagatgaggcagagatccaagtaggcagatcgagatggattgtggacctgatgacatgcgtgggtacatacatttcttcggatgcgttggtgtgcctgtggagagatgtcaacctgccatggtgtcacggtctgccatcagttgaacgtcttgcctgcacttcagtaggccatttttcatggttctagttgtatttgaatccagcgtttgccactaagataaatcagacattcgttttgtgaacctattatgatggagctttatttgctgac

SEQ ID NO: 94164 - DNA, 413 bp, Zea mays
  Clone ID: MRT4577_185868C.1
ggacaagaggcaaaaaagggaactgttttgtttaaaagtttcacggggacccataaacctgaaaaaatttgacccttttttgctcaaccaaccccttggatccccccaactttgtttcaaactttccgagggaaaaaaattttttttgggaagcccttttttccgggggggaaaaaaaaaactggtttgtttcaccaaaccttgggttttttattttaatgggggctgttcatgggggggatcagggcaaccccccgggtgctgtttccccacttgttggggtaccaggacacaagctttaaaaatttgccgttaaagggaatgccccccttaacataaaaaatgctaaacctggttgcaccctggaaatggggggaaacaagggcctccttaacgtaacccaggatgccctt

SEQ ID NO: 94165 - DNA, 230 bp, Zea mays
  Clone ID: MRT4577_185869C.1
gtcaacactcgcttcctctgtccgtgtgctcacttgtcaggcaccttctgcgagccattgctgtgcgtctcccctccaatgctcttgggcgagagccattatgatcggccagcgctttgtccggcccattatcgatgcttgttcgagccgatcatggtggattcggaattgttgctgcggacgttcactccaatcggacatctatgtggactgcctgatgtaattttatg

SEQ ID NO: 94166 - DNA, 742 bp, Zea mays
  unsure (1)..(742): unsure at all n locations
  Clone ID: MRT4577_18586C.1
ccggccggngaccatccggcactcttgcggaggaaacaccacgggcccatactaatatcatcatcacttctctgcctttgtgtccttcccccttccccaatccccccaggcaccaatctctatccccattgtccccccccccaaggctgcactgcgactccgccttactgtgactcttccgagacgtgcgcccaaagtcacgcatacaccccttgcgtgtgccccttccagctgctccgactacaaaaacacctgcctgcgcccccagctgcgagccctctgcaacgagtgctttcacgctgttcctttgaccaccaccggcacggagccgggaggacaagattctctgtcacgtcgccttagtcaaggttgaaaaaagttcaaagcccccactaccactccgcttcgcttgcctattccgatccatcaaggacaccctatcagccatgccttcctatctccgctccaaccctcgcgcctactccttccctccatgggtcgagacgtccgacgacgactccagccatctgcccgacatcgacgaggacccctttgcccacttcatcacccccatcaccgacgccgaggatccctacgagctgtctctgagcgccggcatcgacgccgacgagggaccacgcaccgcaaagacgaccaagttcaggtccaacgtcgccggcagggggctcgctatgtcaagcagacccacgccccactccacaacgtctatcacgtgccaacc

SEQ ID NO: 94167 - DNA, 1660 bp, Zea mays
  Clone ID: MRT4577_185870C.1
gggtgtgttttttaatataaataataaataaaataatttatctaaatgtcttctaaagtcttacaactccactattttatggaacacctaatggcctgctccaccaaccacaccaaattttctagagctataggtatcaaacagggggtgtgtgggcaaaagaagaccaattcagaaccggtgcataacaatgcttattaccttatttatatgtagtaaaaggcacttacatgatggcttctgaaacatatgccaacacgaaaacaacatactacacacagggttggatgctacttaagattaccataacagagtaccatcacattgataaaaacatatcacacttgtactagctcatgcatgtcaaagataggcaggtaggcagtgcttgctgaactttagatcaatacacagtcctgccatcaccatccaggatcatatccttgaaagccccaccactagggatcataggcaacacatgctcctggtgcgggacgattatatccaagaggtacggccctggagcctcaagcatcttcttgattgctgcatggacttcgctcttctttgtcacacggactgctggaatgttgaaccctttagcaattgccacaaaatctggatatatctcactttcgttctctgggtttcccaagaatgtgtgtgctctattggccttatagaacctgtcctcccactgcaccaccatcccgaggtgctggttgtttagcacaaagaccttgactgggaggttctcaatacggatcatagctagctcctgaatgttcatgaggaagctaccatctccgtcgatgtcaacaacagtgacacctgggttggccacagcagcaccagcagcagccggcaaaccaaatcccatagccccaagaccagctgaagacagccactgccttggccgcttgtaagtgtaatactgtgccgcccacatctggtgctgcccaacacctgtggcaatgatggccttccccttcgtcaactcatcaagaacctgaatagcatattgtggctggatttcctcattgaagattttatacccaaggggaaactcccgcttttgctgatccaattcatcatgccatgagccgaagtcaaagctcttctttgatgtgcttccttccagaagagtattcatgccctgcaaagcaagcttaacatctgcacagatggacacatgtggctgcttgttcttgccaatctcagcaggatcaatatcaatgtgcacaatcttagctctgcctgcaaaagcctcacccacgcgtccgcccacgcgtaaaaaaaaaaatttttcttctcttttactctcccttcctcctctccttcttttccttccttctcctcctccttttcttctccctcctcttttctttttctttcttctttcctttttttcttttcttttgtttcttccccttcccccactttgcttcccttgttttccgtggtgtttgggggctctgcgtcttttgtgggctgggtttctgtcgcgtctggggtcgttggcgtgccctggtggttttggtccgtgtgttggtgttccagccggcagggcggcgccgtggagtttggtttaattgatgttagactacattagtgaattaaagagaaaaagtttagagaatatgggagagagatagacagg

SEQ ID NO: 94168 - DNA, 554 bp, Zea mays
  Clone ID: MRT4577_185871C.1
ctggccgggacctattataccgtcagccgccgccgtcctcccaatcccctccccacatcgggaaccgccgccgacgccgcaggaggagacgcatcgaggttagcacgcgaagaagcgaccatgagggccaagtggaagaagaagcgcatgaggaggctcaagaggaagcgcagaaagatgaggcagagatccaagtaggcagatcgagatggattgtggacctgatgacatgcgtgggtacatacatttcttcggatgcgttggtgtgcctgtggagagatgtcaacctgccatggtgtcacggtccgccatcagttgaacgtcttgcctgcacttcagtaggccatttttcatggttctagttgtatttgaatccagcgtttgccactaagataaatcagacattcgttttgtgaaccaaaaaaaaaaaaaaaaaaaaaaaaaaaaaaaaaaaaaaaaaaaaaaaaaaaaacccaaaaaaaaaaaaaaaaaaaaaaaaaaggtcccttggccggaacccccctaagggcaaattttggaaaattcctttaaaa

SEQ ID NO: 94169 - DNA, 285 bp, Zea mays
  Clone ID: MRT4577_185872C.1
aaaaaaaaaaaattaaaaaaaaaaaaaaaaaaaaattaataaaaaaaaaaaaaaaaaaaatgggcgggtaatttggcggcccgtctttagttccatcttacttacccttccatccaatttattactctttctataatttcaccaaatatcaatttactccccctttttttacaacctcttcactggaaaaaccctttctttccccatcttaattctcttcatctacatacctttttctcctactgacttattatcaaaaagtcccttaccaatcccccttcccaa

SEQ ID NO: 94170 - DNA, 683 bp, Zea mays
  unsure (1)..(683): unsure at all n locations
  Clone ID: MRT4577_185873C.1
tgggtacctcgaggccggccgggaatcccctcccccatcgggaaccgccgccgacgccgcaggaggagacgcatcgaggagagcaagcgaggaagcgaccatgagggccaagtggaagaagaagcgcatgaggaggctcaagaggaagcgcagaaagatgaggcagagatccaagtaggcagcagatcgagatggattgtggacgtgatgacatgcgtgggtacatacatttcttcggatgcgttggtgtgcctgtggagagatgtcaacctgccatggtgtcacggtccgccatcagttgaacgtcttgcctgcacttcagtaggccatttttcatggttctagttgtatttgaatccagcgtttgccactaagataaatcagacagtcggttttgtgaacctattatgatggagctttatttgctgataatatctaccaaaaaaaaaaaaaaaaaaaaaaagtaaaaaaaaaaaaaaaaaaaaaaggcaaagaacttggccccgcctcccgttttttaccgaacatgcgcgtcgggccgcgtcgacatagctgcttgccgccgacacccgcagccgaaatggccgtcgcccacgcgccgccgggccggggcgtgctccccctcctgctcgtcgccgcgctcgtgggggngttgccggccacctgcgccgcggccaggagca

SEQ ID NO: 94171 - DNA, 3382 bp, Zea mays
  unsure (1)..(3382): unsure at all n locations
  Clone ID: MRT4577_185874C.1
cccctccacacttttttaaacccggcccccttttttttttttgggggccccataaaaaaaatttttcctttccaatcccccgggtttaacttttgaccccttaaaagggcccccccttttttttttttttttttttttttttttatttttttttccttttttttttttttttttttttttttttttttttttttttttttttttttttttttttttttttttttttttttttttttttttttttttgaaggaaaacaacagactacacaattacaaggtcggaagctacataggattaccataacagatagctgacggcccacaaaaaaagatagaacacaggagaacatcacacagataaaaacatatcacccttgtactagcagggaggcggtgcttgctggattttagatcagttgcttgctggattttagatcagtacacagtcctgccatcaccatccaggatcatatccttgaaagccccaccactagggatcataggcaacacatgctcctggtgtgggacgattatatccaagaggtacggccctggagtctcgagcatcttctttatcgctgcgcggacttcgttcttctttgtcacacggaccgctggaatgttgaaccctttggcgatcgtcacgaaatctggatatatctcactttcattctctgggtttcccaagtatgtgtgcgctctgttggccttatagaacctgtcctcccactgcaccaccatccccaggtgctggttgtttagcacaaagaccttcaccgggaggttctcaattcggatcatagctagctcctgaacgttcatgagaaagctaccatctccatcgatgtcaacaacagtaacacctgggttggccacagaagcaccagcagcagccggcaaaccaaatcccatagccccaagaccagctgaagacaaccactgccttggccgcttgtaagtgtagtactgtgccgcccacatctggtgctgcccaacacctgtgccgatgatggcctcgcctttcgtcagctcatcaagaacctgaatagcatattgtggctggatctcctcattagatgttttatacccaagggggaattccctcttctgctgatccaactcatcgttccatgagccaaagtcaaagctcttctttgatgtgcttccttcaagaagagcattcatgccctgcaaagcaagcttaacatctgcacagatggacacatgtggctgcttgttcttgccaatctcagccggatcaatatcaatgtgcacaatcttagccctgcttgcaaaagcctcaattttccctgtcacacgatcatcaaaccgcacaccaaatgcaagcaacagatcggccttatccactgcataatttgcatacactgtgccatgcataccaagcatgcgcagagacagtgggtcgtcgctggggaagttgccgaggcccataagagtagttgtgaccgggattccagtcagctccacaaagcgtcgcaactcctcaccagatgctgcgcagccaccgcccacataaagaacagggcgccgcgattcaccaacaagacgcagcacctgctcaagcaactcagtcgcagggggcttgggaaggcgcgcaatgtacccaggcagactcatgggcttgtcccagacaggcaccgccatctgctgctggatgtccttggggatgtcgacaagcaccggccccggtcgaccagaggaggcgaggaagaaagcctcctgcacgacgcgggggatgtcgtcgacgtcgaggaccaggtagttgtgcttggtgatggagcgggtgacctcgacgatgggcgtctcctggaaggcgtcggtgccaatcatgcgtcgcggcacctgtcccgtgatggcgaccatggggacggaatcgagcagcgcgtcggcgagcgcggagactaggttggtggcgccggggccggaggtggcgatgcagacgccgacgcggcccgaggagcgcgcgtagccggaggcggcaaaggcctccccttgctcgtggcggaagaggtggttggcgatgacgggggagcgggtgagtgcctggtggatctccatggacgcgccgccggggtaggcgaagacgtcgcggacgccgcagcgctcgagggactcgacgaggatgtcagcacccttgcggggctcggtggggccccacggccggagcggggtggccgggggagccatcggcatggcgggtgacgccgctgagcacctgatgggcgcggcgagggcgcggcgggtggccaggaggtgcgcccggcgcctcgccttgggcgcagcggtagtggcgccagtgagcgcggtagacgcggcggcggcggtggccatggttgcggcggctgtctcggaggcggggaaccgccgccgacgccgcaggaggagacgcatcgaggttagcacgcgaagaagcgaccatgagggccaagtggaagaagaagcgcatgaggaggctcaagaggaagcgcagaaagatgaggcagagatccaagtaggcagatcgagatggattgtggacctgatgacatgcgtgggtacatacatttcttcggatgcgttggtgtgcctgtggagagatgtcaacctgccatggtgtcacggtccgccatcagttgaacgtcttgcctgcacttcagtaggccatttttcatggttctagttgtatttgaatccagcgtttgccactaagataaatcagacattcgttttgtgaacctattatgatggagctttatttgctgataatatctagctacctatttgagctgaaaaaaaaaaaaaaaaaaaaaacagccctagtcgaacaagtccaacgcctcccccaagccgcaggaacgccgccacccgccgccgactgcagcttccggctccggcgtgcactcagctcaactgctccaaccctccagctctcgcttgccgcccagctaccacccgtcaggccccatcccctcaactgctccaagcctccagcnttcctggtgttgtgctacaaggtgatggtcgatggatggtgcagtttgcttgctgtgtgcctctgtgcaatgcttttagactggtgctgcgtctcttccaagttgcagcttgtagtttgctccaagtgaccaagttgtgtaactgaatgaggttggcaaggtgcctagtcggccagccctacctgtttgctgtttggcggtggcttggccatggcctgttgttgtctacttctctataattctattgcagacttgcagtttgtttgttccaatttgcagacttgtcacaaattttgttttttgcttcattgcttattgggtacttgtttcaagtatttctaagtaagttaatctgtcatgaacattgtatggacgtgtgtgcagctttt

SEQ ID NO: 94172 - DNA, 431 bp, Zea mays
  unsure (1)..(431): unsure at all n locations
  Clone ID: MRT4577_185875C.1
gcgtacgnaaagaacttggcctcctctaccgtttcgtttccttacatgcgcgccaggccgcgacgacgtagctttttaaaggcgacacgcccacccaaaatggccgtctcccacgcgccgccgcgccagaacgtgctccccctcctgctcttacacgcgctcgcagcagcgttgcctgccacctgctccgcggccagtatcaagaagtcgcacacggacatcttcagcttcggtgactcgctctacgacaccggcaacctcatcataaaccacacgcccaatgcgctcaccaccagacgccctccctacaggatgaccttcttacacaagcccaccgaccgctgctccaacggccgcctctttgacgacttcctgttcgagcatttcaggctgacactaccaccaccttcgcaagccaaaggcaatgactt

SEQ ID NO: 94173 - DNA, 440 bp, Zea mays
  Clone ID: MRT4577_185877C.1
cctcgaggccggccgggacatcgtgttctcacctgtagagtcggtgcttcgactgacatcctcgcggaatgggcgaggaggagatggacactctagcgtgagctcctgcgaacgcagggaaccacgatacacccgtgcgtgtcaacagcacaggtgggcttcgtggcggcatgcttcctcaagtcgtcatctgccggtcgcaatacaaagtatgcccggcctagccgtggcctcgggacagcgagaatgctcatcacaaggtgctcatgcagcacgactgaacggtgcgcctctccgaacttgcgtacgctggactcaccaacgatgccctggcaatcggcggctaggagggagtcttcgctgtcgatatccctgttgcttatggtcaccactacagacctgaggtggaggtcataaggactgttcaaacaggcaccatg

SEQ ID NO: 94174 - DNA, 486 bp, Zea mays
  Clone ID: MRT4577_185878C.1
ttctggctttaccacgctgctccacatgctcaaggacgagcggttggtgcagcaccagccgacgcagcacccgacgtcggaggagctcagcatcggcaagatcaagttcaaggccttcgacctcggcggccaccagatcgcgcgccgggtgtggaaggaatactacgcagaggttgatgctgcagtgtacctggtagatgcgtatgatacggagcgattggctggatgagcactggagctggacgctctcctgtcagatgagtccttggcaagaagctccatctactatgctaggcggcaccgaagcaatcccggatgctggctctgaagaggagctgcggtatcacctaagccttagccactttacatccgggaagggcaaggtcaaccttggggactccaatgtgcgcgcacttgaggatttcatgtgcaggggggagggtatgatgcgctactgcaatggttacaagcgggtctaccaataca

SEQ ID NO: 94175 - DNA, 425 bp, Zea mays
  Clone ID: MRT4577_185879C.1
attttgggaagctcgccgacctgggctacaagagaagcgccaagaagtgcaaggagaagttcgagaacgtgcacaagtactacaagcgcacaaaggaaggccgcaccggcaggcaggacggcaagagctaccgcttcttcgacgagctggaggccttgcacgcagccgcgccgcagccacagccgccgctacagaagcagcagcagcagttgccgccagcgagcaccaccgctccaccgttgcacgccttcgccgcgccagtatccgcgccgccgccgataagttcaatgccaccgtcgacggggccgatgcaaccagcgcccatatcgtcggcggcaccggcggtgcaggtccagacactcgtggagcttgccggggcccaccagcccctcaacctgctgcaaggcttcagcttctcttccatg

SEQ ID NO: 94176 - DNA, 297 bp, Zea mays
  Clone ID: MRT4577_18587C.1
ctagcgccatccacccacccacccactcgcttcagccgtctccgccgcgcgtaccaagcaggtggagacaggatgccggctggccacggcctgcgctcgcggacgcgcgacctcttcgtgcgccccttccgcaagaagggctacatcccgctcaccacctacctccgcacctacaagatcggcgatcacgtcaatgacaaggtgaacggagccgtccacaagggcatgccgtacaagacctaccacggacgtaccgcttgagtctggaacgcaaccaaacgcgccatcggtggtgag

SEQ ID NO: 94177 - DNA, 492 bp, Zea mays
  Clone ID: MRT4577_185880C.1
acaaacctcaacagcctctcccctcctcccccatcccatcccagtcagccaaacgcccaacaccacctcgtgacttcgtccgcagaccttccctcgcgcttcgactcccactccgatctccggccatggccgcggcgcgccccggatcccctgcccccagacggctgcccccctccacgctcctcctcctggccgccgtcctcctcgcggcctcgccgccggcgcgcgccctccggttcgacctcgagtccggccacaccaagtgcatctccgacgagatcaaggtcgactctatggccgtcggcaagtacagcgtggtcgcccccgaccccagctaccccgacgcacagctccccgagtcgcaccgcgtctccctcagggtgacgtcgccgtacgggaacagcatgcactactccgagaacgtgcagtcggggcacttcgccttcacggcggtggaggccggggactacctggcctgcttctgggcgcctg

SEQ ID NO: 94178 - DNA, 301 bp, Zea mays
  Clone ID: MRT4577_185881C.1
ccgtcaggctgtcattacggtttagttgtttacccagcgagcggaggcgggccatcagagtaactttcgtgaaggactctcttcacaaagaaacaatgtggcccgaagggccttatttcccccattgttccgacaccaactcattaaggggaggccacaacattaacggggcttacttgattattgggaaaccacccccccgatccgccgtggtgaaccaaattttttggttaccggcaaaagcgtttattgctttgcgctgggggttccgattcctgtaagggttaaggctggtgacaat

SEQ ID NO: 94179 - DNA, 592 bp, Zea mays
  Clone ID: MRT4577_185882C.1
ccggccgggacacatcgacattagaagccattcacttaaaccaactccgacatataactcaccactcttatacgactgcaataaaaatgcactctctgcacacaagccatgtacgatccatcctctctgtctattcccctttctcaaagagttaggaacttgcctcaattgactatcaggtctgtaaggctctttgggatgatcttttgacaaaacaacacactaaaattagcacccttccagatccggatattgatcactatagcgaggactatttgtcctttagactcaatcatggccctacttgtacccggagggtcaatgccatcggctcactattgcacaccatctagcaacccctaagctaccaaggctgagcgctgaccggaccaacgatgaagctatctcccatcaattgcaagggtgctaactgctagattgccactctcaaaatctgatcagcctcttatattagaggatcaatacatattctcgaaagagatgcatctatgccaattgccagctattcaatatccacattcactgaatggctattctggggcacaacaccgtctctacctgtatcatgtca

SEQ ID NO: 94180 - DNA, 659 bp, Zea mays
  Clone ID: MRT4577_185883C.1
ttgttataaatacgtcacacagtgaagctcctggttcttccatcagatcccctcttctctctctctctctctctcttcttcttgctctagcactcttcgctgctctgttccttccggctaacaccggctacgcccaccccacggtggatggagggcgtcgaggagatcgtcatcgccggcgccgggctcgccggcctcgcgacggccctgggattgcacaggaaaggggtgaggagcgtggtgctggagtcgtcggcgacgctgcgggcgtcggggtacgccttcaccacatggaccaacgccttccgcgcgctggatgccctgggcgtcggggacaagatcagggagcaccatctgctttacgagaggctggtggccttctctgcatccacaggcgaggctgccgcaaaactgagcctaaagatgcagggcaaaagcgggcctcacgagattcggtgcgtgaagcgcaacttcctgctggagacgctggagaatgagctgccggagggcaccatcaggtactcctccaagatcgtcgccatcgaggaagagggcaacgtcaagctcctgcacatggccgacggctccaccatcagagccaacgttcttgtggggtgcgacggagtgaactcggtggtggcgaggtggctgggcctgcc

SEQ ID NO: 94181 - DNA, 283 bp, Zea mays
  Clone ID: MRT4577_185884C.1
aatattatggggcttttttaatgttttttgtttaaaaaaaatcaaaattctaaccaaatcccgcttaaaaaaattccttccaaaaaattgggggaaacatgacatactatactcattacctatataaaaggttcaaacaaaatatttaacaacccacatttcacaatgacccttccactataatgtccaaaggggtattaaaacaattacatcttcattacgacttggattttctaaagacatgttgtgggcttattaactttcccataaattcaagaactgt

SEQ ID NO: 94182 - DNA, 378 bp, Zea mays
  Clone ID: MRT4577_185885C.1
ccgatcagctagcagcataaatcgcgcaatagtgtaccaacaatgtccctctaaactattctgtctacttatgctccttgagctctgggtaaatactgatactgcgaccattttcccacaatgctcacaagctaccataacttcccttcttcatccgtacctgttaccaacattctattgcctatattaaacaccaactctttaaacctacatgatccaacttgcaacaccaacctggcatattactctttatcaccctcattcgctacaacaataatgagtcatatcacagcatttacctttgctacatctattggcacataacataacgatacaacacctacaacaacttgtgctagcaaaccttgctgactactc

SEQ ID NO: 94183 - DNA, 244 bp, Zea mays
  Clone ID: MRT4577_185886C.1
cgcagacggtgcagaagtgctgcggtaaacttcggtgaggagtagaaaaaggggtggtcagcaatcagtgcggtgcatcgcctgaagatacgccacgtgcatgcacaattgcattagtggagtgggtatcacgacacgtgcgccacgggcagtcacgaagatgcgatcattggcgatgagggtgctgagagcttctgcagtgcacttcgatacgaggttaggaagtactgtctgggcacaagtt

SEQ ID NO: 94184 - DNA, 675 bp, Zea mays
  unsure (1)..(675): unsure at all n locations
  Clone ID: MRT4577_185887C.1
ccggccgggaggatatcttgagtacactcgtgcatccctcactcaccccgccttcacgcctccctcaccaaaaaaggtcccgcccttttccgacattcacaggggggacaggaaatcagcgagcatggcctcgattccgacgaccagcttcgccgtcatcttatccgtcctcttctgagccgcggatggcaccgccgccgaccacgacctccccgactacgtcatccactgccgcgactattgcgacacctgccgtgccggggtctcgaccaatgtcaccgagcacatcgcggcagccaagtgtgatgctggagggcaagcacttcggaaccgatgagctcgagcgatccatcgacgctgtgaccgacataaacgacacgtacaccatcgnagctcaatgacagtcaccaggaggacatctgcgatgcgaccttcgttggagagaccgcgcaaggactgcaaccaggtgcaggcgcacagtgaacgcgccggcgtgctgctcaccagtaacgtcggcatcagcgacaaactggcggcgccgccgacccgctcggctaccatgaangactgtggcactgcccatctgcgcctcgatgatcatacagntggactcagaactacgacgacgatcagtaatagcacatcgacgacgacgatcgatatgtaatagcacgt

SEQ ID NO: 94185 - DNA, 1593 bp, Zea mays
  Clone ID: MRT4577_185888C.1
gggtacctcgaggccggccgggagcaggaatggcgtacgcggcggggcggaagaagcgggtgggccgctacgaggtgggccggaccatcggccagggcaccttcgccaggtcaagttcgccgtcgacgccgacaccggcgcgcccgtcgccatgaaggtgctcgacaaggagaccatcttcgcccaccgcatgctccaccagatcaaaagggaaatatcaatcatgaagatcgtaagacatcccaacatagtcaggcttaatgaggtgttggcagggaagacgaagatatacataatcttggaacttgtcaatggaggcgaactgtttgataaaatagcccgatatgggaagctacgtgagaatgaagccaggaagtatttccagcagcttattgatgccattgattattgccacagcaaaggagtttatcatagggatttgaagcctgaaaacttgcttcttgactcacgtggaaacttgaaactttctgattttggacttagcacattgtctcaaaatggagtaggccttctacacacgacatgtggaacaccaaattatgttgcacctgaggtgctaagtagcaatggatatgacggatctgcagcagacatttggtcgtgtggtgtcattctctatgttttaatggctggttaccttccctttgaggagaacgaccttccacatttgtatgaaaagataactgcagctcagtactcatgcccatattggttctctccaggagccaagtcattgatccagagaatacttgatccaaatccaagaactcgtatcactattgaagaaataagagaagacccatggtttaagaagaactacgtaactattagatgtggtgaagatgaaaatgtcagcctagacgatgttcaagctatttttgacaatattgaggacaagtatgtatcagacgaagtaacgcacaaggatggtggtcctcttatgatgaatgcctttgagatgattgcactatctcaaggtttggatctctcagcattgtttgataggcaacaggagtttgtcaagcgccaaacacgtttcgtctcaagaaagccagccaagactgtagtagctacaattgaggttgttgctgagtcaatgggtctcaaggtccactcccggaactacaaggtctttgaagttgctccttctctgttcatggtcgatgttcgaaaggttgccggtgacactccggaataccacaggttttacgagaacctatgcagcaaactttgcagcataatctggaggccaaccgaagtttctgccaaatctacgccgctgaggacgaccacctgctagccgcctagcccagcactgagctactgtagtggcatcaccaagagacgtgattcgtagccgtcagaaagggagagcttctgttgaatctagcattgctcgtggagctgggattcatgttgaccaccaggtgtttgtatattgtagtaacgctattgtagatagtctgtatagctccatttgtgcagttgtacgtagcaggaatatgttaaaaaacaacttttaatgtcaggtataatcggtttgcatccaggaagcatctccaacagtgtctt

SEQ ID NO: 94186 - DNA, 564 bp, Zea mays
  unsure (1)..(564): unsure at all n locations
  Clone ID: MRT4577_185889C.1
ggggggaaaagcgcctttttaaaaaacaaaactggggggggaaaacaaccccccgggagaaaaggcaaaaaaaccccaccccctggcccaaaccaagcaggggcaagttggaaaaccttaaaaggccccggatttaattaaggtaacaaaaaaaacctggcccaaaaccgccccgggttccaaccccaaaaggaaggcggggttggcgggggtttcccccaaaaaaacaaaagaaaccggaaaacccgggcccgggtccattggaattccccggccccggggttagaacccctaagcccatggccgggggggaaaaaaaaaaaaaccggggggggccccccaccgggggggaatttcaaaaacaggggggggccggcccccttaacccgggaaaaaaccccgtttaattcacgaaggaaaaagggggggggggggggccccgtgccttctgcnagcgggcccccccccgggcgccccccggggggggggcgggggggggcccccgcccggggggggggcccccccccccttggggggcccccgcggggggcgcccccccccccc

SEQ ID NO: 94187 - DNA, 572 bp, Zea mays
  Clone ID: MRT4577_18588C.1
ctcgaggccggccgggatatctcgtcgcacgttcggtatggctcactgcaagctgatctccccctagccttgcggctgctcctccgattctagatggagatctttgaggaaaccctgaccgtctagactatcacgctccaggtggagtcagcagactactgtgacaacaccaaggccgagatgctagggagaaggacggcgtccccccagagcagcagcggttcatcttcactggctaacaggttgaggacgggagcacgcttgctgactacaacatccggaaggagagcaccctccaccttgcgatccggctcaggggaggcatgcggatgattgtgaaatgcctgaccgtcatttttatcaccctcgacggggagagctctggcaacattgactaggacaaggccgagatccaggacaaggagggcatccctccactactagcagcgggtcatctttgctgggaagcagcttgaggacgggcgcacgcttgccgactacaacatccagaaggagagcaccctccccttggtgctgcgcctcaggggaggcatgcagatcttcgtgaagac

SEQ ID NO: 94188 - DNA, 1862 bp, Zea mays
  Clone ID: MRT4577_185890C.1
ttttgtataagaaaacccaccccaccgccgcgggggaccaggcggacgagcaggaatggcgtacgcggcgaggcggaagaagcggctgggccgctacgaggtgggccggaccatcggccagggcaccttcgccaaggtcaagttcgccgtcgactccgacaccggcgcgcccgtcgccatgaatgtgctcgacaaggagaccatctttgcccaccgcatgctccacctgatcaaaagggaaatatcaaccataatcgaccatcgaggaggcgtcgttggagcaccacaaggggctcgagctgccgtacaccaaaagccaacgctcggagcgcaggagtaagatcaaaagggaaatatctatcatgaagatcgtaagacatcccaacatagttaggcttaatgaggtgttggccggcaggacaaagatatacatagtcttggaacttgtcactggaggtgaactgtttgatagaatagtccgccatgggaagctacgtgagaatgaagctaggaagtatttccagcagcttattgatgccattgattattgccacagcaaaggagtttatcatagagatttgaagcctcaaaacttgcttcttgactctcgtggaaacttgaaactttctgattttggacttagcacattgtctcaaaatggagtaggccttgtacacacgacatgtggaacaccaaattatgttgcacctgaggtgctaagtagcaatggatatgacggatctgcagcagacatttggtcgtgtggtgtcattctctatgttttaatggctggttaccttccctttgaggagaacgaccttccacatttgtatgaaaagataactgcagctcagtactcatgcccatattggttctctccaggagccaagtcattgatccagagaatacttgatccaaatccaagaactcgtatcactattgaagaaataagagaagacccatggtttaagaagaactacgtaactattagatgtggtgaagatgaaaatgtcagcctagacgatgttcaagctatttttgacaatattgaggacaagtatgtatcagacgaagtaacgcacaaggatggtggtcctcttatgatgaatgcctttgagatgattgcactatctcaaggtttggatctctcagcattgtttgataggcaacaggagtttgtcaagcgccaaacacgtttcgtctcaagaaagccagccaagactgtagtagctacaattgaggttgttgctgagtcaatgggtctcaaggtccactcccggaactacaaggtgaggcttgaaggtccagcgtcaaacagagcgagccaatttgctgttgttctagaggtctttgaagttgctccttctctgttcatggtcgatgttcgaaaggttgccggtgacactccggaataccacaggttttacgagaacctatgcagcaaactttgcagcataatctggaggccaaccgaagtttctgccaaatctacgccgctgaggacgaccacctgctagccgcctagcccagcactgagctactgtagtggcatcaccaagagacgtgattcgtagccgtcagaaagggagagcttctgttgaatctagcattgctcgtggagctgggattcatgttgaccaccaggtgtttgtatattgtagtaacgctattgtagatagtctgtatagctccatttgtgcagttgtacgtagcaggaatatgttaaaaaacaacttttaatgtcaggtataatcggtttgcatccaggaagcatctccaacagtgtcttaaatcagtactctattttcaaatatagggttcaacttataaaaacagttttaacaatgccctattttatattt

SEQ ID NO: 94189 - DNA, 420 bp, Zea mays
  Clone ID: MRT4577_185891C.1
gggaaagaaggggttatttcggggcctgactacccccccccaatactttacagaggaacattacaacccctgcattgccggtaaaaggatactttagggtctaggcaaagctgcttgaaatgcaaatgtactaactagttggcgcctccggaggcgaaaaaccggtagcgctccttgtacgggccgtcaaaaaaaagggcggccttaaaccaacgcgggtacctgaccaaaaccccggccacaaaatgcatgtaatcctccccggggacaaccccgggggggataacctttacctccccggacacaaagtacacaaactgggcgacctgccaatcccacgggattcgggaccggccacccgtgccccaaaaaaaccacgttttcatgacccggagggccttcattcgggcccgcgccacc

SEQ ID NO: 94190 - DNA, 430 bp, Zea mays
  Clone ID: MRT4577_185892C.1
gggggggggggctttcaaattaaaaagaatcagccgggtgtcttatcccgtccccgagcccgcggggggcaatccaaaccaaaaaaaagccggggggggggccgggggaacccaaaaaaaaaaaaaaaagacccacccggggggcgacgggggagggcccacccccaggggaaaccccgaaaaagccgcccccccgggggggggggacccccccccaaaaaaacaaacggggccaggccccggccccctagggggggaccaaaaacgggagcggccggggggggccccccggagggggggggaacaccaacagaaaatcccttcccaaaacgcttggccagggggacccgcacaaaaacaccggctggggacaaatctacaccgggattttggggggggggaaacaaccaccaaaggaactctggggaaa

SEQ ID NO: 94191 - DNA, 144 bp, Zea mays
  unsure (1)..(144): unsure at all n locations
  Clone ID: MRT4577_185893C.1
ctcgagccgccggnaatctcatcttcgtctgtgttcttgggcgtacgcggacacagccccgatccgaatcgtcgtccttgcgagcctcgccgatcccccactgtcctccgctcgctacaagatggacatctgtgggcggaccct

SEQ ID NO: 94192 - DNA, 356 bp, Zea mays
  Clone ID: MRT4577_185894C.1
caaaactctacgtgctcatcgttcggcagcatatttccacattactcatcgtctcgtagatactatcaaaaacggcgaggggaaaggcgtaatagcaaacggtccgcgaaatcacgacaccgacacagacacggacacggagcactctcgtcgtccaaaataacgtcccgcactacgaacaagcggcgctgttcacggctccagcgatcaccgtccacctgatcacgacatcgcgggatcccggtacaccgggcctggactaagcatgacctatcagtaatcgttcacctgcatcggcgccgcagctcctttacgttcaacgtcgcgaaaagcgggctcaaaaacggcacacatcg

SEQ ID NO: 94193 - DNA, 851 bp, Zea mays
  Clone ID: MRT4577_185895C.1
ctcacattactgtgttaaaagcagctgctgtggctgtccgcagccagctagaacattctctttgctgctactttgtttgtaaagtagcactctacaaattcttttaaatggtcccagtgtttctcaactatagcaaggcctaacgaacttccatgcaattccatagtcatacccaaactaattccatttccaaatatccttgcattacctgacagaatttgaattgctgactgttggtatattagtttctagaaattaaatgttcttatgctatgcactcttgggaatttatcactatagtaaaaagacaatggcaatcattgactgtttttttcccatagtgccaaactcatcgcacaactgaaacctcgaggaatacagtcaatcaagtactgtatgcaaagcaaagcaatagttactttaaaaacacagcagcacaaaagagcaactcaacaacctgatatagcaatatactgatccaagtgaagaagaaatagggaaaaggtaaccaggagtttacctgtggcactgcctgaattgtttctacccctgaatcaaatcaaacaattaaaggaactccaagaaacataataatcacaccgtacagtttcaagttacaaacaaatgtaagtaaataataataacattaatgaaatccaggtactgttgaaccacaaacactcactggttaggttgatgttgaccaagctgtcctaataaagactgctgaaataagagtaattgctgcaaagtctcaggcgatgtcagctggcgaagaaattctggattttgaaatatttccctcatctgagggtttgattccatcaggttgcgtgcatttgggttgaagc

SEQ ID NO: 94194 - DNA, 106 bp, Zea mays
  Clone ID: MRT4577_185896C.1
gtctgagtgtgatataaagatgaaggtaatcattttacgattctgccttacccaactgatttgcaatcgttcgggttctttcaaagaccaagtgtggaagaattta

SEQ ID NO: 94195 - DNA, 624 bp, Zea mays
  Clone ID: MRT4577_185897C.1
ttttttttttttttttggagatgaatgagattgtgttgatgaaatgaagctggcttattgttcaagagagccttctcagtcaacagaatctctgacctccccgtcaccaagtgagcagcatcatgaagtgaggataacaacagagagagagcatggaagagagcggaacgtaatccacgccgctggcagcttcaacctgcccctcccccttctccctgacggcaaacataaccctccactacacaatcctcctctagacaatagactcctccctcccccttggatccagacatcatctgcccctcgaagacagcaaccccgtccacttgacaggtccccaagtgaaacaaacccgccaactcgagcaaatgaggaacgccccttggacagcttctccatcggcatgaccggtcacgttatccattcatgtgaggaggggactggattgtacctctagcctgataactcttacgagaaagaggctccaggtcgagggggcggggttctggttgatttctcgaggcaaacagcctcccggctccgctacccgcttccgcgtctgcacggtgcaaggcgcaagcaagatattctgcggttggtcttgtccatcttgcccttggttgc

SEQ ID NO: 94196 - DNA, 1548 bp, Zea mays
  Clone ID: MRT4577_185898C.1
ccggccgggagatccctccaactccaattttcccccaatctctccgagctccgacaatccccggacccggccgattgatgcggcgatggtgcgcgagctccgcgtcgactccttctacgcccggctccgcgccgctgcgggctcctcgtcctcgtccccgctgctgatcctcccgtccgccgccgacgccgactcgctgtgcgcggtcagggtgctcgcgcacgtcctctccgccgactccatccgcttctccatctaccccgtctcctccgccgcctccgccagggcgctcctcgcctccttcgccgccccggccccgccctgcctcgtcctcgtcaactggggcgcgcaccgggacctgcgcgcgctgctgcccgccgcctccaccgccttcgtcgtcgactcccaccgccccgtccacctccacaacctctgcgcgcgcaacgaccgcgtcgtcgtcctattcaccgccgacgacgagcgcaccgcggatctctcctacgacttcgacctctccgcgctcgccgacgcctccgacctcgccgccgacgccggcgacgacgaccacctccgcggcggccccggctccgacgcctccgactcggaggattccgatgacgacgacgatgacgccggcggtggcaggaggaagaggcgccgcctctccgacgaggaacggcgacgaccccgcccccaacaccgaccccggggaggctcttctgcaggctgcgccgcgagtactaccgcctcggcacattccacggcaagccgtcggggtgcctcatgtacgacctcgcgcacgcgatgcgcaagaacaccaacgagctcctctggctcgcctgcgtcgccctcaccgaccagttcgtccacgaccgcatcaccaacgagcgctaccaggccggcgtcatggagctcgagcagcacatcaacggctccggcaacctcgacccgtccggcgccggctccgtcgtcacgctcaaggaaccggcccagatcccccgggcggaggcctcgcgcatcgcctacgaggacgagcccaggctcatgctgctgcgggagtggagcctgttcgactccatgctctgctcctcctacgtcgccaccaagctcaagacctggagcgacaacgggctcaagaagctcaagctgctgctggccaggatgggcttcccgctcgcagactgccagaagaacttccagtacatgagcatggaggtcaagcgcaagatgcgggatgagttcgaccgcttcctgcccgagtacggcctcaccgagttctactaccggagcttcttgagagtgcacggctacaggtccaaagtttctgcggcagatgttgtgtacggtgtcacggcgttgcttgaatcactggattcccagtctaaggacacaaaggagtcttcagcggctgagcagttttgggttgcttactctgcactatcactgagcaacgctgaccagttgcgaaaagggatgctgtctgcaattgagatacagagggcaatattgagacaaggaagctcagcgattactaagacagggtttata

SEQ ID NO: 94197 - DNA, 384 bp, Zea mays
  Clone ID: MRT4577_185899C.1
ggggacgggggggcccaaagcaacagcaacaccaccccccaccacgcggcacccgaacacacaacaagcgaccaggaacacaggccccgacacgccgccgcccaacaaccaccaaaacgcccgcaaagcagcacccccccgacgaggaaaaacccccacaaaaaagcccccgcacgaacaacagagcagtccaacggctaccaaaacaaacggcgggcatcacaagaaccgaacccccccgaagcgaggcaacaagccaaacagccgacgaaaccgcccgctccgcccggcacgcccaggcacccaagccccacagaaccctgggccaccaaccaaaaccagaagcccgacaccacagccacgcacacgcagaaccccgaaggc

SEQ ID NO: 94198 - DNA, 828 bp, Zea mays
  unsure (1)..(828): unsure at all n locations
  Clone ID: MRT4577_18589C.1
ttctccagttgctcgcctctttttcacccttgaccccccatcccgctcgccgcctccaaccttcctccccaagcagaagggacctccctccagatccaacgccatcctccctccgtcgccatgtaccgcgccgccgccagtctcgcctccaaggcccggcaagccgggagcagcgcccgacaggtcgggagcaggctcgcctggagcaggaactatgccgccaaggacatcaggttcggcgtcgaggccagggccatgatgctcaagggggtcgaagacctggctgatgcggtcaagttgactatgggtcccaaggggcgcactgttattattgagcaaagctttggtgctcccaaagttacaaaggacggagtcaccgttgccaagagcattgagttcagtgacagagtcaagaatgtaggtgcaagtcttgtgaagcaggtcgctaatgcgacaaatgatactgctggagatggtacaacatgtgctactgttctgacaaaggcaatattcactgaaggatgcaagtccgttgcagctggtatgaatgcaatggatctgagacgcggcatctcaatggctgttgattctgtggtaacaaatctaaagggcatggccagaatgatcaacacgtctgaggaaatagcacaggtgggtactatatcagctaatggtgaaagggaaattggtgagctcattgcaaaggctatggagaagggtggcaaagagggagttatcaccattggcggatggtaacactttatacaatgagcttgaagttgtggaaggcatgaagcttgacagaggntacatctctccatactttat

SEQ ID NO: 94199 - DNA, 246 bp, Zea mays
  unsure (1)..(246): unsure at all n locations
  Clone ID: MRT4577_1858C.1
taggaatgcggccccttttntatgtgggtgcgacggctactggggctgattcctggagccatctggtgcctgttgcgcctttttaaagagcctcaagcaactgggagccgaggaggctaattcgtatacactgagtgcacgtagaacttgatgtataactcttgtgccatgcttctttctgaccgcgtgtgaggttcagggtcctaggatatgaccctgtatactgcaacgggtctgggaagaaag

SEQ ID NO: 94200 - DNA, 447 bp, Zea mays
  unsure (1)..(447): unsure at all n locations
  Clone ID: MRT4577_185900C.1
aaaaccagcacccaagcaccagcgcagccgaccgccgcagaccgggagggggcgacgcgccgccacagaaaccacagagcacggcaagcgcgaaaccacgccacacggcggacccccggcgagcagggaaacagccacacacagccaggagcaaggagaagacccacaacaacaccgaggacaccggacacgacgacncnggcaggggggccaccacaggccaccagagcaacaagcgacgagggagcgacaagcgagcgagagagagggncgagaaagaggccgcggagaagaacaagccggcacncaagcaggcccgcgngcgggacaagcgcaaggccgagcgggagagagggaccacaaccgagacngcgacgggggaagcccgagaccaccaaggacgacagcacggacaaagaggccccgggacaccgggacgacaacaag

SEQ ID NO: 94201 - DNA, 124 bp, Zea mays
  unsure (1)..(124): unsure at all n locations
  Clone ID: MRT4577_185901C.1
ggcttgtcctatcaacttttttttcatagtcagaagcatgtacccattaaaaggccgaactcggagtttgttacctaccccaatgaacaaattacagcgcaannnttcgcccgtgtcccacccc

SEQ ID NO: 94202 - DNA, 1566 bp, Zea mays
  Clone ID: MRT4577_185902C.1
ggcaagaaagaacatatatatggcaagaaagaacaaacgcttaattaccatagcttggttgtataacaaatgatcacatgtgctctaatacggtttttaccgaacgggtatcaggtacccatggccatccctagacagaagggaccggatttatcttcaaatattgaactggagcctcaactgttgcagcgaaaggcatcatcactgaccaaaagtgtagcaacagttgcaattgcgaagtccgaatctacagcactacaatacagcatgcgcatacatacctcatttaggatttataataactaatctatgtcatcgttgcataacttacactacaaagtcaccagcccttgaggcattcaactcacgtgcacaagaaactaagcacagcacggacgggcttaaagcattgcagagactgcatctcgctgagagctccaaaggcaggatgtcaaacatcacatcaccctctctttcgccttcccgagcccacataatcgtccataagagactgccgtcgcctcttgaatgagctcaacggagcactctcaccctctgaattccttagtgctgctctctttgttggagtcgtattcttagcaagccttttctccttccttgcctgcctctcttgctcatcatattcttgattttccttttcaaccagtctgataagagtatcacaccgcctagccaactcttgggtagttctggacttcacaaaccaatcaaatcggaacaagggagacatacggaaggcagctttcagttcatcccagttcccatatccaagtttgtgcaccatgcaaagcataaagcggtcacattcctcattatagaacttccctttattttggccatattgaattttcaactctaaccatgggttcttgtagcggtctaacttcttcccaatagccttcataatctcatccttgcgggatattcttgcttcccccctttcaatattttttataattctatcataatcactcagctccttgtatctctccttgaaaactttagcatagcgttgaacttcctcttctgtcttaccctccatttcagaggatatacttttaatatcattgcgaccatatttctcacatgcacgaataaatgtgttgaagtctctccttgtccatgatgcaaaaccctcttctaataactgctccttctcttcctgctcctctgctgttaaaggctccaattgatcttcgtcttcaccatcaatggtatctttcttctggtttgcttgcatgaggtaccgcacttccttttcgtacaattcatttagcctttggttattgaaaaactggaaatcatgcaagtgcggcattcttggaatccttggctccctaggcttcgttggtgcaccttggcgaagcgcttgcttaaagtaatcagactcagagtagtttctcttcctttctcttctaggtggctcgatccagttatcactaacgagtttcttgaaatcaaccttgttttcatccttctcatcatcaaaatcatacagttcggcattatcatccatcttaaatttaatggcgtcctctgtgaact

SEQ ID NO: 94203 - DNA, 600 bp, Zea mays
  Clone ID: MRT4577_185903C.1
gtactgtttgcagccacagccggcctattcgttctgatgaggatacgaggcagaggtcttgtgatactaatgaatcttgcggtgcattaccaagttcctccaatcctacagttgaacctttgccttcaaattctctggggaatgctattgttgatggtatgtcacaaggaagtgctgaaatggactgttcagatgatgatgttaatactgtttcacgaattccaactacaaataagcctcatgatgagtcattggggaatgtcccaatcagcaaggatggtatcaatactaataataacttaagcatagagctaaagaaagaacacgacagtgatatgcatcaagattgttcatctatgacaaataaggttactattgatgctattgatggtgacaagtgtattaaaacaaaagttggtgttttcagccttgcaggtcagcaggggttccgaaatgaggtttctgctagcgaaaactctaaagacaaacgatctttgaattctgagaagaatactccagtaaataatactgacaatagcatgcaagatgctaagactgctgcaggctccagtaccacagatctccagaagtcatcagctt

SEQ ID NO: 94204 - DNA, 3957 bp, Zea mays
  Clone ID: MRT4577_185904C.1
gaaaaatcccctccgcctctcgagtgtttatcgcgtaattgccgcatccctcgacactcgagacgactcgaaatccaaagcgccccgccccgacccgaaccctaatcctgcatttcctctcccgccaccgcccgccccaatggcgaagccggtgaagtatgacgacgaggaggagatctcctcctcctccgccgaggaggaggatgaccagtccgccgccgccgcctccggatctggtgaggaaggggatgacgatgaggaggatgctgcggcgctgcccacggaggaggaggaagctgagggcgaggggcagcaagaggaggaggtcgacgaggaagagatcgaagccgtcactaccggcgctggagctgaggacggagaggacgccagtgccgctaccgccgctgaaggcgaagaggagtcccagtccaccgaggacgacgaatccgtcgcaaaggacaaggccatcggcgccgagactgatgcagtggttgggaagcgtgagaagacaaggctaaaagaaatccagaagttgacgcagcataaaatccgagaaaaattggatactcaaaaggctgccattgatgctgacatgaactataaagggaatggacgattgaaataccttcttcagcacaaagaagaattagctcactttgcaagtgcaagtcggacgaattatgtttatcctccttcatggatcaagggaaagacgcatgattctgaagaagaggaagacgaagaatacctcaaagaggaagaagatgcccttgctggtgcagggggtacacgtttagtttcacagccttcatgcatcaagggaaagatgcgtgattaccagttggctggacttaattggcttatacgattgtatgagaatggtatcaatgggatattagctgatgagatgggtcttgggaaaacacttcaaactatttcattgctgggctatctgcatgagttcagaggtatagctggtcctcacatggttgttgcgccaaagtccactcttggcaactggatgaaggaaatccaacgtttttgccctatcttacgtgccgtgaagtttttggggaacccagaagagcggaaccatataagggacaatttgctacaacctgggaaatttgatgtgtgtgtgactagttttgaaatggcaatcaaagaaaaatctgcgttgaggcgcttcagctggcgctacataatcattgatgaagctcaccggataaaaaatgaaaattctcttctatcaaagactatgaggatttacaacactaattatcgtctcctcatcacaggcactccactccagaataatctccatgagctctgggctctcctcaatttcttgctacctgaaatatttagctctgcggagacctttgatgaatggtttcaaatatctggggaaaatgatcaacaggaggtggtgcagcagcttcataaggttcttcgcccattccttcttaggaggctcaagtctgatgtagaaaagggcctacctccaaagaaagaaacaattcttaaagttggaatgtctcagatgcaaaagcagtactatcgtgctctgcttcagaaggatttggaggttattaatgctggtggtgaacgcaagcgattgcttaacattgccatgcagttgcgcaagtgctgcaaccatccatatttattccaaggagctgaacctgggccaccctacacaactggtgaacatctaattgagaatgcaggaaaaatggttctactagataaattgctgcccaagctaaaggagcgtgattccagagtccttattttttcacagatgaccaggcttttggatatcttggaagattatcttatgtataggggatatcagtattgtcgaattgacggaaatacaggtggagaagatcgtgatgcatccattgaagccttcaatagtccaggaagtgagaagtttgttttcttactttcaactagggcaggtggccttggtatcaacttggccactgctgatgttgtggttctctatgacagcgattggaatccccaagctgatctgcaagctcaggaccgtgcacatagaataggtcaaaagaaagaagttcaagtgttccgcttttgcactgagtacactattgaggaaaaggtgattgagagagcatataagaagctagcattggatgctttggttattcagcaaggacgattggcagagcagaaaactgtcaataaggatgaccttctgcaaatggtgcggtttggtgctgaaatggttttcagttctaaggacagcacaataactgatgaggacattgaccgtattatagctaaaggagaggagacaacagctgaacttgatgcaaaaatgaaaaagttcacagaggacgccattaaatttaagatggatgataatgccgaactgtatgattttgatgatgagaaggatgaaaacaaggttgatttcaagaaacttgttagtgataactggatcgagccacctagaagagaaaggaagagaaactactctgagtctgattactttaagcaagcacttcgccaaggtgcaccagcaaagcctagggaaccaaggattccaagaatgccgcacttacatgatttccagtttttcaataaccaaaggctaaatgaattgtatgaaaaggaagtgcggtaccttatgcaagcgaaccagaagaaagataccattgatggtgaagacgaagatcagttggagcctttgacagcagaggagcaggaagagaaggaacaattattagaggagggttttgcgtcatggacaaggagagacttcaacacatttattcgtgcatgtgagaaatatggtcgcaatgatattaaaagtatatcatctgaaatggagggtaagacagaagaggaagttcaacgttatgctagagttttcaaggagagatacaaggaactgagtgattatgatagaattataaaaaatattgaaaggggggaagcaaggatatcccgcaaggatgagattatgaaggctattgggaagaagctagaccgctacaagaacccatggttagagttgaaaattcagtacggccaaaataaagggaagttctataacgaggaatgtgaccgctttatgctttgcatggtgcacaaacttggatatggaaactgggatgaactgaaagctgccttccgtatgtctcccttgtttcgatttgattggtttgtgaagtccagaactacccaagagttggctaggcggtgtgatacccttatccgactggttgagaaagaaaatcaagaatatgatgagcaagagaggcaagcaaggaaggagaaaaggcttgctaagaacatgactccaacaaagcgagctgcactaaagaattcagagggtgagaatactccaccgagttcattcaagagacgacggcagtcccttatggacgactatgtgggctcgggaaagcgtaagagaggctgaccacgtttggcatcctcccttagacatgccgtctctacaatgattttaataccctgccgcgcagtagtgcttagttcctcttgcacgtgagtcgaatacctcaagggcatgtgactagcgtaatttatgcaatgatgacataggttagttattaatcctaaatgaagcatgtatgcgcatgctgtgttagtgtcgtagatctggactttgcaattgcaactgttgctgcccagctgacacagatccctttcgctgcaatcttccggtcctgcattttgcccgcaactgattttgcacccgaaaaaaaaaaaaaaaaaagcggcccctcgggtatggtagtcatgggtatgttctttcttgccatatatatgttctttcttgccatatatctgctactagatagaaaacctgctcacatgacacgtcttttatattaaatattaaatattggacaattagggtactacccttctgaaaaaaatcgcactattgtttag

SEQ ID NO: 94205 - DNA, 411 bp, Zea mays
  unsure (1)..(411): unsure at all n locations
  Clone ID: MRT4577_185905C.1
ggccgtttttgggnnnnnnnnnngagggggggcgggggccagaagaacaccagaccacggcaggcaganaaagggacaccacagggcaccagacgacgcacaaacccagacacagcagcagccacaaagaacacagggcggacggaccaccgcggaggcagagcaccaggnggagagagcgggcgggggagacggcgnaancagcaaaggggcggaaaaccnccaaccgccggccggccaagagcagacaccgcaggcagggcgggacgccccgnagggcccggagagcgccgcccacgccgcacgggccgcagaaaacccaaaccgccacagacacggaccggccaaccaaggcacgaacaaacaccgggggacacaccaggaagcgcagcaccaggaggcgggagaaca

SEQ ID NO: 94206 - DNA, 376 bp, Zea mays
  unsure (1)..(376): unsure at all n locations
  Clone ID: MRT4577_185906C.1
nnttagacaccggcaaacggcaaacacaggcggggcgtggaggaaggcacacgcgaacgcgcgaacgacgcgcagagggaaagccgaagaagtgcctgaaaaaggagcccaggaaccccaccgcctgacagaggtgggaaggacggacacaggaaccaaacaagggagggaggaccaaaaagcgacgccacaacgactgagaggaacaaccgaggtggcccgaccgagaggctaactgccgagagggaaggaggagctcccgcggaactgagaacaacaaccggaggagcaggaaacacccgaccagaaagacgaacgaagaggcacaacgaagggaagaacacagaaaaacaaagaccagcggagaaagaccgcc

SEQ ID NO: 94207 - DNA, 1181 bp, Zea mays
  Clone ID: MRT4577_185907C.1
gtggctcgacttcgtcacctacctgcatcatcacggacacaatgacaagcttccatggtaccgaggaaaggaatggacctatcttcggggtggcctgacaacgctcgaccgggactacgggtggatcaacaacatccaccatgacattgggactcatgtcatccaccatctcttcccgcagatcccacactaccatctcatagaggcaacagaggcagccaagccggtgctgggaaattactacagagagccgcaaaagtctggccctctccccttgcatctacttggtgatctggttcagagcttgaggcgtgaccactatgtcagcgacacaggggatgtcgtctactaccaaactgaccccaccattagctgttctggtccattcacttgactaattgagggaggctggaagttatgcgaaacacaaggatcagaggctaccggagagatctgatctatgagccacacacttgcatataacaataagtcaatcattctttgggcaaaacaagctacagtacaatttccagtgctttactatcaggactcattagcacatgcttagctggtactgttgcaagaaagcaatgtgcagtacctccgcttactgctgtcctcacatatgcagtacattatttgcaaaatgcaagtggactacctgcgccttagatctctctgcaaaagtaaaacaggggggggggggacttgaagttggagacatgggccttttcctgacaaatcatgtattgctgcttcatgacaaaatgagaatattctgacaaaataaataatgcatggaaatagaaaacgaggtaccaagtcttctttctggtccaaaaaaaaaaaaaaaaaggcccctaacaagctccagtacaatttccagtgctttactatcaggactcattagcccatgcttagctggtactgttgcaaaaaaacaatgtgcagtccccccgcttattgctgtcctcccatatgcagtacattatttgcaaaatgtaagtggactacctgcgccttagatctctctgcaaaagttggagacatggggcttttcctgacaaatcatgtattgctgcttgatgccaaaatgagaatattctgcccaaataaataatgcatggaaatagaaaaaaaacaaaaaaaaaaaaaaaaaaaaaaaaaaaaaaaaaccaaaa

SEQ ID NO: 94208 - DNA, 289 bp, Zea mays
  unsure (1)..(289): unsure at all n locations
  Clone ID: MRT4577_185908C.1
cgaataatgagttgatatgccatcgcgtgtgactcattattaacaataaaacaagtttcctcttattaaaaaaaaaaaaaaaaaaaaaaaaaaaaaaaaaaaaaaaaaaaaaaaaaaaaaaaaaaaaaaaaaaaaaaaaaaaaaaaaaaagggggaaaaaaaaaaaaaaaaggttgaacctggnggcggaaccaccctaaggggaaattttgcaaatatccataaaacttgggggcggttcaaccttgcttttagggggcccaattccccctataggggggcgtattaa

SEQ ID NO: 94209 - DNA, 414 bp, Zea mays
  Clone ID: MRT4577_185909C.1
ggtggatggagacctagataaccccctattggaatattgaagtggccctgatgcttttcttaagtctgggggggatttaacctgggagagtccggtggtctctctgcttcggattgaaggcacccacggaccaccactccaggaaagcgggagctgctggtacctgcctccttgtacatatgtatctcaatgattctatggcggtcgcgctgcctgatgttcccttgtatccatcctaccacacggagatttgaattgtagggatagggtgtcttagattgtacttagttccagtctccgatttcattgctgatgtccgttcgtgaattcctcctgccctcagacgaaactgttgagagcacaccgtacatatatgccaaaaaagagtgcaatacaagtcattttgccctttgc

SEQ ID NO: 94210 - DNA, 617 bp, Zea mays
  Clone ID: MRT4577_185910C.1
cccccccccccccccccccccccccccccccccccttttgtttttctttccatgcattatttattttgtcagaatattctcattttgtcatcaagcagcaatacatgatttgtcaggaaaagccccatgtctccaacttttgcagagagatctaaggcgcaggtagtccacttacattttgcaaataatgtactgcatatgtgaggacagcaataagcggaggtactgcacattgctttcttgcaacagtaccagctaagcatgtgctaatgagtcctgatagtaaagcactggaaattgtactgtagcttgttttgcccaaagaatgattgacttattgttatatgcaagtgtgtggctcataaatcaaatctctccggtagcctctgatccttgtgtttcgcataacttccagcctccctcaattagtcaagtgaatggaccagaacagctaatggtggggtcagtttggtagtaaacgacatcccctgtgtcgctgacatagtggtcacgcctcaagctctgaaccagatcaccaagtagatgcaaggggagagggccagacttttgcggctctctgtagtaatttcccagcaccggcttggctgcctctgttg

SEQ ID NO: 94211 - DNA, 432 bp, Zea mays
  Clone ID: MRT4577_185911C.1
accgaataatgagttgacatgccatcgcgtgtgactcattattaacaataaaacaagtttcctcttaaaaaaaaaaaaaaaaaaaaaaaaaaaaaaaaaaaaaaaaaaaaaaaaaaaaaaaaaaaaaaaaaaaaaaaaaaaaaaaaaaaaaaaaaaaaaaaaaaaaaaaaaaaaaaaaaaaaaaaaaaaaaaaaaaaaaaacaacaaaagaaaaaaaaaaaaaaaactttaccccctggctgacccgcctggggggaaatcccaaagcccgggggggcaccgtactgggcgccccgcccgtcaaaaagatttaccctcaaacgggtctttggaggtcgagggggtaaaaaatagttccctaactcagccctacaaaaataggagcgcggagcaactttacatacagtccgaggggcttctgggttgcctcca

SEQ ID NO: 94212 - DNA, 433 bp, Zea mays
  Clone ID: MRT4577_185912C.1
accgaataatgagttgacatgccatcgcgtgtggctcattattaacaataaaacaagtttcctctaaaaaaaaaaaaaaaaaaaaaaaaaaaaaaaaaaaaaaaaaaaaaaataaaaaaaaaaaaaaaaaaaaaaaaaaaaaaaaaggggaaaaaaaaaaaaaaataaattttgggggacccttatagaaaaaaaaaaaaaaaaaaaaaaaaaaaaaacgccccttgggggcacctttgggaggttccttttccccttttcccccccggggcggcccttctggggccccatttgcccgatttggcttcccttaaaaaccttttggcctcaatttctaaaaccctttgtaccggaaaaacccttttgggccacacccctatttcccccaaaagaaaatccccctctcccctccccccttttcccccttggggcc

SEQ ID NO: 94213 - DNA, 409 bp, Zea mays
  Clone ID: MRT4577_185913C.1
gggggccccatttttaaaatggcatgggaaaaaaatggggtttttttattttaaaaaaaaaaaagtttttttttaaaacgggaatataaaaaaataccctcccaaacaaaaaaaaaaactcaccccttggggggggggaataaaaacctggacggggggccaaaataaaaaaccccatattggcaatgttttatggagaattttcaactaaaattaggggggatggggtaaaaactaacccaattccaaattattggggccccaaaccaccccatgtcacttggggaggatgcattttggaggaaaaactttaaccccccgaaattttagggggaagcaatgcaagatattttttccaggggtaaaaagctcaaaataaaagggtttcaaaagaaaaaccccccttttt

SEQ ID NO: 94214 - DNA, 249 bp, Zea mays
  Clone ID: MRT4577_185914C.1
gtcgaccacgcgtccggtcggagatggactgcgcgtgctattctctctaaggaggactgctccttgctgattctggtccagaggagctaccactcggacacgatgtaggctcacgcaacgtacgccttgaacggctactaccacagattgggaacagggctccgggaccttctactccaacggagacgcggtcttcactactaccgatcccagccacttatctcgtgtttatggtaaaataatcgggac

SEQ ID NO: 94215 - DNA, 525 bp, Zea mays
  Clone ID: MRT4577_185915C.1
accgaataatgagttgacatgccatcgcgtgtgactcattattaacaataaaacaagtttccacttaaaaaaaaaaaaaaaaaagaaaaaaaaaaaaaaaaaaaaaaaaaaaaaaaaaaaaaaaaaaaaaaaaaaaaaataaaaaaattggtaaaaaaaaaaaaaaaaaaaaaaaaaggtccttgggccggaaccaccttaagggcaaattcaagaacattgggggccgttatttgggaatccaacctcggaaccaagttgggggaaataatggcaaaagttgtttcctggggaaaattgtaatccgttaaaaattccacacaaaatacaacccgaaagcataaagggaaaagcctggggggcctaaggagggacctaactaaaattaattgggtggcgctaattgcccgttttcaagtgggaaaacctgtcgggccagttgcttaaataaatcggccaacccccgggaaaaggcggtttgcgaattgggcgcttttccgtttcctggttaattaactcgttggg

SEQ ID NO: 94216 - DNA, 444 bp, Zea mays
  unsure (1)..(444): unsure at all n locations
  Clone ID: MRT4577_185916C.1
actcaatccagcctcctatcattcgcctcctctctcaggagcacctttccagagacgtatatcttccagagggggtacctttccatntttcttcacactccttcattcactaccgtttctccgcaagaggtttcatgttccagcccagcggaagttcataattttgtgcagttcaaactggacagcatctgctaactcgaactatatagtctatcccctgaactgtgataaattcatcaaagttgctaaggtttatggaacaaaaataaatccattcttggatagtttatctaaatgcccaaagcatgtacttcacaacccacttaaatctccagacagatacctcatttattgaaatatatcttcaaaagctgctcatattctgacccaaccttctatcttagattattttactaaacttatccaaatggtatctccaaaatc

SEQ ID NO: 94217 - DNA, 501 bp, Zea mays
  Clone ID: MRT4577_185917C.1
cgataatgagttgacatgccatcgcgtgtgactcattattaacaataaaacaagtttcctcttaaaaaaaaaaaaaaaaaaaaaaaaaaaaaaaaaaaaaaaaaaaaaaaaaaaaaaaaaaaaaaaaaaaaaaaaaaaaaaaaaaaaaaaaaaaaaaaattaacctaaactgggaagacaaaaaaaaggggaaattacaaaaaaaatgaaaggacgtaacaatcggtgccccccagcccggtcccagggctggaattaatacctcgcccaaagttggccccctgggtgaaaatcctggtggcgtaaaaatgttccccctggggcccctccggggggcatttagcgaaaattatggggggcctactgagtgccctatttccaatccggagccctgtcctgacagccccttttccgattcttgaaacctggcgggcaagggggtttagtgaattggccacccttcccgttgacgcgttactgaattggggcgcttttccgttt

SEQ ID NO: 94218 - DNA, 372 bp, Zea mays
  unsure (1)..(372): unsure at all n locations
  Clone ID: MRT4577_185918C.1
ggatacaaccgccagcggccgccacagcgaacaggggccttaaaagacgaaccccggaacatcccccggagaaggccacgngccaagcccccgacgagggggcaggccagccaccagccgacgcaaagcccgaaacaaccgaagccgaaaagaaaggggggggcgacaccacaaacccagaaaaagaacccccggccccggagngggacccccaacagaaganagactaccggaaagacaaaggccacggggcaccccaaaggaagaggagggccacaaagagagacgacgaggaacccaaggccaggagcaacgccanagaagcggaagaccaaaaggccccccaggaaggaggcacaaagcacgacggaa

SEQ ID NO: 94219 - DNA, 368 bp, Zea mays
  unsure (1)..(368): unsure at all n locations
  Clone ID: MRT4577_185919C.1
cggccgcccgggccggggcacgagcgacgcggaaacccagacgggccacacaacgncancaagaacgggaaccacacnggcncngnggacgccanccacaagggcgcgggcaagagccggaccgccaaggcgaagagcgaggaggagcngacggcnngccaggagacagggcnaggggagaagaaggacggccngcgcnncaccgaggggaacgcgcacaaggacgacaccagcaaggagccgccggaacggggcgccagggnnncggccgccaacncccggccaccaaanccccagnagaagccccgcaggcnccaagccccggagggccagnagggacagnaagccggagcacggngggggcncaa

SEQ ID NO: 94220 - DNA, 625 bp, Zea mays
  Clone ID: MRT4577_18591C.1
ctgcgctccatactcaacaatatcccatatgcttttgtggagtgaggttaggtgatgcctcattttaccactccacatacaatagtcctcaccatcaaaatatggtggtttgcctaatggaacggaaagtagaggagcgcgtttagaaatgcaaggatagcggagggacatcttactatacttcttgcgctcatggcacttagaagtagtggacgacgagtcggagccggatgtggagggcgacgaagagtcggtctcgtagtagaccactttcttcattttcttcttcttgttgcctctccgatgggacttggtggaggaagaggattcctccttgtgcttgttgccggactcccttgagagagtcctccccgagcttgcgggcatgtccccggttacgttctccctcttggcgtgatctcccaacatcacttcgagttgttagactctaatgaagcaccaggctctgataccaattgaaagttgcctagaggggggtgaatacgcgaaacctaaaatttataaacttaagcacacactacaagcaggggttagcgttagaattaaagtcaagtccgggagagagggggaaaacaaatcaaccaaggaataaagcgagtgaaca

SEQ ID NO: 94221 - DNA, 245 bp, Zea mays
  unsure (1)..(245): unsure at all n locations
  Clone ID: MRT4577_185920C.1
tttgatttgtcagggaggacttgnaatgccgtcatgacataaagaactttccgctcgcacatntncctttaangttagcaaangccaaacaacttcttttgaccatcaaccacaacttctgaacgctcgccttttgccttctctactttgaccccctttgtgagaccaaataccttattgctcttaaaaatctttttgacaatgtcatctttcaaccttacccttccctgtgccattttagaagg

SEQ ID NO: 94222 - DNA, 141 bp, Zea mays
  Clone ID: MRT4577_185921C.1
gcaatgcaacaccatgtgggaacatttcgttcaggggagctgccaggtgccccccaggttacaaaaaaaaaaccacaaatgtttcagaacaagacaatctcggataacataccagccagaccctagaacggatgctgtgca

SEQ ID NO: 94223 - DNA, 246 bp, Zea mays
  Clone ID: MRT4577_185922C.1
acctcgcctcatggtaatataacatcttgaacaaccataatcaaaatggaatgcattttgcagacaactggattattacaatccccattagtcctacagcttaccccgacctaactgcagtctaacaggtcaggatttatattgtccaacctggggatgactagtctttctttttctctctctgtctctatctggagggatctgtctgtgtctggcacagtgtatgtatttgctgggaatcattat

SEQ ID NO: 94224 - DNA, 503 bp, Zea mays
  Clone ID: MRT4577_185923C.1
ccgggtcgtcccacgccgtccgtataaaaaaaaaaaaaaaaaaaaaaaagggggagaaggaagaaaaaaaaaaaaaaaaaaaaaaaaaaatataaaaaaaaaaaaaataaaaaaaaaaatacagggaaacataatatatagatatatagggttacataaaattaaattgcctggccttaattttttttttggggggcctgggtttaatggtggggggggggggttttctcgccttgcggctgttaccccttttggtggctgccgtttttttcgttgggccgcgtcccttttttcttccctgggtttttcaccctggggggcgcccggttcgccctttgtaccggggctttcctttttgggggtggggggtttccccggagggggaccgcttcacctcccggcgccttggcgccccctccttggggtttgttgccttcctttttggcctggtcctccttctttgccggttttgcttttctttgggggctccgtttagggttttg

SEQ ID NO: 94225 - DNA, 664 bp, Zea mays
  Clone ID: MRT4577_185924C.1
gggtacctcgaggccggccggggcacgtagttgtgtagatctggtgctctgacgggatcagaggaactattcaatacctttcagtttgcgaactggaatggaaatgtcatattgcactcgatgccacgtctctgctaaccacgtgcattgacctgagatgctatgattggaccgaatataagttttttttaacggttcacacgtagataggaacctgggactgcttctccatctgcccgcaggggcgcctaatgtgattataatgtcatgcgccagtttttttgaagtttgttggtatgcctagtgtatggtgatgatgagatagctaaggcttgcttcatcaacattcgcaatagtcgaccgagagctctcgccttgccgatgttgagagttagtgctgttaattccttccttgtctgtgtgagccatacatatttctagatcggggttggcttctcctaattccagttggtgcattatgctgcgaagacaacagtaagcgtatctgcggaacattcgctatctgatttgcccgattaacttccagaaccatacggactaatctgatggatgtcgtgtcccacgatgatagaagtccaggcttgtatctctacattcgcagctgccgcctaagagctgtcaccctgccacgcttgagagctaa

SEQ ID NO: 94226 - DNA, 577 bp, Zea mays
  Clone ID: MRT4577_185925C.1
ggttccaaacagacccctttttattacagccctgggtcaaaaaaaagttggacaaaaactgtagcaaccgcagggcatccacagagttttcaagttacaacagaatttaacagactacggggggacccaaaaattggtttaattgaacaaaaccttccattttttgccttcataaaaaaaaaaaagcccaattccccaaggggggaacgggaaacttgactacgggtttttgggggggctggaccctacaagcttttgtagtcaaggacagggacttcctcatcaggagcatcgagggcgttataacttctcaggcggggaggatcatgggggaaattgggggcatatttttaatggggggtgggccccccaattttggcccaggtattccacttttgcctggggggccccttttgggttaaaaagggaggggggggggcccttttttttttttaaaaaaattgcccccacctttttttttgggggagggggcgggggacaaaaaaagggggccccccggggggccccccccccccccccgggttcgcgggtggaataaaaaaaaattggggggggg

SEQ ID NO: 94227 - DNA, 479 bp, Zea mays
  Clone ID: MRT4577_185926C.1
accagtgcaggtgcggccgcctgggtaggcttgttcaggactacttcaagcacagcttgacggacgtgaacctcgtcgaccagatggccaacttcttctgcaagacgctgatgctcatctgcgccttcgtcatgctgttggtcaggaaagaactagagtacttacagaacataaagaactctatcacacgaggactactttctacaacaggaagtggcagcctacctgacaaagaaacccaaccgaggccaccaaagaataagttcagcaaacgcaggtgcaaacccacaatgctcgctatttgtgggagtgatatgcctcactcttctttctctttttgttaaccgaatactcaggctttaaggaacattttgatgaacgtaataatctatctacttgaacctgcacaaaaacaaataggatggaaaaactttctgggctagacataataatcatgttagcagtttcactggttaaaa

SEQ ID NO: 94228 - DNA, 484 bp, Zea mays
  unsure (1)..(484): unsure at all n locations
  Clone ID: MRT4577_185927C.1
cattgggtacctcgaggccggccgggacagttcatcctcctagctatcccatcaccaatccacgagctttccaatggctatcatggctattcacacgcgacctaagatcctcataccggagaaagtatcggctgatgggttggctttgctgcgagaccaatttgaggtacatgagaagaagggtctcagtgctgatgagctcgaggccatcatcggcgactatgaagctcttattgtccgttcggagacgaaagtcacagcagatctaatgaacgcagcanagaagctcaaggtcgtggctcgagcaggagttggagttgacaatgtcgacgtccagagcgccacatcccacggcatcatcgtagtgaactcaccttctggaaacatcaatgctgccgccgagcacaccatcgccttgttgatggcggttgctcgcaacatcggtgacgcgtcacanagcatcanagagggcaaatgggagcgc

SEQ ID NO: 94229 - DNA, 624 bp, Zea mays
  Clone ID: MRT4577_185928C.1
tttgttttttaagcgacataaaacataagtttatgaggaaaaaagtatggacaaattcactccgtaattaaacaagaatgacaattgacaacaaataaaccaaacctttcgactggaaacaagtagcacaaaacaaggagtagattaatcgacttcagctgtgattggtatctgactgctcaatcaacaacaggtccggcaatctgataaactggcggtttagcaaacacccataaagtcatatccaagtgttgctaatgaatgcatctatcaggaaagttgagcatgcgcatcaaaagtaaacctccatctgcagtacaacaacaacatcggctgagccccgaacaagttgggtacgctagagataaaacctaacatgagggccaccaaaagaaagaaaccatacggatctattccagaaagagcaggaaaatgtcagctctgtacaactcagataacagaagagacaattctcagggaaaatagcgttaaaaagaattacactcaaatttttttacttgggaatgttttgaagcccaagacagggagaacatctcatccatttctgtaatcaaagacccaaaaaaactcatccagctcctacaaaagaaaattttagttgct

SEQ ID NO: 94230 - DNA, 579 bp, Zea mays
  Clone ID: MRT4577_185929C.1
agggacctcgtgttgttctcagcgctcacacacacaaccagatctcccccaaatccacccgtgggtacctccgcttctgatgcatatctttgtgagaaccctgactggcaacatatcaccctcaaggtgaacccgtctgacaacattgacaacgttacggccgacatccactactacgaggacatccccccagaccagcagcgtgtcatctttgctgcgaaacagcttgaggacgagcgcacgcttgctgactagacatccacaacgagagtaccctccaccttgtgctccgcctctgactacgcatgcagatctttgagtatcaccctgaccgataagactatcaccctctgggtgtagacctctgacaccattgtagaacgccctggtcacgatccaatacaaggaggatatcgctccagaccaacaccgactcatctttgctgtcaagccatttgacgacgcgcgacacgcttgtcggactacgacatgcagaatgagagcatcctccacttgtatgctgtgctcaggaaactgatgcaaatcttcatgaagaccctgatcggccagacatagtca

SEQ ID NO: 94231 - DNA, 317 bp, Zea mays
  Clone ID: MRT4577_18592C.1
tcgtgacgcgtgggccgcgatctccgtagcctgggtcgtgtcgagcatctatcatgtacgcctactgtggaaagtgcaaggatgagcttataaagaatgctgcctacattggcacccctggcaagggtatccttcgctgatgaagagtccactggcaccattggcaagcgcctttccagcatcaatgtcaagaacgttgaggagaaccggcgcgcccttcgagagctcctattatgctgacctggtgctcttcaggacatcagcggcgtgatcctcttcgaggagaccctgtaccacaagaccaaggatggcaagcc

SEQ ID NO: 94232 - DNA, 497 bp, Zea mays
  Clone ID: MRT4577_185930C.1
ctgctggggactggaccagggacagggagcaacaaagctgagtcctcctcctccatggcggtacggtggcggccgacgtttacaaaggcgagctgacgccgctgcagcggcacgtcgccttcttcgaccggaacaaggacggcgtcatctaccccgccgagacataccaagggttccgcgcgatcggggccggcgtcacgttgtctgccttcagctccgtcttcatcaacggcctccttggacccaagaccataccggtatatatgcatggcattggcatctctcccccctcaacaggcaacaccctcagcgacatcttgaaatgcttctactgtctttccgtagatcgtcatccgcggtgttcgtttaggattatttgatttcgtagaatacgtggaaaaaaaaagttctgtggcactgaaacatcaagaattgtaaaataccacccaaacattattgtgttttatttactgacatacatattttgatttcgggac

SEQ ID NO: 94233 - DNA, 194 bp, Zea mays
  unsure (1)..(194): unsure at all n locations
  Clone ID: MRT4577_185931C.1
gtgcggcgctcggagttcggcacgagcgaagaaaccctggaaaaccagggccattaatactactcccagccgtcgactatctgctagtagancaccgccccgagatctccccttctctctcctcgcgccgttatcctctgtagctctttgatccggcaatggctgcgcccgcgcctgccaccaccggcgacctc

SEQ ID NO: 94234 - DNA, 241 bp, Zea mays
  Clone ID: MRT4577_185932C.1
tctttctccataacccgaggcttccaggcctgggagccatctccaccagcgtggtgtcctcctttcctcccttttcccactcctaccctctcagctccgcctccactgtatcttcctccattcatagcctattcttgctcttctttttctagtccataattttacttccaatcttttttcttttttttttatctttttattttttacttctaatattattttattttattcttatttcttt

SEQ ID NO: 94235 - DNA, 697 bp, Zea mays
  unsure (1)..(697): unsure at all n locations
  Clone ID: MRT4577_185933C.1
aaaaagaggaaaaaaaaaaaaaaaaaatacaaaaaaaaaaaaaaaaaaaaaaaaaaaaaaaagaccctggagggggagagatcgcacgcgccctctgccgtttgttcgttcctcgcgctcgccaccaggaaccaccacacacatcccaatctcgcgagggaaagcagcaggggtctgcggcggcggnnnannngnnnnaaaagtttccgactccccttcccattgccatccaggatgtggttcagcctcaaaaaccagaccatatgcctaagcacatggtgttctactgctccgactcacgtgagtgcccgtcaggtgacactggaactgcatcccgacaaggcattcaccgaccgcaacatcgattcaatggtcacaccctaccacaagatcaagtacaacgaaacagggtccgccatcgaatacgacgtgtgcgcgctcaaagtgaatgtcatcgtggtcattgttcacaactgctgaggaggaatcaagaagctcctctccctcaaggacggaacgacacgaaacttccacttcgaggaggatggagcaagatcggcagccctgccaagaacaacgtgaacaaagattacccgtccgtgtcgatccatgaccaaagctccatcctgaaaaaagaagacaggaacaaagcgatcaaaaacctaaaaagaataccccttccatcaggaaaaggatg

SEQ ID NO: 94236 - DNA, 735 bp, Zea mays
  unsure (1)..(735): unsure at all n locations
  Clone ID: MRT4577_185934C.1
accggtaccaaaaccccccgggngcccggggtcgcagaagagaaagagtgggatggcaatggagaggtcgttgtcgtgcgcggagaggggcagccagcgtcaccaactggacctccgccaaccgccgctccgtcaacctgagggggtacgccccgtccttcgccgcgatggacgacaccgccggcgcggtcccggcgcccaggaggaagctgcgggcgggggcggacgacgccgaggtgcagcggcggcggctggtcgtgtacaagacgtacggcgtggaagggaaggtccgggagtcggtgcgccgcggcgtcagctggatcaagggcaagtgctccggcgcggcctacggctggtggtgatcgatcgccagctccatcgccgtgcccaccggcctatcggagtggtactactacggtacggtctaccatatgagctggtgcactgcatgcccaccgccgcaccagtacctcctgttacttgttcttggagttaggagtttttttaatctttaggagatggatttggttgtatgtagtagcatactagcatgagctgtggagcttcttctcttggtgagtgatctcgtgtcttgtgagggaaggaggaagttcatgctgtgggtgtcctactcctctttacagaacagatatctggactctggtctatgtaaatataggtgctgcgtatgtatatatgtgtgtatagaataagatttctgtaaattattactac

SEQ ID NO: 94237 - DNA, 1110 bp, Zea mays
  Clone ID: MRT4577_185935C.1
gccggccgggccggggctgcttgcttgtccgttgtcgcagagagagaaagagtgggatggcaatggagaggtcgttgtcgtgcgcggagaggggcagccagtacggcgccggggcgggggcgggggcgatgaacctccggagctacagcgcctcctacgagcgaccgacgacagcggcgccgtccacggtgcagcgcgccaggagcgtgagctcgtggagcacgccgccggcgccgccgcccgtgcagcgggccgggagcaccaagagcggccccaccgccgccgccggtggccgggccgccccggggctgaacctgcgctcctacagcgcctcctacgcggcctcctacgggcccaccctggccgataccggcgggcagctgaagcgctccggcagcgtcaccaactggacctccgccaaccgccgctccgtcaacctgagggggtacgccccgtccttcgccgcgatggacgacaccgccggcgcggtcccggcgcccaggaggaagctgcgggcgggggcggacgacgccgaggtgcagcggcggcggctggtcgtgtacaagacgtacggcgtggaagggaaggtccgggagtcggtgcgccgcggcgtcagctggatcaagggcaagtgctccggcgcggcctacggctggtggtgatcgatcgccagctccatcgccgtgcccaccggcctatcggagtggtactactacggtacggtctaccatatgagctggtgcactgcatgcccaccgccgcaccagtacctcctgttacttgttcttggagttaggagtttttttaatctttaggagatggatttggttgtatgtagtagcatactagcatgagctgtggagcttcttctcttggtgagtgatctcgtgtcttgtgagggaaggaggaagttcatgctgtgggtgtcctactcctctttacagaacagatatctggactctggtctatgtaaatataggtgctgcgtatgtatatatgtgtgtatagaataagatttctgtaaattattactactactacaggcaagactgctgttgatggcctctttgaaaaggccggcttcggattaaaaaaaaaaaataacacggg

SEQ ID NO: 94238 - DNA, 242 bp, Zea mays
  Clone ID: MRT4577_185936C.1
gcggaattcgcccttactcacggggttcggtatcagcggcatcatcatcactaaggtgacggccaacttcaccgatgatgatctcaagaaatcgaagttcgtccacgagcacaagaggcgctgacgaaccatgtgtgtccgaattgactgtctggacagtcagttatgtgatgctgtctgagtagaaacttagcttccgggtcttcatctaaatgcgtggagactatgctccatctgtaatg

SEQ ID NO: 94239 - DNA, 669 bp, Zea mays
  Clone ID: MRT4577_185937C.1
cccactcctgtcccccgtccactccgccgccgccgccgccgccgcgaattccgcccgcgtccaccgccgcgcgtcgccccggcggactccaggacctccggatcggagccccgcgcctcgccatggcggtcgccgcgctcaaggtgcagctgaacgcgctcctctccaacatgttcgccacgggtatggtggacgagcagttccagcagctgcagtcgctggaggaggggggcaccgcgtcgggcttcgtcgccgaggtcgccaccctcttcatcgaagacgccgaccggatcatcgccgacatcgccgccctgctggaccagccggtggtggattttgacaaggtggacgcccacgtgcaccagctcaaggggagcagctcgagtgttggtgctcagaaagtgaagctcgcctgcatgcacttccgccagttctatgaggcaaaaagcaaagaagggtgcctcatggcgctggcttttgttaggagcgagttctgtgatgtgcgcaacaagttccagaccatgatgcagctggagcagcagatcgaggcgtgcagtccgaagtagagtagcagtaactgaagcaaaaggagcttagctccctccgtgtgacccctgacatgatggggggcagtgtgtatgtatctctgaagcttgtaggcagtgtaac

SEQ ID NO: 94240 - DNA, 374 bp, Zea mays
  Clone ID: MRT4577_185938C.1
ggaacggaactcaaatgaacttggcggttttaaatacgaacaatttaaaattggttttctgtggaggccatactacttcgaaatatacaatcttgagcatctatatccaaatcttatgcccatttaccgtcccagctgttatttgtaataactcttatctttcttattggccgccacaagccttgctctccttgctgaggcctatacagcggcgattttggcaccgttgtccgtctctttgctcgatctcttcttcttcattgaacccatattcttcaaacgctcctttacattcacagcagtgtttttattttcattaagtcctgcactgtcagacttctcttacccctcagatgcttattgtgtttcttttt

SEQ ID NO: 94241 - DNA, 411 bp, Zea mays
  Clone ID: MRT4577_185939C.1
atggacttcgcctcgcccgaccccagggctcagactcaaccacgacttagaagacgacgaactccgcctcgcccgaccccagggctcagactcagcctcggctccggaagacgacgaactccgcctcgcccgaccccagggctcggactcagcctcggctctggaagacgacgaactccgcctcgcccgaccccagggctcggactcagcctcggctccggaagacgacgaactccgcctcgcccgaccccagggctcggactcagcctcggctccggaagacgatggactccgcctcgcccgaccccagggctcggactcaacctcgacctcgaaggaatcgccacctcgcccagactcgggtccggaccggccacgtcgccaggggggccatcattaccctgcccctag

SEQ ID NO: 94242 - DNA, 290 bp, Zea mays
  Clone ID: MRT4577_18593C.1
gctcctcgaggattattacagggccacaatctatcgtatgctccgagaaactgtcacctgccacatggagagcttgaatcttgtggcgtgttcatgcttccatgctgacacagaaaatggacattagtctggatttcctgatcataatcaattggctctggaatacgcttatcctcatgtaacaggcctttatctataacttaatgccgtaggaatttgtcttgcgactgcaacactcttctggccgtaaatgtataaatgcacatccgcttctcttatcaatgaacaaa

SEQ ID NO: 94243 - DNA, 240 bp, Zea mays
  Clone ID: MRT4577_185940C.1
aggcaaaaatacatactgatcccaaccttgaacataaagcctttcatttgaggcgcgaccacgtttttttccaaataaaaaaaccggctcgctacgcaacaacaaccatttgatttttacattgccaatggaaaacaatcttattgaatggggggggacccaaataaaactggcagcgaccaacaacagggttaataaaatgcaatttacacaggtaaactacaaaacttttggtttaaa

SEQ ID NO: 94244 - DNA, 299 bp, Zea mays
  Clone ID: MRT4577_185941C.1
gacataccaaaggacgtcactgaagagccacgggctctgaccctccttgggccatctctgacgacggcgccgctgatgccttggatgcgtatgaacttcttgcgcgtagccactggaggaggggtcaggcagcagaaccaagtatactgggcgaagaagacgagaaggggccgtgacgacgtggacgaagagcgaatagacacgcacagttttaacaaaaaggcgagcgagaaaacccagctgttccccaaggtaatcctgcttaaaaagaaaacggtttgagaggatggccaagtatc

SEQ ID NO: 94245 - DNA, 411 bp, Zea mays
  Clone ID: MRT4577_185942C.1
atggacttcaccttgcccgaccctagggctcggactcaaccacgacccggaagacgacgaactctgcctcgcccgaccccagggctcggactcggcttcggctctggaagacgacgaactccgcctcgcccgaccccagggctcggactcagcttcggctccagaagacgacgaactccgcctcgcccgaccccagggctcggactcggcttcggctctggaagacgacgaactccgcctcccccgaccccagggctcggactcagcttcggctccggaagacgacgaactccgcctcgcccgaccctagggctcggactcagcctcgacctcggaggaatcgccacctcgcccaaactcgggtccggaccggccacgtcgccaggggggccaccattaccctacccctag

SEQ ID NO: 94246 - DNA, 1265 bp, Zea mays
  Clone ID: MRT4577_185943C.1
gctgactagtcactagccgaccgcgcgggaagcggtccggttcacgacttcacgccgctggctcccctcgccatggccggggaccgcggccgcggggccgcggagagggtggatgctgccgtgggggcggtgggatccggtggctgggagttccggaacgcgtacaggcgccagctgctggctctgtcgcggcggatccggctcctcggccccttcgccgaggagctgcgggaggcacgccgggggtccgcggagcaggaggagcaggagcgggcgctggcgcctctcgccgacgcgctggaggaggcactcgacctgctccagctcggccgcgacggcagcaggatgctcctggtccttgatagggatgaagtaatgaagaagttccatgaatcaattgctcagctggagcaagccctgtgcgattttccatatgataaactggatatatctgatgaagctagagagcaggttgagttagtgcatgcacagctcaaaagagccaaagagcgggtcgacatgcccgatgacgagttctacaacgaattatgttcgctgtataacaagagccacgacccaagtgctgagttggatatccttgggagattgtcggagaagttacacctgacgaccatcgctgatctcacgcaagaatcacttgctttgcacgagatggtggcatctggtggtggcaacgatcctggagaacacattgagaaaatgtcgatgctgctgaagaagatcaaggactttgtgcagactcagaaccctgaaacgggcccgctggtgactgccaagccaatgggttccaacgggaagccaagacctgtaaacgttcctgacgagttccggtgcccaatctctcttgagctgatgaaagacccggttatcgttgctactggccagacatacgagcgggcattgatcgagaaatggctagcttccgggcaccatacctgtccaagcactcaacaaaggatgccaaacacgacgctgacaccgaactatgttctcagaagccttatcacgcagtggtgcgaggccaacgggatcgatccaccgaagcgcccgacgcagcagcctgacagacctacatcttcatgctcttcgagcgagcgcgccagcatcgacgctctcctctccaagctatgctccgcagatcccgaggaacagagatcggctgccgcagagctccggctcctagcgaagcggaacgcgaacaaccggatcggacgcgtgggaggccggtgccatccccttgctac

SEQ ID NO: 94247 - DNA, 533 bp, Zea mays
  Clone ID: MRT4577_185944C.1
aattaataagttttaaaaaaaacacgacacacctcttgcaggatcatggtcaatcagacgggacatcactacataaacctacaccctaattcctatcctaacaccaacccattaaaaaagcttcaggaagctagtcaacatattgcatggggcctgccactcttgatggtatttcccaaggctacactggggacataaccataccattccacctgccttgaagtagcccttgaagggccttattcttaacgaaatctcatccaagtgggcccatcatgcagaaccccagaaatacctaactgccctcagcactgctgacataaataaagctgcaggacataaaatattgtctaccttaattccaaattgagcggccacgtgggatactgcctcattaacgtgacaccaacaccccttattatagatgccacgtgtatggttgagcacatttcaaaatataagcctttgctatttgtcgccatagactacttgaaaaccacctacccctaccaccaatgggcttgaggcactaa

SEQ ID NO: 94248 - DNA, 461 bp, Zea mays
  unsure (1)..(461): unsure at all n locations
  Clone ID: MRT4577_185945C.1
cgggtctacccacgccttcggcaatacgtacctatggattgtctgctgaagctgatccctgaccagtgcacgaaagcaatgggcctttgtagggtggtgatctctggctgagaggacggcttgaagattacttgaggaccaaattaatgtctgttagaaactggtggagatcgacattgccagatgtggtataagataggcgatatgtgtgattattttttgtccgaggttatcactcccctttaccccctgaaaagatgaaaagatgtcgatgtaacaaatcctctgcgcttctgtaagtagatgagtgttgctgcatgcccctgagtacatgtatcggtttgcgctgagctgctgaattcagtttgcctgatttgtactatcgccatgcaaggatgtaccctttgtatgacgatgttcagtccaacatttgtttatggattcaggctattctttnnnaa

SEQ ID NO: 94249 - DNA, 337 bp, Zea mays
  Clone ID: MRT4577_185946C.1
ggggttccccccccattaattacacccccagtctaaaccaatcacgtaaacaatttacaccaccggcggttaaatttaacaccccgctccagcaagaggagaaccgggacgaccaccacaaaaaaaaaaaacgggcgatcactcggccagcgccgtcgcgctggcgctgttccggttaacggggccggggttggttccaagccggggccgttcctgtttgaagccgccgccgttatccacgcccgccctttctttttctacctcctcctcctcgccagagccggttccaagctccaaaaaggcccggttggccctggttgtggcaagaaaggtgggc

SEQ ID NO: 94250 - DNA, 437 bp, Zea mays
  Clone ID: MRT4577_185947C.1
gccgcccgggacaggtacaagacttttttttttttctttgtttttttttttagccctttttctcttttttactgcaacaacagtttttgccattccatctgcaagctgtggcaaacattggagcttaacttgagacaacaacatttcgttgccaattgaccggcggggctgtggggaaacataaaacccttttttgccccagcaacaattgaaaaatttaaaccagggcacccccgcgggggggggggcctaataagggggacaggcaattgctgaacatttagggcaacaaggcggagacatatcctaccaccttaaaaggaaacacccaccatcggaggtgccatgttataaatgtttcatgatttatactggaataataaagttctcatgctgatatgtgcgagctctaagtgataaagaattagagatctata

SEQ ID NO: 94251 - DNA, 393 bp, Zea mays
  Clone ID: MRT4577_185948C.1
cgctcattaataagttttatgagctgagatccaggggagtgagggtgaaaaggagcccctccctctggacggagggtactaccggggtcgcgatcaaggctacagcggagggtactacagggggggggggattggaacccccggggacccctccgggggccccgtggggatgtcgcaggtgagacatcaagggcaccgggtgcgggcgggcgctgccagcggaatcgaccccgaaggtgtgctgacgggccaacccaaactacggcatgagcgttcaatgaaggaagggggtgttggaagccagcgaaccccccggacgagtgccaacactggatctaggacatgcgggggaggtcgagcataaatgaccacgaaggtatccggctttccgct

SEQ ID NO: 94252 - DNA, 578 bp, Zea mays
  unsure (1)..(578): unsure at all n locations
  Clone ID: MRT4577_185949C.1
ggtgcagaattgtttttttaaatatttttcaaacattaattgaaaagctagaacaatgaaaatatatagcctaggtatgtaccaagagccaagaggcaacaatgtcgtatgacacacaacggaaatgacaaagaaaaaccagccttgtgtatacagccaagactctgaaagcatcagcagccttacaattcctccaacaaacacccatgacccatgtacaacaatcatcctggagctaatcccttgcctaacccgtgtgtacgaatgtttcctgaattaacattatctttgcttcttgccgccagccaagatccgagagatttgaaggcctcggctaaatgcctgattaaaaagcaatctcgtctggaactccgagacaaatgggaaccatgccagcacagccaccgggacgaagatgacaatccccatcaggtactcataccccctagagagggccttcacggatccccagagcccaaacgccttgatgaccggtttacttgcttgagatatctgcagaatggcccatcctgtgggtgcaaatgcaaggnaagcttgcgaatatgtcaccaactgta

SEQ ID NO: 94253 - DNA, 290 bp, Zea mays
  Clone ID: MRT4577_18594C.1
ggcagtgtgacattgacatccgcaatgattcatatgctaataatgtcgtctctgggggcactaccatgtaccctgggattgctgacaggatgcagaaggagatcacagccttggctcccagcaccatgaagatcaagatcatcgctcctccggagcggaagtactcagtctggattggaggctccatctctggcttctctctccaccttccagcaaatgtggatcagcaagccagagtatgatgaagcggggccctccattgtccacaggatatgcttctaaagtcacag

SEQ ID NO: 94254 - DNA, 300 bp, Zea mays
  Clone ID: MRT4577_185950C.1
gtctgacaacacagagcaattcttgataactagacacacaagggctttgacatcatcccagagcatacatgaggcgcgttagaccgcaagcgaagcaggctcccgcattgctctgagaccttcggcctcctacggatccactctgcacatgcacatagctgaggctaatctcttgtatgaaacaccatatgtatcatggtgcttgcagaattaactatctacaatgctaactgtgtctctcttaacagccttattaactgcttgcagtgcgcgatatgcgcgatgatgaccgaaaccttg

SEQ ID NO: 94255 - DNA, 362 bp, Zea mays
  Clone ID: MRT4577_185951C.1
atcacttattgtgtatccaggtggttctgccgaaatctttaccactgatcctaaatcgaccgatacgacattggttgtacggaaaggattcattaagttagccatacaacaaggggcagatgttgtacctgtttttgtatttggagagaaatggttctatcatcgtcgcttacttccccctgttattcacaattttttcatgaatgcactacggacaccactcatcttgttctggggtatttggggtacatggcttccccgtcgtttgcccttgtcaatggtatttggtaaacctatttcatgccccaagaatgccgatccaactcatgaagagattgatgctgtgtgggatgaatatcgtg

SEQ ID NO: 94256 - DNA, 670 bp, Zea mays
  unsure (1)..(670): unsure at all n locations
  Clone ID: MRT4577_185952C.1
gggnaaaacagctactgcgacgaggagacgcaacccacaaacaggccgcgcccaccttcaccgtcccgacacggccggccaacctaccaacgcgacacggccactgcactacgcccaaacaacgcgacacggccaacctcgatcgagacgtcgacgggacgaaacctctccgtgaccgtgagagaaccttcgccggagctcggaaggagcgtgctggtgcagcttgtgggccgcgggatgcagtcgctgcgaggagcgcagcgggagtgcgcggggccccggggccgcagggtggcgggcgacaccgaggagctggaggagggggaggcctgctccgacgccgacggcgaggccttcgtcgaccccgacgtcgcgttctcctatattgatgaaaaacttcagcatgttctaggacattttcagaaggaattcgaaggagaagtttctgcagagaacctcgggtcgaaatttggtggatatggttcatttttacccacatatcagcgttctcccctgctgccccaatctgaaagcccacacattgcattgaacattagcatgtcaggatcaccttaccaaccatctgctgagagaatggatcaaaacccctctactgtagctgtggagcccatttcccgaataacggttttgggacaccttcagctagtga

SEQ ID NO: 94257 - DNA, 316 bp, Zea mays
  Clone ID: MRT4577_185953C.1
gggtactcatctcgtttaactggcaaaagaaaacgggaaaaaaagaagaggggcaaaatagaacacgactcatttacagacagacacggggtcgacgacggttagtttaaaaagcgcgcgttctcaaagtcaaaagcttaaaaagcgcgcgttctcaaacccatgcaggtcggtgacccggttaataaacttgcgcatgatggccaccttggccagttgttccgccgggcgccacgccgacttgggggtaagggcctcccctgccccggttgacccgcccggggtccccacgggcaccggggggtccccgtttccc

SEQ ID NO: 94258 - DNA, 423 bp, Zea mays
  Clone ID: MRT4577_185954C.1
ggtggttgtggtttttttgtttacgggcaaaacttattgcccttctcaaattaattactagcggattattcaagaagccaattgcgtccttttttttagggggggaaaatatggccaatttacaagacaaattttttttgataaaggaaacaaaacttgagactatgactcctattaataacgaaagatcgtccaccacggaaacagaattcgcaatggtttttgaccttttttaaaaactgcaccttttcaaactttggggttgggtagcttttttccaccttccacgcgtgatgagacatcttgttgaaagacgattttacccccttctgggcggagacctcccttggaaaagggaccccaacaatcaaaaccccttccgcagaatgggggtggagatcgaaacctaccctgtgaaccctt

SEQ ID NO: 94259 - DNA, 736 bp, Zea mays
  Clone ID: MRT4577_185955C.1
agtttattagttatgctccgcatccgcacctctctccatctccctgctcctccgcctccttcttgatccaggcaagtcagcgatcgccatgtcggactcggaggagcaccacttctaatccaaggccgactctgcggggtgcaacacctacccgcacgacgctggcaccgtccgaaagaacggcttcatctccatcaagaaacgtccctgcaaggatgtggaggtttctacctcccagactggcaagcatgatcacgccagatgccactttggcgccgtagacatattcaatgggaaacaagcttgaagatattgttccttcatcacacaaatgtgttattccgcatgtgaagcggactgagcatctgctgattgatatttcgtgaggatggatttgtgagccttcttacttcacatggcaacactaaggatgatcttagactcccaactgatgagactcttgtggcccaaattaatgaacgattcgaaagcgggaaggatcttggtgtgactggccagtctgcgaaggggtaggagcacatctgcgcggtgaaggatgctggacccaagtaacttccttgtctttgcatacgcaaccctactgtatctcatcttagatcggaatagaagtgtatcaccatatgattgctaccgagacattcacctgccttgagctggcttttgctatagcgtgcaaggggttgctgcgcgacggacctacctgacttatcattat

SEQ ID NO: 94260 - DNA, 345 bp, Zea mays
  unsure (1)..(345): unsure at all n locations
  Clone ID: MRT4577_185956C.1
ggcgcngcgcgcgggggggggccgcggggncnggcgccncgncggcgncccgcgggcgcggccgncgcaacgggcgcgcgcgccgccgcccggcggccgcggcgccacgcgccggccgcggcacggcggccagcccncgaacgcnggggacgaaancgggggggggggggagaagaacnggcacgggngggcgacggcgcgcgagaagccggngcgggnggagcncgggccgccgnggcgcgggcccggccggnngaacgcgccgcngaacgacgagcnggcgcgcgccngcgccggcaagaccacgngcnggaaggngaacaccgccgacaggcccaacgcggc

SEQ ID NO: 94261 - DNA, 339 bp, Zea mays
  Clone ID: MRT4577_185957C.1
atccgaaatgagtcgtatataagaaaagaataaaaataaaaagaacaaaaaaaaataaaaataatcaaaacaaaaagggaggacgagcgacaagtgtcgtctcgtttgtgcccgggtgtgcaagtagtcttggtgttcagtatcgtctgcggcttcgggttcagggtcagtgtcttttgcctatgccgcttgtaagacccctgggatttgagcgatatcacggtttggaactgcttgctctttagcatcaggaacgtgcgtgcgcatcaggtcgtacgtggtcgccttgtcattgctgacggactctcatctcaccttcgagaccatcatgatggcgga

SEQ ID NO: 94262 - DNA, 173 bp, Zea mays
  Clone ID: MRT4577_185958C.1
ggagagactgtttagttgaactttcctcgtgtctaccacgatgaatcttccttgaataatcttataaccaacacgggcacaaacacacttaactgttcaggaatggttgtgttaacgagttagtacttttcactcgctgactgtatgatgcagggatgaagttcatgaacgtg

SEQ ID NO: 94263 - DNA, 211 bp, Zea mays
  Clone ID: MRT4577_185959C.1
acccaccgccccactccaccttttccttccccgccggccgacgcgcagcgcgagcggagtcgccctctccagtagagtagtagtgacgtctctacctatccacctgagccccctcttttcattccccacccgcgccgcgcgagcggagcttcgcagcacgctgcggctcgcttcgccagaattcctggcgagggtacagaattgcgcatcg

SEQ ID NO: 94264 - DNA, 299 bp, Zea mays
  Clone ID: MRT4577_185960C.1
tgggggaacaaactggactaggggccgctctttttttttttttttgggggtcggtggtgattcttctaagatttagacttaaatgagtgcgtgggggcacttatcctgtgactgatctttaatttggggggtggggggaggtgtttcggtttttatccctggcctgtctaacttgcttgggactaagagactgtgggggggttctgcgcgcatgtctttggtggtgcgggcgcctggggcgtggggggggggggctgcgttggcgcggtggggtgggggggtcgtgtccgtgtgttggg

SEQ ID NO: 94265 - DNA, 257 bp, Zea mays
  Clone ID: MRT4577_185961C.1
cccacagccttccgccttaataatccatgacctgcccaaaccatttggccccagggaatggaataatcccgaccagaggccattttttttgtttaagacgggaggattaaggctgccagccaaataataatggctccaacccttgacctaaggcagcaggccctcgaccgttttttgccgaataaaaggtctgacttcaaaggcattttccggcctttggatggactcccggtgacaatccaactcctgaaccttcc

SEQ ID NO: 94266 - DNA, 242 bp, Zea mays
  unsure (1)..(242): unsure at all n locations
  Clone ID: MRT4577_185962C.1
catgcacatggatcaaaatatgacggtttaggataaggatctaggcagtaaatcaacaaaactaatggaagcattctccnatttttttttccaggggttttaaaaccgagggagatctatgccgaattatgaaccatacgcgtgcttgcgaatgagtttataatcaccaaaaaaactttactatggatcggaacgaggttacaaccaccatgagaactgcgcgggtaccctcttgtggtgac

SEQ ID NO: 94267 - DNA, 695 bp, Zea mays
  Clone ID: MRT4577_185963C.1
cagtatctaggaactccgaatttaagtttccaaaactagtcttcttttactcggcctagagcatagaacaaagtcgagtgtgaaacgaatgcgatgctctctgccatgtgtggggttcgtctactctacgccatggttcatagcctcagtgaaccaccgaatggcgtccactcagccacgcaggaacagaacaaactacctttggcttccttatctttctccacacaccaaaaaaagaaaaaaaaactaaactaaacaaagcgtatgcctctcggagttttcggtgacagtatatatgtcctgatggccgtattcttcacccgtccatgttcgccgcctcaacagcatgtgcactgttccaaacttccaaacaaaccagccggcgacgcttttgggaccatcaaccatgcacggttctatacagccatggacatctcgctcgcctgtagtctgtagagcgccctgtactgcccggcatgtaacgtaccctagctccgtctcggctgcgccctcctgttcttgttgctgctagcgtctggtagactcgacggagtagtcagcctccggagggaggcgtgcagcagcatcactgcagcacagggccatagcgcagcaccgtgttgctccaagaaccgtaccattcaaggaatatagataatggagacgaaggccggacggaggtcacttacgtgcgt

SEQ ID NO: 94268 - DNA, 197 bp, Zea mays
  Clone ID: MRT4577_185964C.1
taagaggatgaagagactatagaagaacagcgaaaaggggatgaagagcaaggagattaagttgtgaaacgccaggaattgaatagtaactaggtagtagaacaacgtctagagaataccagcacggaagcagggtatcctcaatagtggacatgcatgtatgcagtgttggattgttgacagtcatagctgctaca

SEQ ID NO: 94269 - DNA, 215 bp, Zea mays
  Clone ID: MRT4577_185965C.1
tttcgaggcccaactcctaccggttgggggggggtaataaaaagagctatggggtcctccacccctacgacgcttagcgcgggacctactgctaaactacggcttgcatcaccatgctcagagagttctccgagaacgcctaattactcagactgtgccacaagaagaagaaacgccctagtcctcaaacaaccagcctatatttccaataccag

SEQ ID NO: 94270 - DNA, 416 bp, Zea mays
  Clone ID: MRT4577_185966C.1
tctaatcacttttatatgctcaatgctcccaatcattttattctctacaagcttggcttatctgggggggccaatccatcgtgggggcgcgtcacaattccacggattgccttcctctgatcctcatcatcaagaacaggctcaagtatgctcttaactaccgtgaggtcatttctattctgatgcaacgccatgttcttttttatggcaaaggcaggactgacaaaacctaccctgctgggttcatggatgtcattttcatccccaagacaatggagaactacaggctgctttatgacaccaatgaccgcttccgtcttcacccaatcattgattaggatgccaagttcaagctctgcaaagttaagtctgttcattttggccagaatggcattcccctaccttaacacctacta

SEQ ID NO: 94271 - DNA, 967 bp, Zea mays
  unsure (1)..(967): unsure at all n locations
  Clone ID: MRT4577_185967C.1
gtaccctcgagtctcgccggngtgccccagcctgctcccgcccccgctccctcccacgcctcccataccatgccttgggtacctccgacacggccggggcgattgatgtaacagctaacgcaccacccacgtcaacccccttccgtcgcctccacctctgtcggaccctctcctccgcgcctcggtcgctaccggcagcgtcgagggcaaccctggccccgtccacgtccgcttcgcgttgttgcccactgcaaccacgaaggtgcgtaagaagccgtcgagggagagcgcggtcgcgatgacatcggtggcggatggacctcccgcatctccgataacagatctggcactaggtggtgaggaaggatggtatgctttgtaccgtctctctccccgatccccgtcgtcgatccatcgtccccctccctcctctccgcgcccagccgtgcagaagatggtggcgcccaaccatcgctcgccactggtcagcaaactgctctgcgctggatgcggcaatccccctgctcggcgccttgcccctgtctcgatgctcgcccctgtctcgatgctcgcccctatctcgttgaggccggactcgcttttctctccctcctcccattcagtcggcttggcaaaccactgctcgcctgtcgctccatgcctccctttggtcgattcgcccaacatgtctagcaacgtctgctccaacgccttcggcgaccacgggagctcatcgaggaggatgaggaggacaagggagatcttgctcgatccgaggatgcggggaggcatgttgatgacctcctgctcgctcaatcagtgcttggttcagaacccctctaccgccccaaacctgaaccctaggtttgctactctcgccaggaagccccaatccctagcactcatatcacaaacccagatctagctttncataatcttgctaattgagctagtacttgcatccatc

SEQ ID NO: 94272 - DNA, 277 bp, Zea mays
  unsure (1)..(277): unsure at all n locations
  Clone ID: MRT4577_185968C.1
tcaaatcgttaccgggcggcatcctccatctcgtactgacccccgcagcgagaaaccctattccatagtggcganncnacctttcnacctccnttcctctgcgctccagctgagttgctgatttgggataatcatgttctctctgaatgaatgaacatgtctgggaatgatgataaaccacattcttcttcaaacaaaataaaagcacccaccttatcaatgactaaaggattgaacacagctcaaactcaataggcttcgactctcttttccccca

SEQ ID NO: 94273 - DNA, 336 bp, Zea mays
  Clone ID: MRT4577_185969C.1
tttggtccaacttgtgggagtggtaatccttgtgtttctgctggtataaaccctgtcatcagtcctcaggtttgtcctgtccagaaccttacacgttgtgttcctgcacgtggtgaccaacccacccagttgctcatctcaccgtggccggggtgtctcgaggagttacgtgcccagagtcacaccaccgcggtctggtgccgtggacagcttcaccaccaactcatcgtaccgcgtcttctccgagcgttttcacacaggcacagttagccaggtgaggcccttgagtttcctttatctggaattggaactctactgcgtgtatgcctcggggtc

SEQ ID NO: 94274 - DNA, 410 bp, Zea mays
  unsure (1)..(410): unsure at all n locations
  Clone ID: MRT4577_18596C.1
tggcttggaacctttgggctgatttatgtgcttgtttatgtgcttgtagtcctctggtccacggcgttagagttagattgatgcgttcagcagtgcatcactccagtcctaagagattgatttaggtaagacttaccgactgacggagtcgtccttctcgtctatgcggtcttcttccgtgtatgtttcggttcgttcggttcggatggttgttgtgtggtgttggtagctctggcgtcattcttcggatcatgctcgttataagtttagtgatgattgtaagtcgcttatggagatggttggtaatgcgacttagtgtaatgtgtggtcggggtctattgatcattgtccttcctcntgtgctactgcttgtcttggtactggtgaggagattcatgttttgtgtaata

SEQ ID NO: 94275 - DNA, 811 bp, Zea mays
  Clone ID: MRT4577_185970C.1
agaactctctccccccgccctccttatctccaggccggacgagcccgcagccgcagcgtccgacctagggttctgcgccgccgccgcccccctgctcccgaggagatgcctcgttacgatgatcgttatggaaacgcacgcttgtatgttggtagattgtcctcccgtactcgttcgcgcgacctagaatatcttttcagcaaatatggaagaatacgggaagtggaattgaagcgcgactatgcattcattgaatacagtgatcctcgtgatgctgatgaggcccgatacaacctagatggcagggatgtggatgggagccgcattattgttgagtttgctaaaggggttccacgtggttctggtggttcacgagaacgtgaatatgtgggaagagggcctcctccaggaacaggccgttgtttcaactgtggtattgatggtcattgggccagggactgcaaggctggtgactggaagaacaaatgctaccgctgtggagaaaggggccatatagaaagaaattgccagaatagcccgaggagtctcaggcgtgagagaagctattcacggtccccatctccacgtcgtggacgggctcgcagtcggagctacagcagaagccgtagttacagccgatctaggtccagatcctattcagagtctcccagagggcgtcgcactgagcgtgatgagaggagatcaaggagcattagctacagcaggagccccaggcgatcgctctccccagaagctaaggacatggatcgcagccctacacctgatcgcagtcggagccccaggcgatcca

SEQ ID NO: 94276 - DNA, 868 bp, Zea mays
  Clone ID: MRT4577_185971C.1
cctaggctaatggatccatggaacatacctatcaggctctactcagttagtctggaaagtcagtccaggttgctcggtaacagtctagttggcattgtttaccttcatttattaactgctgtaattaaatttgcaatttcaggccttgagattgcatattgacgactcagattccagcaatgaagtaacacagccattgccagagctggcgtcatcaccccacggaagtcagtcgatgcatgttcattatggattgatggcttgtgcgattgctctgactggggtagctgtgatggtttacatgagacactctaaagcttgaacttctggagaacaaagaaatttgcaaagcttatatgcacaactcatgcgcatagaaggatcacacacttcggctcatgagaagggtaatagtgaagtaatcatgggctgatgacgatatacactcgattacattgttggtccaagagaaatacgctgactgactgtcatattctccagttaactgaagtcagttcttctggtgggaggcaagcctatgctatggtatttcccgtccatttttgacaagtacccgtagtttcatgatgcagtgaaatatgcaacctttagggctagtttgggaactctatttttccaatggattcctattttctcaaggaaaaataaactaatttcaaatcccgtggaaaaatagggttcgcaaactagcccttagggtatgtacaacctttgtggtgcggtttttcatgtaaaaggcagttaagatatatgtaggtacaatgtggttaagtcacatgtgggttcattgtggtgtatctaaactttgtatcttatttaataaaatttctcaagacatgatttattt

SEQ ID NO: 94277 - DNA, 273 bp, Zea mays
  unsure (1)..(273): unsure at all n locations
  Clone ID: MRT4577_185972C.1
atcggctcgaccctcgtccgcctcctcctcggccgcggctacaacgtccacgccggcgtcctcatcgacgcccagaagcaactgatagtgccggcagtggtatcgacgctgaacgtgctgcgcgccgccaaggaggccgcgtagcgtgcggcgggtggtggtcaactcgtccagctcggccatcatgcccagcncacagtggntcgcnggcgagctccgcgacgagcgctgctggactgacatcgactactgcaagaagaacggggtttggta

SEQ ID NO: 94278 - DNA, 107 bp, Zea mays
  Clone ID: MRT4577_185973C.1
ttcccacatctcatccatccgctcagctcagctcgatcgaacttctcacacgcgtacatgaattctcaagaacgcactggttggtggtggtagtatctactagctac

SEQ ID NO: 94279 - DNA, 360 bp, Zea mays
  Clone ID: MRT4577_185974C.1
cggtctcttggacccagtacatcacaaacacctgggggctttggttggatacagcaggtcttgaggcacgaggctgctggtctatgagtctggccccagtaccacatcggaattgcacttacacgcgaaagagcgaccagcaattgagtggcctgctagatgaaagatcaccttgggtgcaccccagggtgcagctgacctatatgaagactgccagccaaagatcattcatccagacataaaggcatctaacattctgtctgactaccaatacgaagctaaggctgcctgattttggacttgcaaagctcactactgataacatcacctatgtttcgacaagagtaatgggcatctttg

SEQ ID NO: 94280 - DNA, 842 bp, Zea mays
  unsure (1)..(842): unsure at all n locations
  Clone ID: MRT4577_185975C.1
ttgggtccctcgaggccggccggggtctcaatttccagagatgaaatcttgttgagtcacttgtgttgctgcattcttattctaggcatctacgctccgacatccgccacatcagacagtcctccactgcaggatgtatgccccatggctccccagggcgagcggcgagagttgtccatgaacgggttcctctgcaagcatcccagcaccatcctggcgtccgacttcaagaccctgctgctaaaccacgccggagacctggacagcatagctcggtcgtcggtgagcatggtgaccgctgccgagttcccaggcctgaacaccctgggcctgtcgatggcgcgcactgacatcgctccctatggggtggtgctcccgcactcccacccgcgggcgtcggagatgatgttcgtacacggtggcagcgtggtggccggcttcctggacaccgagggcaggctgttccagaagcgtctcggtgagggagaggtgttcgtcttcccccgcggcttgcttcactacgtcatgaactacggtttcggcctcgcgacggcgttctccgtgctgaacagccagaaccccggcgtggtcggtgtcgcccacgctatgttttttgcgagtgagtcggacgtagtcgaaggtctaatggccaggatgctcaagtttggagagatggaggtgactagtgacaacaacatcactgctggtttcccatgggcattctgatctgagtaggtgcaattcaaacactgtgatgtatctgattgaccgaagctaaagttgtagtctngactactntgcagacgaatcacaatcacccttggnatcattacgctgntgcg

SEQ ID NO: 94281 - DNA, 3932 bp, Zea mays
  Clone ID: MRT4577_185976C.1
ctgtgcggcgctcgaggcggccgggcgggtctaaattccaagagatgaacaccttgttgagtcacttgtgttgctgcattcttattctatgcatctacgctccgacatccgccacatcagacaatcctcctctgcaggatgtatgccccatggctccccagggcgagcggcgagagttgtccatgaacgggttcctctgcaagcatcccagcaccatcctggcgtccgacttcaagaccctgctgctaaaccacgccggagacctggacagcatagctcggtcgtcggtgagcatggtgaccgctgccgagttcccaggcctgaacaccctgggcctgtcgatggcgcgcaccgacatcgccccctacggggtggtgctcccgcactcccacccgcgggcgtcggagatgatgttcgtacacggtggcagcgtggtggtcggcttcctggacaccgagggcaggctgttccagaagcgtctcggtgagggagaggtgttcgtcttcccccgcggcttgcttcactacgtcatgaactacggtttcggcctcgcgacggcgttctccgtgctgaacagccagaaccccggcgtggtcgttgtcgcccacgctatgttttttgcgagtgattcggacgtagtcgaaggtctaatggccaggatgctcaagtttggagagatggaggtgactggtgacaacaacatcactgctgtcctacttcacatcacatcgcaatcttatggcaatggtgactcccaggtcacgtcacgcaactgcagcttcagcatcggcaagtttgatgagtattccttggacgacacagtgttttgtcttttgctttacccagtggatctctacaccttctgttgtttagcattatctccaggctccacctccatctccttgacggtgagagatctccttcttttccgcgccttctctttcacactgaaagctcctgcacctgatcaaggtagactcccagcaccaggacaaataaatactatcatactcacgctgtttttgagagatgctcttgtaacgggtgttgttaatggcgatccacaatctaactggatagcttgctgggggacagacagaaagcgccggatgaggaggaaaaaaaagaaagggcggagccctgctcccaccgcgtattcctcctgtgcttcgtcggcccgtatcgtcgcgcccgtggttcttgggccgcccccctcgcaattcccctgcattggtcggtcttcagaggaatcggcttcgctcggtccagagcgacgtgtagacgcgtcggcgtgcggtggaggtttgtcttcaggtaagcggctagggtttccgcccgacttcgttggttcgcattctttcccccatttcgcgtcgcgtctctctcggctctggtctctcccgtgttcgtcgcgttctagtttctgcggtggttggttttcttctccgtttcgtccgccagcgatcgtcgaggagtggcccctcccgggtctctctgctgctccgctccggatggatccgaagaaccgtaaccctaactgggaccgttgggggccgaaagaagcgcctcagggatcccaatcctggggaaaaaaccggagccttagctggcgcttgaagccggggtctggaaagcctgagaacaaagatgatatccctatctcgtcttccggcgatggcggccagacaggtattcttaaaacccctcctcctcccattctgaagttagagaatgaaatggtgcgtagagttttctgtcaaaaatgcggtatggatggccatcatgctagggagtgcttcaaatctttgtggcatgagatctgtcgcaaggaaacacataataccgctcggtgcgttctccccaaacaaaacaagcctagcatgcctattgttgggatggcggcggatggattagggttttactcctctcatttctccaaaccgctgtcgaataaaccgaagcgcagttttattggtttggttaaaattgttgagggcttgatcttggctgaggatcttgagaaggatttcggttttcatttcccctggggccgtacttggaaagccatcaagtgtcactctggtttcctgatgcaattttcttctcaagagaggcttgatgagatgattaatttccctgaactgaagatgaaattgtctggtgcaaaaatctttgtatcttcgtggagctctcaggctaagccaaaacccaaactccactctgtttggattgtggctgaaaatgtgtctgagattgtggctgaaaatgtgcctgaagaacttcagaattaccaggctatctgtgaattgggctctacaattggggctgtggaggaagtggatattttatctttaaactctaaagaaattgtaagatttaaagttcatgttaagagtgtggccatgattccccctatcattgaagttggtgtcaaaccttttctgtatgacaccttctttaaatttgataatattactgatgaagggtggaatgatgaatctataaatctgggcaagagggcttctgttgatagacaaggctttggtgacctctcttttgagaaatctggtaaaaaagccaaaagtggtgatgaagaatctggcagggatgttaagggaaaatctcccttaaaggtttcttcagttcatgtcaatgtagctgggtccctgtctgaacattctgataatctggaggaattcatcaaggatgacgaacttgttccttctcctcctcaagagaaaaagaaaatgaatacaaatgcgtctgtctctgaagatgttggtaagaatgttggagttaagaaaggaggatccatggaaggagagctggtagaaggagttaggaggagcagcagattggagtctacggaggaaatgaagattgcagataaggcagcagcaagagcgatggctaaagatgcattcatcaacaaaggggttgaattaggttcttcttttaatgatgctgtgaaaaatttaaacctgattaaatccttagagctttccagaaaaaaattggttgttcaatctgttaagtttaatgttgacaattccaaggtagacattcttgattctaatgtggataataatagtcataatgaaagtgtggataatgctttgtctgatcttgatgatgttatggttctcagaaaaggccgtaaaattcgtcataggaaaaaactgaattttgcttgggtctggtctccccccaatggtaggtctggaggcttgctgatagggtttgatgctgacatttttgatgttagagagaaagaattgggagaatttatgattcgtattctggatttttatgttggaaatcttaatattgaaagactgaattatgggatggttactttgttaccaaaggttgataatgcagttgacatgaagaatttcagacctatctgtcttttgaatgtgtgttataaaattatatccaaagttttgaataacaggctggcgagttgtatcacaaaggtgataagtgactcacaatacggtttcattaaaaacagatacattatggatggggtcatctcccttaacgaaattcttcatgaggttaagaggaaaaatcaaagcggtgtggtccttaaaattgattttgaaaaagcctatgacaaatttcctgttctatttgacttggcttatgacaaagacattacggttaatgatgtcttagtttctaattttgaggttcttacatttagaagaaggattgttggtaatctgagggttctattggatgagttggtgagttgttgcaatcaggtgatcttgtctgatcaggaggacataattgtgtggagtttggggagaaaaggctttctgttaattctatttacaaaaagaaaatggcagatcaagttttcaatgggcattctgatctgagtaggtgcaattcaaacactgtgatgtatctgattgacc

SEQ ID NO: 94282 - DNA, 702 bp, Zea mays
  unsure (1)..(702): unsure at all n locations
  Clone ID: MRT4577_185977C.1
ggccgcttttttttttttttttttgcaatcactcacgtaaacttgatatatcaaaacaacatccatacagcatcacatgatatagagacagcagacgattcaaaatcccctggtatggccttgtgtcatagaaaatcaaaggatataacgccactttctgcaatagaagcccttccatgattcacatgtgcctgtatatttagattatcggaggctggagtcctctgggattcagacacatgctccagctgttgtaggtcactgtaggtttcaagaatgcctagcatctgttggccagttacccctgagattgtgtaagctcttccactgtctgcagagtgaaagcttcttctggactgtgtagcgcagaagataactggttctctgcaatgatcacattggacagtgttttcttgaaggtgtttatagcatcctctggatccccttttgctatagatgccaagtgtgtctcatcaagtttgaaaagccagaatctccatttcttagacacttctccattggtgcgaatagaaatgttagtccagccttcgtggtggaattccagtcggcgcaacccaaatccgacgccagcacctatggccttgacaaatgcttctttgagacaccaatacctgtagaactctgtcagcacgtccctggggagtgccagcacgaacgatgcagctncactcatggtcagta

SEQ ID NO: 94283 - DNA, 396 bp, Zea mays
  Clone ID: MRT4577_185978C.1
ctagattggacaatagtgaagtcgtctgattcagacccttcctcattacataagaaatcagagttgctgccatgatcatcttgcatatagggtgcaacctctttacccttgtctttttctagctctattttttttgagctagacattcatttgctatttccatttccttgactaaatcaatactctctaaattgtcatctcttattttgataccagccttaaatgctaagtcagcaatatcattaagagaagaaaaatcaactttttgtcgggttgcataaaatttaccttccaaattccttttagcagctattcttctgttcttctcctcgattctgattcctgcgtccttcttaagtctttcactaacccttctatcttcttttttagtacaca

SEQ ID NO: 94284 - DNA, 508 bp, Zea mays
  unsure (1)..(508): unsure at all n locations
  Clone ID: MRT4577_185979C.1
aaaatacaggcagctcaaactactacttgctgncatctatgcacacaggctggaacatacatcaagggattcgtgcatggtgatcttggacgcacgcatcccagcatcggagccataatagggtgcagagctgagatattgcaactcgatgtcactgatgttaagatggactttctcccgtagccggaccttcagctgtttatagcatggatagcatgcagtcccaacgcctgcagatgatgaggtggtgcgggataacgagctcagaagaacgctaatcttttctgtcttctccccgagcaacctcatggcagattctgcacggtgcacgcctacatttttgctaagcgagccaagcttaactgatttggtggaaggtgtaatcatatatccagtccccgaagtcttctccaactcaaaacttggggcgtctattttctggggcgtttggatcctttcattttagagaaattggaattcactcaataaagtaacttatttagtttgg

SEQ ID NO: 94285 - DNA, 443 bp, Zea mays
  Clone ID: MRT4577_18597C.1
ctatagcactgggaaagaaccggaaacgtgggaatgcccttgggaaattgttgttcactcggactttaaaccgcgccctaaaagcgccataacacaaaaaaggtacaaaggagcacaattggttcacaagtccttgaaaataccgggaaccaattaccgagggtgaacccggagggatacacgcacaaaaaacgcgcaaagaagggaaaacgcaggaaaaatcctgcactttacatgcacacgggacccaaagagcccaatgggccctaacggccctttcttggcttaatgggtgccaatctggaacacggcagaatcacgagagcctggataacgctacaccgaggcgatttcgcagagagcttgggaacccttgaggggcccaagggcatttaaaacccagataggcactcgctccgcttccgccccttgaccgccctttg

SEQ ID NO: 94286 - DNA, 394 bp, Zea mays
  Clone ID: MRT4577_185980C.1
tttttttttttaatatacgaatataaataggggggttatttatattgggagccagaaaacccttgacttgaaattctaattaaaacaggcgacaaacggaatcatatttcaaattttggggggacaaaaaataccgacctaaaaaaaaaaataaaggtaacactttccacctttaacttataaggtttattgcaaaatcacattataaaccttgtaaaatgtgcccttacattcctacctagcttgatattatattgacataacaatttgtaagtttcttctcctttacgatcaaaaaaaaccatatttgagggtactaaaccccccgcattctttggaccatatgacagggaaccgggcttcttttcccctttttttttaacaccgtttattt

SEQ ID NO: 94287 - DNA, 392 bp, Zea mays
  Clone ID: MRT4577_185981C.1
gcaaccagtacctgatagtcgagcgcgccgcctaccaggtgtaccaccttccatccgcgggggttcaatctcatgggatagtgcgctacatttttgtgaagccgatgcactgctaaggtcctaaaggtggcaatttcctcaaaaggaaaacctatcaatgcactcgaagtgtgtaccttacagcacaaaccaatgtaggtacaacacatgggaatggcgtgctttcattacatgataagacgcacgagacattcattgcttaatatccactctacaacgggatttaatcaatccactgttgaaggaatgaggtctgagctaaccatgctagtattctgtaaaaacatttctctttcttatacacgatccctcatagcacggaatgatggtct

SEQ ID NO: 94288 - DNA, 1424 bp, Zea mays
  Clone ID: MRT4577_185982C.1
ctgaggaccggagccattctagaggcttatctcttatatcaaagagtgcagacaccatctaagctaagcatctcacgaagttttggtagaaatgaggacgatcttgatctcttgatgtatagcgacagcgagttggaggaccagccctgcattcttgacgaaactgaaaaagctactagcccgattagagacagattctgggaggagtatgcttccaaggaattcaccatggtcctgagtaaaactatgaagaatggtctaaaagtcatgctggaagccaaggttaagataagtatggagtatcctctcacgagtccccttttcagattacgtttgctctcagaaaagtctgaaattttgaagtggcacaatgatcttcgtgcaatggaagctgaggtaaatcttcacatccttcgaagcatacctctatcatatgaggattatatattgactcaccaagttatgtgcctggctatgctgtttgacatgcattttgatgaggaaaacgagaaaagaaaagtcacttcagtgatcgatgttggtctttgcaaacctgttagtggaactatgcttactagatcggttaggggtagagacagaaggcaaactatttattggagaggtgctgattgctcttccagttacttgtagagtatgtgcgatcttgattggtcttggttgagttcagcattgactaccctctggagaaatcatttctgggcattggagaactgcatatataacttaagagctgacacagatccccttgtttatcactactgtgtcttgacagcaatagctgggaagatttctctgtgcccatactgactcgagaaactatttacaatgctgatggtaactacacttttatatgcccaggaagaaaagctataggtgcagttaatcaccacaaggcttttactgcatgaatattgtgctatatgtttcaagaagcctttctgctagttcctattttcttggttgttcaaattggtatcctggatctacccagaacatttccaaccgcagttaaatcctggaagcttgcagcattcttttgcaataaacagagcttgcttacccggatgaagatgttggaggacccagcttttaaccaaccttagttatctcaatcgcctatggttggccgacagctatgaggtaaatggcttacggtatcaatcatttgttaattctacatttgagtaacgctgtgggtgcagtagcttttgctcttccaaaaacactggacagaaagatgagatttatgtcccacatgatgcaagtaatcgtttgaatgtaataaaaaaaaaaaaaacctcgtgccgaattcggcacgagctcgtgcaaccaaacttcattgtgctaacaaaaaaaaaaaaaaagagggcgcgcgctatagaagacacgatcatgtgcgcgcg

SEQ ID NO: 94289 - DNA, 612 bp, Zea mays
  unsure (1)..(612): unsure at all n locations
  Clone ID: MRT4577_185983C.1
ccgggtctttaataattttatttttagtttctatggcacaacattgaataatttgcttctgtatatctaggcaaatcgatgtgcaattacctgaagcattattcaaaacaacatgcttatccacatcttgactgtttgatgcaagctattttcaaaagttcaagaaagttttctctattgctatagcgttcacttttatcattatcacggaatgacaaaccttgatgcaaaagaaacttcaaacatctaactgaataagtccatctaatcttgtaaagttttaattcttcactattcatctttcgcatttgtttatcaattcttgcagtaggattcatgtataagttatatctcttttggactgcattgtgtatgcttcttacatcacccttgcgtttttgaagtgtatcatctctgttctaatttctccatccaccgctagtaaatgtccccttccccttgtctttcttgtttctgaaaaagtagcatacaaagcaaaatgcagtttcattgttgatactatatagaagggtgggcttggtgtagcggtagagcctaccatatgtaaccgnaaggtcccaggttcgagccccagcctctgcatatttatgc

SEQ ID NO: 94290 - DNA, 292 bp, Zea mays
  Clone ID: MRT4577_185984C.1
acattactgtttatttgttcacccaactatctgaagcgggcctggggttacattcattacgcgccggcaaaacatgcatacggaggaaagatagggccgtgactcacataccaactaggcactcaactctttatactcagagtgacggcacatatatcactcactccatatacataagctaaattaaacggcgggcacaccagccgaacaagaacaacaatccaccaacaccagtatttatatagtgatgactagctataatacagcatgcgctgcggttatataaccacaa

SEQ ID NO: 94291 - DNA, 497 bp, Zea mays
  Clone ID: MRT4577_185985C.1
cttccctttttttttttttttttttttttttttttttttttttttttttttttttttttttttttttttttttttttttttttttttttttttttttttttttttttttttttttttggggaggggaaaataaaaggacgggaaaaaagggttttgttggttttgacccgggaacacgaaaaaaacccggtaaggaaaccaaaaggggggggcaaaaccactttttcaaaagaaaaccatactcaagttttaaaacccaaaaagctccaggggttttaaaatctgaagggaaaaccgcccatttgcccaggaaaaaaaaaacacctccgtttaaaaaaaaaaaaaagggggaggggatctttaaaaaaaaaaaattattcaaccgggggagttttttaaaaaacaccccccgggcccaaataaaaggaccgattttaaaagggcatatactactcgaccaaaactccaaaaccttgttctttaccaaaaaagttttt

SEQ ID NO: 94292 - DNA, 755 bp, Zea mays
  unsure (1)..(755): unsure at all n locations
  Clone ID: MRT4577_185986C.1
aattcggcacgaggttcttgctgaacttttccttgaaggccagccactttttgagctttcgcaacttctggcttaccggcgtggtcaatatgaccccatacataccctagaaaagatacaagatactggtatccgtgacatgatacttcacatgatccagttggaccccaaaaaaagggtaccatgtcgaagctatctgcagaaatatgaatctgttgtgttcccattttatttttcaaaatttctgcacaagttcttctcggatatcgttccacttgattccgatgctagggttgagaagactcaagaaaattttggaaagatacaggaaataatgatgggtagttcaacaattgaacaaattgagaggtctacatcgtgtgagcatagtgaaccatctgggagaaaaggcatggaaggggaaattttaaactcgccaggaaattatagaaatagcacatctgtatttaagaaaaatactcctgtagaccatcaacatattattggagatatcaatttcctcctcaaagaagtggagggcaggagtaacaacacaagcgcaaaggtcacaaaagacacttatcattttgttgcaccgagcattacctgtgcaaatggtgttcagtcctctcagctagttaatccagcaggaagacaaattggaactggtttgatgggccacaaacatgntgtatctcatgtgaagatctcaagagtaacatacgctccttggtggctacttatgatgatcaatc

SEQ ID NO: 94293 - DNA, 365 bp, Zea mays
  Clone ID: MRT4577_185987C.1
agcagagaacatacattctttattaccaatacatgtatctaaaatagttaggagaatcctgcctttcacagagctagaacattgggcttgaagtaacatccaactgttcagcgaagcgtgcggttgaatcagctcagtgggaggtggatcggtcattgcgggtctcttttctttaaaaaaaacaaaccatgttcaatccgggtccagggaaatgtgagcacatcaggacgtttcagcgcatcagtggcttgaaaaaagagtctgtgcttcctcaggtgccatggtcatcctggggcttggatcaccatccacgagagctctggtgcacagcacggcggccaagggtctcggggcactgccttgtg

SEQ ID NO: 94294 - DNA, 301 bp, Zea mays
  Clone ID: MRT4577_185988C.1
gaattatacatattttttaaaattttcaacatagtgcgcacattaaggggataacccgggcaaccaaacgaaacgacgaaaaaacaacaagaaataagcaccagcgatataaaaacaaacaggccaggagccaggactagcaagcaacccacaacaaagatacagagatagaggcatcggaaagcaagagcaagacttgaagacagacactatgcaacaccaccatacaccaacaaaagaacaaagaactgcatgattatcgaaacacccccacctgatgatgatagaacagcgcagcgcc

SEQ ID NO: 94295 - DNA, 337 bp, Zea mays
  Clone ID: MRT4577_185989C.1
ggagccttcctccttttattatttagatatatacatacatcatggagagggggtccttttacagggcattcacacactacttttggtaccagggatgttcgaccagactgattgactgatgcaaaaaagccaaacaaaccaaaacggccacactaccaaacatgtcctgaccaaccagtctaaaaaccgacaggccacggataaaaaatttcagtttcacaccacaccaaagggcagggaaaatacttgaattgagcaaaaaacaccaaaatggggaagggcgggcgggccactgacttttggtataaaaaacaaatgtgcttagcaaaagcaccaa

SEQ ID NO: 94296 - DNA, 855 bp, Zea mays
  Clone ID: MRT4577_18598C.1
atacgtgcgttccctacgcccgcgcgctcggcccctcctctctccccaaaaacctcgccctcctcgctcttctcccttccccatcactgctctcagcgccgccacccccgccacagcgccgcttccccacccccatccgctccacgccgctcactcgcgcctcctttcgcgcttccgccatgccgtcctccccgagaccgcctccccgctcggctccgagccaagccccgtccacctcgcgttcggatccctcggctccaacctcggcgcgccctggttctgcgcgcggggccgccccgtgagcctcctcccgatcgagacccaaccagtccccccgacgaagcaggaagccgaattctaccggcccagccacgcgacgcgggtcctcgccgcggtcgacgcgctcagcgacgcgacaaaggaggagctggccggtctgatcgcctcttccgcgaggctagcacggatggtgagcaggctctacggggtctggatgtcccctcacgcgccgccactgtggatggtctctgaacggcacccacgtacggtttcccaattgttggaggaggagattatcaatagagaggagacggtggtgcggaccggattccttgtaatggaggcatgtgaagtgatcatggggttgcacagcgaggggctggtgctggggtgcctcgggctggactgcttctgcctcgatcgttttgggcactgcctgcttgatttgaatcaggcgttggccttgtgcaggggagtccaagcaggggctagctcaaacagtgttcgagctttcatcgctccagaggtggcggcagtgctaggtgacacgttgcggacggagggtcgtgattttga

SEQ ID NO: 94297 - DNA, 258 bp, Zea mays
  Clone ID: MRT4577_185990C.1
ttctgcgggtctgacgtctacacctccaatttggcctgtctgccttgcaagtttaagcttcacattcagacatggctcaggagaaccgccacactaacattgagcgcattgatcacgtcgactctggcaagacgaccaccaccggccacctgatctacaagcttgaacgcattgacaatgcgtgtaatagagaggactgacatggaggctgcttatatgaacaagcggtccttcatgtatgctagggagctcgacaag

SEQ ID NO: 94298 - DNA, 303 bp, Zea mays
  unsure (1)..(303): unsure at all n locations
  Clone ID: MRT4577_185991C.1
tcttttctatccgcagngcataaacaggatcggcgcgcatatcaacatgaagaggcggcacccttctcatcttatgcctgnctctgtcaactgccagcgcctctgcaatgcagatgccctgcccctgcgcggggctgcagggcttgtacggcgctggcgcccgcctgactacgatgatgggcgccggcgggctgtacccctacgcggagtacctgaggcaaccgcaatgcaacccgctgtcggcagcgccctactactcctattgtgggcagacgagcgccaggtaccagccgtttctgcaac

SEQ ID NO: 94299 - DNA, 158 bp, Zea mays
  Clone ID: MRT4577_185992C.1
tgtgtttttttttgaacggggcggggcataaaaccatacaccagctcggtgagaacatggactccccacattcggtggtgcgttgagacataaaagggaactggggaagcacgttggacattatcttctctagatttacgatgttaaagaaaccaaag

SEQ ID NO: 94300 - DNA, 527 bp, Zea mays
  unsure (1)..(527): unsure at all n locations
  Clone ID: MRT4577_185993C.1
tagtcngcaccaggatggctggggctcactgacctctgcgggtctccctcaactgcgagctagcgttangaccttaattaggggagcttaagtgcttaatttgatggaggagtgattgagtgagtatatatatatgcagcggcgggcgggaaaaaaaaacttttgcttggatgaggaggggtgtgtgactgtgtgtatgtgcatcgggatcgacgggttgcttgcttgctccaacgccaactacaggggggacggggcnngggggtgttnngtanctanctanccanatagtgatagagcgagcggctagtgggaagganaaagagcgagcgcgccacaatggacaggatggaggacgccgtctccggcactgcagcccanggcgacctcgccgnaggggtgtgggccgcgcaggtgcaatgggcgccgcggcgagtcaccaccaccaccgggggccaccctctcccggacancagatcacgggcacatcgtgtctggtgcaaggggcaccgccagatcacagatca

SEQ ID NO: 94301 - DNA, 561 bp, Zea mays
  Clone ID: MRT4577_185994C.1
ttgggtacctcgaggccggccggggtcatgtcctgtgatcatcctagactcaaccgcacaaggcgcaggatcttcctctgctgtcctagacgtcgacaacccccatctctatatcaatctcgaccgtgtggttgagatcaaccaaaaaatcattgccgaagctgagccccacctgataccccctatggtgtaacactgaagaggaattcctcttgacacctcactgctgtgcgagatcatcgacgcatacctcgtgccctccatcaagcctggctcggttgtcctcgacgaatttgagccccgggtcgtgtactgattctgtacgactattctatccttgacatattcaccctgaaagacacctgctgaaggtttttgccgaacgggtcttgaatgaatggcgaaaaacgctggatggttacacgatctgcatcctcttgaggtcttctgtaaatacttatacttggggagcataaaaagcttggccaatttctgttgtgcggcatctccatggaagtaacagtggactgcatgcagaagccagcgttccagttttgcgac

SEQ ID NO: 94302 - DNA, 261 bp, Zea mays
  Clone ID: MRT4577_185995C.1
gtgacaacgctttctgcagtgctgtggtcacagggtcccttcaaacagccctgtccagcatcttgacaggctgaggggctcggtgtacagatttctttctgtggatgccaagaaactgagcagagagccttcttaaaacccaccctaagggctaccaggtccatgtgcacatggtagggacccagcatatgctagcctgaccccttcgcccttatctatgtaggtacatgtggtagaggttggcttctcctgtctcaaaca

SEQ ID NO: 94303 - DNA, 616 bp, Zea mays
  Clone ID: MRT4577_185996C.1
cattgggtacctcgaggccggccgggacagcattatatcattaaatacgcttcttctatctctaattaccgctcagctgctgcgagaatgtaacggcggaggcatggaggggaaggaggaggacgaacgcctgggcgacaacaagcgctcggagctgccaggacatctgcacggcatcacaagagcacggacatacaaggactacaagaagaccccggcggtgacgctcatctagcccgtcatagtacaaggacagccccttctagctcgacatctatcctcgagaacgtctccacctatcctcttcactctacatctaccatcctcaccggcatgagcgtcatccgacatgcaactccaagtgcgccatcgagcgccatccagcgcatcctctagggcacttcggcggtatagacttctacctccgctagtggaccgtgggaatatccttgggtcacatcaaccaaatcgagagattctggatgatcctgttaaggaagtagtaccactataactagtggttatagataatcatggatggcctggacgactcttgcgcactgtcagacagtaatatatgacagcaggatttgcacgtgtgcaacttctaatatat

SEQ ID NO: 94304 - DNA, 2229 bp, Zea mays
  Clone ID: MRT4577_185997C.1
atgggtcagcaaccaagtgaagaatcaaggaacaagcgcaaggtggggcctatgttgccacctagcaaaagaccaacaacgcgtggccgttgtcaatctgcaaaggccatccaggaggctgatgaggatgaagaggaaattaacaggattgacatgaatgatgatttatcagtaagcatgccttcatgtgattcacttgaaggggcgggcaaggatggagatgaagtatcaaaaagtcagaaggatgccatagctcctgcaactaagagaggaaggagagcttcttgctggaagtattttaaggagatcgaggttgcttcatcaaaggagagaggggttatggtgacaaaggccaagtgtaggttttgccatactacttatgcttatactccaggaggcccaacttcacagctgaaccgccacataggaaagtgcacacctttgctaaacaaattggcaaagcttaaagctcaaggtacactcaactttgctcccgacaaggttggttctcttgttgtcaaccccaatgaatacaatcatgaccacactcatctattaattgcaaagatgatcattgcccatgagtatccatttagaatggtagagcatacttggttcaatgtcttgatgaattggttgaatccccattatcagtacattggtaggaagggtataagaaaagaatgcatgaaggtatatgaatctgaaaaagaaatcttgaagaaggcacttaaagatgttgactcaataagtttaacttgcgatttgtggacttcaaatcaaaacattggttacatgtgtctggtcgcacattacatagatcctaattgggtgatgcaatgtcgtgtactaaattttgttgatttggatcctccacataccgggcttgtcatagctcaagctatctttgactgtttggttgagtggaaaatagaagacaagatcatgacaataacccttgacaatgctaataacaatgatactgctgttaattcattggtggccaagtttgttgctaggaagaattcacggttcaatccaacatactttcatgtccgttgctcttcccatatagtgaatttggttgttcaagatggattgcatgaagtggactctttaatagacaagcttagaaatactgtgaaatacttcaaaaaatctccatctcgtttgcacaagttcatggcagtttgtaatgaatatgatatcacaattggaaaagggttatgccttgattgcaaaacaagatggaattctacctacaaaatgttggattcatgcattgcatataggcatgcattcagttactatgctgataaggacactaagtatgcatggcaaccttcaccatctgagtggatcatgtatgaaaaattgcagccaatattgaaggcatttgcagaaattaccactgcattttcaggatccacctaccccactgctaatatgttctatccctatatcgtgaatgttaagctttcactagtagcagcacaaaaatcacaagacagacaattgaagtgtatggctgatgcaatgatgctaaagttcagcaagtattgggaaaagaagaacaaccttatggtcattgctaccgtccttgaccctagattcaagatgaggtatattaaatggtgttttgggcagatgtatgactccttaagggctgctcgagagatggaagagatcactgaagagttggaagggttgtacaaagtgtttgaaagtgactatcgccaaaagaagatgagcaatgttgattcatcatcatcttcaaaagtcacaacaagcagctcggtagcctcttttgtacctagtggatttcaagattatttagaagaaagttccacagaatgttccaaatcagaattactcatctacctagatgaagctaatgtgagatgcaatgacaaggagttcaatttagttaatttctggaaggtaaattcacataggtttccggtagtgtctaagatggcaaagaacttcttggcagtccctgctagtagtgtatcttcagaatgtaccttcagtactggaggaagaattctagatgattatcgtagttctctgaatccagaaatggttcaggcacttgtgtgttcttcaagctggatacgaggtgctgcaaatgaaatgaatcctcctattcatatggaagaagagaatgatgatagtgttgagtttgggttcatcgaatttccaaaatgtattgtagcaagcaactaa

SEQ ID NO: 94305 - DNA, 374 bp, Zea mays
  Clone ID: MRT4577_185998C.1
taaccctttgcctctgacttttgcgcctgtggcggcttcagcgaagaaacgtggcagaccaccaaaagcaccaaccaccgaggagtcagctgagacgcttgaaaaaccttcccagcctgaagctgaagagacagaagaccgcatggctaaacgaaggcgcacagattctgacgttgtcatggaaggctctatagatgctctcatagaagacctcttgtcggataagatggaagaagaagaagaagcagtggaggaagccccggaagaagagcaaccaaaagctcgagaagaacggccggcaagcgccagaaagcgaagagtatcatttgcagcggacaccaaattaccaaagtcgctcattccagtcaagttta

SEQ ID NO: 94306 - DNA, 395 bp, Zea mays
  unsure (1)..(395): unsure at all n locations
  Clone ID: MRT4577_185999C.1
gccgcgccacnccnacgngnagccaacagcccgcncagcgccaccaagggccacggccgaggaccagaccccgaccgacgnggcggccgaggaagcgcccgnggaggagaggggggggccggccgncangcccgaggagacngcccccgccgaggccaagaccaaggccgacgcngaggcagcagcacccgcagaacccaaggagcnacccgcgaccaaacagcaggcagacgccaagcccgaggccgcngcacccgcnggcgccgaggagcccgcgacacaaaacaccanaaccacaaaaagagaaagcaaaaaaaaacaaaaaaaacaaaaaaaacaaaacaccccaaaccaacgaaacaacacgaccggcaaggaagaaacgcaaaaaaaca

SEQ ID NO: 94307 - DNA, 147 bp, Zea mays
  Clone ID: MRT4577_18599C.1
tggcgctttgttcggaaatccggtgcccgctctttgttcgatgaacttctaccaccaccggaggggtatgtgggcagcagctggccaggtggacatgggggcagcggctggccagatggacatggtagcagctggctctggcgctgt

SEQ ID NO: 94308 - DNA, 270 bp, Zea mays
  Clone ID: MRT4577_1859C.1
ggggtggtgtttttttttttttttttttttttttttttttttttttttttttttttttttttttttttttttttttttttttttttttttttttttttttttgaaaaacaggggtaatatttaaaaatacagttggaaacggccaaaaccggggggaattccttgcttggccggtttggaaacatttttttttatcctgccctgggctggaaagtcaacgtaaaaatggggggggctttattaatttgttaaggaaataagcggccccgg

SEQ ID NO: 94309 - DNA, 701 bp, Zea mays
  Clone ID: MRT4577_185C.1
tacactgagaacccaataccaggcgtcttggtactcccctatctcctgcacccatagcgttaccccttatgccattcttctgtcatttctcaccaccgccagtcactaccccctttcgacaacaccatgagggagtgcatatcgatccacattggccaggccggcctccaggtcggaaacgcgtgctggaagctgtactgcgctagagcatggcattcacgctgatggtcagatgcccgatgacaacaccattgggcggaggtgatcgatgcgcttcaacaccattcttcagtgagactggcgctggaaagcacgttccccgcgctgtatttggtgaccttgagcccactgtcatccatgaggagaggactggcacctatcgccagctcttcacatcctgaacagctcatcagtgccaaggatgatgcaaccaacaacttccttcgaggacactacaccattggcaaggagattgttgacctgacgccttgaccgcatcatgaagcttgcagataatagcactggtctccagggctttctcgtcttcaacagctgtggaggaggaacggactatgagcttgattctctcctcctggagcgcctgtctgactgactatggcaagaagtccaatctcagctggaccgcgtacccatccttccaggtgtccacatgcgaggttgaaccatacaacagagtgctg

SEQ ID NO: 94310 - DNA, 143 bp, Zea mays
  Clone ID: MRT4577_186000C.1
ttctcttttattccatataatttcccaatccggggggcctctgtgcccgcatggtggggaaatgggcgtcacaggttatacagtatcctgtacagtgtaactgctaccgcactatatacacattctagggggacgttggaccc

SEQ ID NO: 94311 - DNA, 706 bp, Zea mays
  Clone ID: MRT4577_186001C.1
cgcaaaatgcaaggcgccacctcatcagcattgtaaaatctaagatacatccacaaaatatattatcttgcctctttgtcacacctacaaagtctgtgcatttcctatctggtgcataactaataatctatgtagcccgccattttttcgtgtgaaagaaattaatctcacaagaaacacaaggatttgatgtcacctaccaccaaagacaatccaagactttcatttcccagccgggaagcactgcttatcatgataacacaaaagtggcaaaagttgcagcatagcatttccttacatcaactgcaaacagaaaggcaaatccaacgacgcatacaactttgccatcattcatgtcctgttcaaatacatcaaccagtgatcgagatgattatatcaaagcaataggtgttggtttaccatggttcgcaaacttcacagcaaaacatgtcaccaaatcctccacttgcatcaggagtatcgatggcagcaagattgttgggctcaaaatcacttgtgaatccctatatgctcttaatgaatttctgctccaccgtcaggaactgttagttggtggagagggagagctcgacgtgacaatggcaaccaccatgtgacgttgctattgttgggcccgtgtggccgcgctctggcccaaatcttttgttttggagactttatttcatgcatgagacagtgccccggg

SEQ ID NO: 94312 - DNA, 645 bp, Zea mays
  unsure (1)..(645): unsure at all n locations
  Clone ID: MRT4577_186002C.1
cctcgagggccggccgggatgctcctcgtctccttctacctctccacatcccacgtcgcataatgaccgctaagcactgctcatgctgctccggactccgnccgacagtcagccagctgccccagtcttcctcccgtcagcctagctcgcccacatcagcgacaagaacatcctcgctgcctacttcctcttctacgccgagtctcccggcatgctaaatcactcatctggcgagaggacagaatactctggcctgaaagcgcgtatgacatcgatggacaggcacatattcctccgggtgacgcgctcactcatggtgctcaggaagaaggaacgcaggttcagacaacttacctccgtcgaccaaaacaggttcaccttccctgctgatgacaacgagttttaggcctagaaggtcatcaaacgcgctttctgtgacatcgctcactacaagaccctccgttaccacgctcctcttacgtcctgtcagaactacaacatttttctatgccggtcttcgatacgctactggagagggaagtctgacgatgacaagtaattgcgagtgcatgggaccatatccagacagccagctcatagagtttcataggggctacgtgatctgccccgtacagccacggaact

SEQ ID NO: 94313 - DNA, 153 bp, Zea mays
  Clone ID: MRT4577_186003C.1
ggccgggaaaaactgtttcctccacgaccttccagagacaccgactccacgacacacacaccagacaactctcgtcgctacgccgacagccacaggagggaggggataatctgagaccatggccagcagggagacaaccaccttcatcgagat

SEQ ID NO: 94314 - DNA, 213 bp, Zea mays
  Clone ID: MRT4577_186004C.1
gcgctgcctcggcgggcccggcgggcccggctgcggcgccaacgccgccgggaaggggtacgtgctgtgctcgtcggcgcacctgctgcagccggggcgcgggccgttccggtccgacgacgcgctgaagccgggaaccgagtacttgctgctaccgcagtcggtgatccaggtggagtggtgcgtcgtggacctggtgtgcctgatgaaccg

SEQ ID NO: 94315 - DNA, 207 bp, Zea mays
  Clone ID: MRT4577_186006C.1
gggaaaaacccttttcatgccctggattttattaaaagaaggttggttttttgtggccctggggcccattaaaccaaattaatgaagcccccctcaacaatttgaaagacccatgaactagcaagggtttttgcagaagcccttgggcgggggcaccacctggttgaactcgccaccgggaaagcttttctttatgcacacattggc

SEQ ID NO: 94316 - DNA, 199 bp, Zea mays
  Clone ID: MRT4577_186007C.1
gtttcttggagacaacaacatttgttgcctattttacccacaagttgtggaaacattaatgccttcttgcaacagcaataattgctaccattctacccacagaagtggcataacattgttgccgtcttacaacaacaacaattgctaccatttatccaatatgcttttattattcctaccaccttattgcaaccgccca

SEQ ID NO: 94317 - DNA, 320 bp, Zea mays
  Clone ID: MRT4577_186008C.1
ttcttcctctcctttcagaacagagaggcatatactatcatctgagccgtctatggggatcgtcgagcacttccagggcgtgaatgcagcattgtgcgtacttcttccccttccgtcgactactgacgaaaaggtctacagacgcgccgagcccctccccaagaggcccaacgtcaactgcaaagagatcatcaccgcccacccgatctactgaccccatctcttagtgctgctggagtctaggaagttcgcgcttgtggtcgccttctgcggagccgcccacctcacatgatgtgccgctcaatgactcaaaagcgacg

SEQ ID NO: 94318 - DNA, 715 bp, Zea mays
  Clone ID: MRT4577_186009C.1
ttccgggccagtggtccctctaccgcgcggtcatcgccgagttcatcgccacgctgctcttcctctacatcaccgtgactcccacgtcccggtgttggcccctcttccgattgggttcgccgtgttcatggtgcacctggccaccatccccatcaccggcaccggcatcaacccggcgaggagcttgggagccgcggtcatctacaacaaggacaaggcctgggacgaccaatggatcttctgggtgggcccactgatcggcgccgccatcgccgccgcctaccaccagtacgtgctgagagccagcgccaccaagctcgggtcctaccggagcaacgcctaataagtccggcggcgggagctgtgggcgccaccgatcgatccaagtgtagatacgtacgctcccccgactccgtccagtatatgacgccctgtggtcgtccacatctgccaccacagtcccgtccgcttggtgctgttttctttctttccttgacggggaaaaaaagtgtgatatatctttgctttctgtatatgtgacaaaatgcattctgtaagccagtcatgtgagtttttatttaaccacagtctacttttagaacgatttaaacggccctgaatcttacttgcaactttagaggaaagtacgggaaaagaaaaaaaaaaaaaaaaaaaaaaaaaaaaaaaaaaagggcggcagctcgcgatctagaac

SEQ ID NO: 94319 - DNA, 372 bp, Zea mays
  Clone ID: MRT4577_18600C.1
agacaccctttaaaacacaatttaaaatacccattatacctgccctaaaaaagaaaaaaggggggtcttaaaagtgaaaacctgctttgcttgggccattccttaatgtgttccgttccgttccatgggaaaaggcacaagggctcaatgcgccccttgaattgccccataggaaaccggagaaacctgccttggcttacgccacaaaaaaagggttcaggggataccttctggcgctgggggggaaggtgcaaaaacttaacacacccaccaaagaagacacgcttgggttttggccctaacccatatatcgaccactgggaagagcgcccactattcatgacactctgaggtcaagaagaaactttccgg

SEQ ID NO: 94320 - DNA, 1509 bp, Zea mays
  unsure (1)..(1509): unsure at all n locations
  Clone ID: MRT4577_186010C.1
gcacatcatcgaccaaaatataattagacaactacaaatcgtacacatcaattaacgtcttgttctctaatcgcaaacgcgatcctaccaaagagtataaccgaaacactttacacacatctgcacatatatacatgcactgcccgacatcaatcaaagcatacgtattataaactataaatcaatcaacctgaacgggtcgtgactacacgcatggctgtccacatggctcggtatttcgtcgaacgggcaaggcacgaagcgcaacatcgacggctagcgagggtcgacgacgccgtggacggggctgcgcagcacaataagcatccagcgggcctcatggcatgctgtccacgacataccgcttcacccgagcatttcatcgaacacccgcgaagcgccaacgttgtggggctgcgggagaggtagctgagcagaggcgctgcgcagggcgccagccatggcaagagcagtttgggggaaggagatgttgctgctgggcgccatggtcatggacctcgccgaggccggcccagggagctcccgcgcagtggagaaagggaagagggcgccatccattggagcgcggcttccatgcagagaggagccaatctccatgcctgctgccgtggggagaacagaggggaggacagctgggaaatggcggccagggggagaggtggacgaccgccggcatggggaagaggcgccatggggaggagggtcgagctgagccactggcatcctgtgcgctggggaaggaagctcgagaagggggggcgccatggcgcctcttccccatgccggcggtcgtccacctctccccctggccgccatttcccagctgtcctcccctctgttctccccacggcagcaggcatggagattggctcctctctgcatggaagccgcgctccaatggatggcgccctcttccctttctccactgcgcgggagctccctgggccggcctcggcgaggtccatgaccatggcgcccagcagcaacatctccttcccccaaactgctcttgccatggctggcgccctgcgcagcgcctctgctcagctacctctcccgcagccccacaacgttggcgcttcgcgggtgttcgatgaaatgctcgggtgaagcggtatgtcgtggacagcatgccatgaggcccgctggatgcttattgtgctgcgcagccccgtccacggcgtcgtcgaccctcgctagccgtcgatgttgcgcttcgtgccttgcccgttcgacgaaataccgagccatgtggacagccatgcgtgtagtcacgacccgttcaggttgattgatttatagtttataatacgtatgctttgattgatgtcgggcagtgcatgtatatatgtgcagatgtgtgtaaagtgtttcggttatactctttggtaggatcgcgtttgcgattagagaacagacgttaattgatgtgcacgnatttgtagttgtctaattatattttggtcgatgatgtgcatgtggctaaat

SEQ ID NO: 94321 - DNA, 173 bp, Zea mays
  unsure (1)..(173): unsure at all n locations
  Clone ID: MRT4577_186011C.1
ctctgctagcatatanggactatcacctgatctacgttgccagcatctagcttctcgcacacggcggcncgattccgaagcgcacacactcgctccagccaaaagcatcgcagcttctaatcgatcggagagcacacacgaatgtcgtacgtgcagctctatgctgctggagt

SEQ ID NO: 94322 - DNA, 582 bp, Zea mays
  Clone ID: MRT4577_186012C.1
tcgaggccggccgggacctgctctcctaaaacatcggttcgtccccactcttgatctccacaactagatgctccgccgcgtcgcccctatgtcggatgtatctctaccgccgcgcgctctctaccacgccatcctcttgccgcaccgcgtcgcaaatcgcgtcggtctcctctgaattgaactccgtcctcctccgctcgctcatggagtgctacctcgatgtctgtaagatgactgcgccgacgaaggtcgacccgaccattgccttcaccgtcgacgaatgcgccctgtaccacacggcgactgccgtggtgaaccgcgaataccgtgatgacggagaggagatctccatctctgtcgtcagtgtcgccaagattgtgaccgacggcgacgtctctgattctgacgatatcgtcgagggcgagggtatgagcgcgtccatcatccatctcctcctctacgtcatagtctccgagaccggtatactgaggcctgtgcagatcctttgcgttgtgtacccgtgcgctgttgtgatccattccctctgcctccgatctgaataacgccgacacgttttatggg

SEQ ID NO: 94323 - DNA, 269 bp, Zea mays
  Clone ID: MRT4577_186013C.1
cggatgcgtgggcgcgcgagtcgccgccaggaaacccgccaggcatcaccgggcccacagccgggatacccgccacctccgtgccccaccaaccctctcgatggaaggcgcgccattcccgccatgattcccgccggcgcgatgcccatgcccgccctcagctccttcacccgcccttatgttcttcctgcccccgtcttgcgtcccccccatgcccgccgtgaattccggcggtgcaatgaccacgcctggccttaactccagatgcc

SEQ ID NO: 94324 - DNA, 514 bp, Zea mays
  Clone ID: MRT4577_186014C.1
acattccattactcatgtgcatatatcaggagcaagaaaaaaaatgggtccagatcgaaccatccaagatttattccatcaccacccacccgaatcccgaaaccatggttaaactgcggggacaagattaaccaaccaaaaaagcggggttccccaaggccacagcccattctcttataagaacgactcacttcgcccaggcaagggaccgacctaggggtcgacaccaagcagaaaaaacgccaaaccagccataacgttactatactgagaggcaacaaaactacgatgacctaggggcactagctaccactggggaggaaactactactacggccaaagggggaactagaaaacgagtggcactacgacttttgctgctggtacgggctctaaccaaacaccggcaatggttgggggccggccgggccggggccgtgaggctcattcgaggagggggataacggggatgaccaagatgacaatcggggaggagacgacaacgcaccccttg

SEQ ID NO: 94325 - DNA, 276 bp, Zea mays
  Clone ID: MRT4577_186015C.1
gttgacgagtacttcgatctggtcgggtacagttcctactgtgacaaccacatcaatagcaacacgaaacagtacgggatgcaagagcagcagctcctgctgcacaaggagtttggagacaaggagggaagcgagtacgtggtgccttcacaggtcgggcagcagcagagtggctatcacagagttattgggacggagcaggctgcctccatgacttcccgggtcagtgcttacacagattccatcagcaacagcatctctttctcatcgtcaatg

SEQ ID NO: 94326 - DNA, 343 bp, Zea mays
  Clone ID: MRT4577_186016C.1
agttggttgtttttcggggatctttagatttttgaccccctctaaaggtacctcgagcagggggggtccgggtttttttaggccttgggcgctttggggggagaccccggcccaaagacaccccccccttaagtgggtaattgggtctttttatgcgcttctagtcggtgttttaaatgagaagggggctgtcgcgcccccccggggggccccaaattataaaccacccccgggtgtcgggggaatttattattaccataaccccctattccctattaaaattaagctttgggttattaggagcccgggggggcgccgggggttacaccaaaaatttccaatc

SEQ ID NO: 94327 - DNA, 275 bp, Zea mays
  Clone ID: MRT4577_186017C.1
actgacgcgtgggaaaaaaaaaaacaaaaaaatataattaaaaaaaaaaaacaaaacactaaaaaagaagcgctcattatataacgtgaccatgaatacatccaccttctaccgaatcaacatctctaccatattctacctctaactcaattgcatcgcctacgctttcttacgcaacacactggaaaaacaacgtgcttacccactttaactagcctttctgactattccacttttccaacatcgccttatacctacaattccttgacgcatat

SEQ ID NO: 94328 - DNA, 325 bp, Zea mays
  Clone ID: MRT4577_186018C.1
cggacgcgtgggcggacgcgtgggcggacgcgtgggcggacgcgtgggcggacgcgtgggcggacgcgtgggtagactacgacagcgtccggcgaagaggcggaggcgaaactgaggaagagctcggcacgcgacttcccgcggaagcagcagttatgccgccatgtttgtctgtttgattgttctgaggtctcctgaacatgccagcatttattccttgagattataacccctggtgtagcgctcaagcagggctgtttgcggatcacagtatttattttatgccttcaggctcgaatcaaaaagataatgcaagcagatgagg

SEQ ID NO: 94329 - DNA, 346 bp, Zea mays
  Clone ID: MRT4577_186019C.1
cgggcttgttacccaggtgggggcattaaggtggtgcggatgtttggtaccttttcttgttctgggcacatgctgttccttggttggcctgcccgttccaagttggtagtggccgttggaggcttgggcgaaggccctgggcttccttggacctagagtggcaggaacggcgtgaggctgtcttcacagagcagcgatcactgctcgctattaacggtgggaggataacaggccactgcagcatgggctcgcttaaggcccagactcatactaaatagaccaccattttttataaaaaaaaataaaaaactgaaaaaagcaaatgtagtagctgacaattataact

SEQ ID NO: 94330 - DNA, 350 bp, Zea mays
  unsure (1)..(350): unsure at all n locations
  Clone ID: MRT4577_18601C.1
attcggctcgagggagtggtgcccttaatttattgatgcatttgcttacttggaaaattgattaccattccttgaatccattgtataaaaaggattgctctgatgctaacacttgctttagaaaaacaaaatgtgttgctttaaaaacaaaaggtgatgctccatattggatgggaatttttacaaagaaaagactgaagatggtggatccatcactggcgtgaagggttccacatctgaaaagatgtacctctgccagttaccaaactttgggttctaaataactaagctgacacctgncggctgacttgcaccataaggacgtctcggtgtagtgtctctgtctgagt

SEQ ID NO: 94331 - DNA, 198 bp, Zea mays
  Clone ID: MRT4577_186020C.1
ttttgttcacactggcggctgctctagctttcatcactatggcccatgatgctggcctcagaacatgcctgccctgggaggactctaccagggccagtaccagccgcccaggtgccgtaccgaccccagctgagtttccgctgccattccgccggagtactgagtcatgatattcaggaaatctcctactatccatcc

SEQ ID NO: 94332 - DNA, 2319 bp, Zea mays
  Clone ID: MRT4577_186021C.1
catgtacaaaacattaatgaaggactacctctcttcctctccaattatgatgatcgaagattgtatggtatttacgaagcttcatggaatggaaagtcctgtcctgaatcaaattcatggtcacaggatagcttgttttacccttgctatcctacccgcattgcaaccttggtaggatagcgggtaagggtgtggtgttttgctctagcggagaatcagttcagaaatgcaattatagtcaattactaccagaaaatggctagtgtccctagccagaagcttcattttttcaagtttgaattggttcatgctcaaacacgtgtttgatggatatttactccttctcccaccagtttttggatgccccctactgcaacaccaactgatgagcatgtgagagaatttgtgttgtcacctcgatgggcaccggagtgtcaggggaacaataacctcaaatcagaaaaggttgtcaagtcatatgcagacatagtgaagaagaacacatttgtggaagttgggacaagagatgtggatgtggaacatgcaggctcaggtgatgaatcttctggtggtttcgatgaactggattgtcagtacacaccaacagagagggaggactacgctctatcagatagggtggttcaagtgcaacaacagtaccctgataagcaggcagaagtgcttagctttgatcgggttttacaagggcgcatcacttttcctggtcagcagtggcattctgatttttatgccaatactacccaaactgaggataacgatgcatatagctgcgagtatgcccaagaggtcaaatatgcaattctggatggcagctctaatttgccagaaaccttagattctgaagttgataaactgtccctggggcattctgatttgctggtgcagttgttggactctgaatcatgcacagaagctaagctgattgatgcagtgaaacagttatctggacgaatagaggtgatggagaagaagcaggcttggtccaacaaagaagtcaaacatctacaagggatgaatgagaggttactgaaaagaattgttgaactaaagggaaccgttatgacattgaattctaaaatagatcctttaaccctagatgattcacttaaccagtttgtagaacaatgtttgggttcagaagatgtcatttatttagttggtggttttgatggcttctcatctttgccatcactagactctttttccccttcattggacatactaacaccccttaaaccaatggctgttggcaagtcatattcctcaactgttgcactagagggcaagatatttgttcttggtggtggtgatggtgcttgctggtttgatacagttgactgttatgaccgaagccgtgatgattggtccacatgcccatcgttgacttgtgacaaggggagccttgctggggttagtgtcaacgggagaatctatgcatttggtggtggagatggaaccaagtgtttctctgatgttgaaatgtttgatcctgtgcatggaaagtggataaagaatcaacctatgctggaaaagcgctttgctctagctggtgtagcactaaatggtgcgatttatgctgttggtggcttcaatggtgttcaatatttgagctgtgctgaaagacttgatcctcgggagcctaactggaaaatgctaccaaagatgagtgcaggaaggggctgtcatacacttacagttcttaatgagaagatattctcgattggtggatatgacactagggctaaagcaatggtgtctactgttgaggtgtatgagccaaggatgccatcgtgggtgatggttgaacccatgaactacaccagaggatatcattcttcagctgtgctcggtggctcaatattcacctttggtggggtgaaaggtgaagcagacacaatcttggatgtggtggaacactacaaggaagggtgtggctggatgacaacgggattgaagtcgattggcagaagatgctactgctcagcgattgttctctgactgtaactgccttaaaaccaagtgagaatgaggagactgataataggtaaaactaatatattaatattaggtaaaaactaagaaggctcttgcttagcctgaactgacaacactagacacgatggacctcgtagtttctgaatcggcgaactgtaaaacaaacattgagctgtttgtgttgtccgacactggatggtgggtggatgcatgcatgagtgaatcggtactgaactgatgtagagatgacacttccatggatgaatatccaagtatttgactctgtatgttgagctttttctc

SEQ ID NO: 94333 - DNA, 672 bp, Zea mays
  Clone ID: MRT4577_186022C.1
agtgcatcgcccaacgccctgccggtaagcgcccgactgtcccagtcccccagcctggggttccagttccccgcagcggcctccgcgggcgccgccgcgcgggccggacacggctggccgcgcttcttcacggcggccgcggcgtggggaggcatcggctggatctggtggtggatgaagagcggaggggccacctgcgggcccacctccctctgcatcgcttctcaagtcctccgggctcgccccactcagcctcagccacagccacggcccacctcttcgacgaatctacgcagacgaggtcaaacgagccgaccagcgcccgcagcaacagggggacacgagcggcgccgcaacaggggcgaggccagcaccgagcagtcgaggagaaagattccgttccagttaccactcacgcaagtcttcggcgccagtcgcaaccgtcacgtcacctcgccgcctccccctcccgccctccagaaatagggccagagcagaaaatatctctcttccctggccgggtgatgagtagtgctgattcggcggcagaaagagcgcgtaggatagaggtggagtggagcagcgagaggagtgggctgcccgccctggtggcgtggtgcggcgctggagcctagagggaaggcgtgtgtgagagggacctcgtgccgaatt

SEQ ID NO: 94334 - DNA, 368 bp, Zea mays
  Clone ID: MRT4577_186023C.1
gggggcccaaaagggaggggtaaaaaaaattttttagggccggtttggggcaacaaaaggccccacccttttaaactcttttttaacaagcccaaattcccaaaaaaaaaaaccccccccccatatatatatatttgacccaaaaatttccccccttataactaaaaggggggctcctttttctcctccaaaaagggtttgaaatactggggcccccttgggcccccctttcaaaatgtgtgaataaaaccggggggaacttcaaaaaaatgaaataggcgctttgtttttccaaaaccctgtgttaaaagacaagggtgaaaaatcaaaaggtgtttttttaaacaaaaagggttaaaaccccaaaa

SEQ ID NO: 94335 - DNA, 759 bp, Zea mays
  unsure (1)..(759): unsure at all n locations
  Clone ID: MRT4577_186024C.1
cctcgaggccggccgggctctctcgtacaaaacaggccaccacacacaggctctatcccatggataccggccaccacatggtgttcacgaccgcgctcgccgtcaggtggtagtccaggcgagcgagacctcccgactccaggctccctcccatcggtcgtcgtcgcctcatgctgttcgcggccgtgcacgctgcccgcggcacggaggcatcgatccgatcgagagcccttcgtggtggataaagccttcctcctctccggcaatgagggcatcgtcgctaacgtgagcacgtggcagagctcgctgccccatccttcttcatcttcaccaagagaaaatgttgaacttggactgcttgaaacaaatctgctttggtgaaacaacttccatttgttgtattatccagagctggaggtacacaatgccctctatataaagagcggtgttgccctcgttctgtggtccaaacagacacaagcagcaaccattgcttgcactgtatctctcttaggtgttttctcttgttgaataaagataacaagagggagtaaaaaaatgagttcgtcctggaccgagagtcaaaacaagctcttcgagatgatgatcacctcaaatacttgcatgctgaaataatgagtttttgtaacttagcacgacaatgggggcatagcttatctctatcgagagtcaaaacagctctatcgagaaattattgtatatgangataatggagcgtaagcttatggtgntgcttgt

SEQ ID NO: 94336 - DNA, 446 bp, Zea mays
  unsure (1)..(446): unsure at all n locations
  Clone ID: MRT4577_186025C.1
acccacgcgtccgctaatgactcctgtagagatgtatttggcctctgctgacgagttgggtgccgtacttacagcctccggagcgggagctctgttcggatgcattatcttggctttttacaccggtcctaaacagagttagatctacgccatcttgatcattggactcttacaaggcgtccttctctcttgctgcgggctctttccggacgtgttcttcatcctctctgtcgcgttctgttacatgtttttcgttccctttgagagagtgtgtcgggactctatatggctgagcaatgccccgcaagatatgcaagggtggattataggattgcaaaagatgatccagcaactggcgctaccgacagcttcggntctggcgggaccgctggcggatcatatatttgagccggcgatggcataagggggtagcctagatccgattt

SEQ ID NO: 94337 - DNA, 195 bp, Zea mays
  Clone ID: MRT4577_186026C.1
tcgttccgcgttttatacctttatgtgtttggtttgaaatgcagaatgaacttggcgcttggttgcattttggggccgtttgcaggtgccaactgagattaaaaaaaaaaaagggggcgttaagtcacttactcctgctgcagcatcttttatggtactaaattaattactggcgcgtttacaacgcggatggaa

SEQ ID NO: 94338 - DNA, 296 bp, Zea mays
  unsure (1)..(296): unsure at all n locations
  Clone ID: MRT4577_186027C.1
cancacggccagggaaacaggagaaaccgaaagcgggcnanagaagggccggancnaaccagnncccngccaacaacagggnggcaaaaggggncaaagaaaacggnnggaagaaggggagcagacgcagcaggaggcaccggaccgcggaagcccncagcgnagggcgacgcccgcccgggaacaanccagnncagcgggcgcagaggcaggnagaacccacccgannnacacggggcgncaccggagccnnggaagggcncaccccgacaggcaggggncccaaaancaccccg

SEQ ID NO: 94339 - DNA, 348 bp, Zea mays
  unsure (1)..(348): unsure at all n locations
  Clone ID: MRT4577_186028C.1
gncccccctagggaaaaaattttggatgggggtaacttttgatttacatcatcccaaccccccgggaacttgactttttgtgaacaaactttggacctcctttcttagattcaaaccccccaggtggccccacctttcgcaggggtgggggccactttccacctttttaggaattttagacctttttggcaaacgccttattttttggaccccaattttttttaaaaaaacaaccggggggaattggttttttttaaaccacccgggttcaaaaaccggaaaccggggtttacccgggaatttgaagggatcttactttaggttttttggccggacccgtggggaacc

SEQ ID NO: 94340 - DNA, 359 bp, Zea mays
  Clone ID: MRT4577_186029C.1
ctggaccacacccgcctcaacatcaacacgtattgagctgttgaccttaaggggggggagggagagtcctttactgtagcgcactacaccctcttagaccttaatcaaactgcgaactatctggacattaatgggctaccgaacctgcgccgccatatcatatatacgggatatataggggatctttagaggaggtctgctaaaacaacatgaggaacgactagatcatacttctcaagctagtttaacgacaaaccattgcctgctgctacataaagcaaagggcagggaagtttatcttctatatacaagaaactgattgagactagatgactgtacttcatgagtattgggctaaa

SEQ ID NO: 94341 - DNA, 306 bp, Zea mays
  Clone ID: MRT4577_18602C.1
gaatccatccccattcccatgagtttaaataaataattattttacacaccctacggtcggtggatttctcgctgagcggccctacacctttatcgtcgtcggcttcgccgacgttgctgtgttccgtcttttcgaccatggcttctgccaagatcagtgctgcccagcaagtggagaaccgaagcgcgctttccaaaaggtcacgtaaccacctttctgtaatggaaggggactggaaattgcctcaatgtggtaatgtcaacttcaattttagaaatgtttgaaaccgtggaacctgttgtgcac

SEQ ID NO: 94342 - DNA, 199 bp, Zea mays
  unsure (1)..(199): unsure at all n locations
  Clone ID: MRT4577_186030C.1
gcgtgggaatgaacagttcaaatccatattgtcatagcacctggtagacggaattttgtgggtgggttcattctgggcatgggtgttcacttcattgcnggactncgantgcttgtnggttcngnnntcacatgcgtntcttctttctcctgtcntgtggntntggctttgtcggggggggggggggtgtgttccctct

SEQ ID NO: 94343 - DNA, 229 bp, Zea mays
  Clone ID: MRT4577_186031C.1
ggttcgcacactcacaccacacgatctgatctagaggaaatcgtccggtcgtccccttcaatatacaattcttttctttaaccataccctgcccgactataatcttacacgtggagtggtgtgacaccactgccttcgctacggccaagacccaatacatggcagggatggcctccgaccagaacaggatcatcttatcttgcatacaaatcaaggacaggaccgcccc

SEQ ID NO: 94344 - DNA, 191 bp, Zea mays
  unsure (1)..(191): unsure at all n locations
  Clone ID: MRT4577_186032C.1
tacaaccatgnnccgccaccccgacacacgcagtcttccgggcgtcggcggcgtacccttctcgtcctgcatcggcgacctcctccgcttcgtactcttcttccacgccgccgcctaccccggagacgacacggtcgcttttcccctctcgccctcctactgcgcccgccttcttaacaacggcgaacttt

SEQ ID NO: 94345 - DNA, 262 bp, Zea mays
  Clone ID: MRT4577_186033C.1
aggataaatatataggatcaaaacatattattgggggccaattaatatatgggtacaggagacccaattggatcaaccaaaatgcatgttgacacacgttcatgagcacaaagactggccccaaacatgcagagggggatagcaaactgaaaaactttgttttttttttttttacacacacaccaaacaatacctttttttgggagccagctcggccttgcttatttttggtcaaccccccccccaagcttgaaaggaaaaa

SEQ ID NO: 94346 - DNA, 408 bp, Zea mays
  unsure (1)..(408): unsure at all n locations
  Clone ID: MRT4577_186034C.1
acagagcaactccaacccccccanatttcgttttttcatcaccgacgactgcccaaacgagaaacgtgtttcatgttttgatgcgctgcagccccccacacttgtcttttctccctccaccgaaacattttatttccaatagctattcacttttttggagctttccctttccacggtggctgtagctacttattcatatatgcaaacgccttcaacggcttgacatgaatcgtcctctgacattgcttaagaactgcctctacataggcaagaacttccatctcatgcaacacatcccccacgtgcgcatcataagcttctatttctatatatactctctcttataacaggaaccgacgcatctactatacttatgcacagtcataagaatgaattcatttcttaaaa

SEQ ID NO: 94347 - DNA, 835 bp, Zea mays
  Clone ID: MRT4577_186035C.1
cgaaaactcccaaatgactaaaattttagtaacacaatggttttaggatctaccaggtttgttacacccgaacacattatttccaaaaccaaattatcacacaagatccaaaaagggctaaagcatgaaaccataagccaaatatatagttttttgagtaaagtgcatttccggtcccttaacttgcgccggtgtgtcagcccggtccataaagttttaaaatgtgtctcttaaagtcttaatcgctgttcgggtctctgttaggtccaaaacggttcgaaacaaatccggtagcaggtttttcagtcttcttccttggcctacctgtcatttccttcttcctccgtccggtagtgtgcgctcggggccactcgtatattcattcagcacatattaaggtcgtcctcaattctagtcttggtctgcaggcccatttcctcttggttccttagcttctcttctatcgtggccagagacacaacagctcgctggtactgcagactaaccgtccggctgcaggcgcaggcatagcggagcatctgctgctccacctggggcaagtgagcctatggagctggtcacgttctggtggctgctgggtggcccgccggaccatcccatctgactgcgaatccagcgccttcttctgcaaccgtttcggcgcctgcaggagcgacggcacaggtggacgggtggttgctgtcatggaccttcggtccatggggatagctgtcttctccggcgaggttatacccctctaccgcaggcttggttctagggtagcagccctaggcgcttgagtgtcattagtagagagagagagattggtttgata

SEQ ID NO: 94348 - DNA, 271 bp, Zea mays
  Clone ID: MRT4577_186036C.1
cccagcgtccgcccagcgtccgcccacgcgtccgcccacgcgtccgcccacgcgttccgaaaaaaaaaaaaaaaaaaaaaaaaaaaaaaaaaaaaaaaaaaaaaaaaagggaagaaaaattaaaaagataaaaaatataagtggggcttggatttaaaaggattaaagttttctataggggtgcctgaaattgaattaacttttctttagttttacaataatttgaattgggcaaaacctttggttttaaccaacttaatttggcttaaac

SEQ ID NO: 94349 - DNA, 280 bp, Zea mays
  unsure (1)..(280): unsure at all n locations
  Clone ID: MRT4577_186037C.1
actttcggtccacgcttacgcgtcgcggctccgctggtctttcacttcaccggctgaaggcnatatcaggcgcttgtcgctatttcgttctccgacgctcgcttggctggtatagtctactcgatgcttgtcattcccgactatcccaagccagttatcatactccaggacatcatttcactgctgctgtacaccaacgccttccgttacattttcgaccaccttttaaattgtttcaagggccaaaggatcaccgtattttcttttttttcatcccagt

SEQ ID NO: 94350 - DNA, 328 bp, Zea mays
  unsure (1)..(328): unsure at all n locations
  Clone ID: MRT4577_186038C.1
gcaagctttttttttttttttttttttttttttttttgtgttttttttttttttttgttctgttttgtttaccatttagctaaatttcttatatgcttttaaaaaaacagtaatttcccctcccttttcaccagacttgtggggggggggggggattttttaaatcctcctttactantctcttgcggggggggtgcttttcccctgggggggggctttctccgtgcgctgtgtcccttggttgccccgagcgttctcttcgcttggtgggttcgaggcgggctgtgctcgcggagggtggtaagccgggtgcgttccactgggtctt

SEQ ID NO: 94351 - DNA, 1414 bp, Zea mays
  Clone ID: MRT4577_186039C.1
tactctcaagcagtcgtagtagaacctccagctccccagcccccaggtggtcaagactcaagagacagagagagcatggccgctgctcccatggtggtgccgcgcgtgaagctgggctcccaggggctggaggtctcggcgcatggcagtcaagtagaacctccaggccccccagcccccaggtggtcaagagacagagagagcatggccgctgctcccacggtggtgccgcgcgtgaagctgggctcccaggggctggaggtctcggcgcagggcctcggctgcatgggcatgtccgcctactacggccctcccaagccggagccagacatgatcgcgctcatccaccacgccgtcgccgccggcgtcaccctcctcgacacctccaacgtgtacggcccccacaccaacgagctcctcctcggcagggcgctccgggcggcaggcggggtgcgggagaaggtgcagctggcgaccaagttcggcatacgcgcggacgccgacgacggcgcctgggagatccgcggcgatcccgcgtacgtgcgcgcggcgtgcgagggcagcctccagcgcctcggcgtcggctgcatcgacctctactaccagcaccgcatcgacaacagggtgcccatcgaggtcacggtaggtgaactgaagaaactagttgcggagggcaagatcaaatacatcggcctgtccgaggcgtcggcgtcgacgatcaggagagcgcacgcagttcagtccactgggcagagggttcttgtcgagtggtcctacgatggtcgacaagttgtccgctcaagatttccgcaaggagctgcccagattccagccggagaacctggagaagaacgccgtgatattcgagagagtcaacgcgatggcggcgaggaaggggtgcacgccgtcgcagctggcgttggcctgggtacaccaccagggagccgacgtgtgccccatacccgggacgacgaaggtcgagaacttcaacagcaacgtggcggcgctttcggtggagctcacgcctcaggacatggctgagctcgagtcttacgcgtcggcgggcgtccagggcgatcgctacaatgactacatcaacacttggaaggattcggagaagctcacgcctcaggacatggctgagctcgagtcttacgcgtcggcgggcgtccagggcgatcgctaccatgacttcctcaacacttggaaggattccgagacacctcccctgtcgtcatggaaggctggtgaataacctacggcttcacacacgtgacacgttgttgaggtgaccagatggaataaataagagccaataaaaattctccgcacaatataattttagcttgcttgctaaaaatctttatccaatcttttaaaactataaaactctcaaatgagatgttcatgagcc

SEQ ID NO: 94352 - DNA, 326 bp, Zea mays
  unsure (1)..(326): unsure at all n locations
  Clone ID: MRT4577_18603C.1
ggtattgtttgctgaaccacccttcaaggctgagatcagttctatacgagaatactaagacagactaagtgacagtactacaggtgctgatagcttattggatataagttctgaagctgaccaacaagatcttctctctctattgcaagcaaaagttgcttcccttgccttacacaataaggagttacaagatatattacaggccaaatcacccaaggaggcggaagcagacctaagctgtnttttgataccattccacccagactgacttgggcccatccctgggagaacctagtgaaactctcggccagactccagatcactcc

SEQ ID NO: 94353 - DNA, 268 bp, Zea mays
  unsure (1)..(268): unsure at all n locations
  Clone ID: MRT4577_186040C.1
accggccggaancccggncgacccacgcgncctcttatattgcagcaaaaccacaangaangtgggtggaagatgaggaaagaagagacgataccaacctcaggcccatgagaccgacaaagcaaaccagacgggatgctaagcacgaaagagctgaaccaacaacagagggtgcaaaacacaacacgtgaagcgttgacctgaaagtggccaaagaccaggcagaggacaacgattccgaaggcgaccaagtggagggaagggaaga

SEQ ID NO: 94354 - DNA, 1322 bp, Zea mays
  Clone ID: MRT4577_186041C.1
ccggccgggccgggaaaaaaacactcaagcagtcaagtagaacctccagctccccagcccccaggtggtcaagactcaagagacagagagagcatggccgctgctcccatggtggtgccgcgcgtgaagctgggctcccaggggctggaggtctcggcgcagggcctcggctgcatgggcatgtccgcctactacggccctcccaagccggagccggacatgatcgcgctcatccaccacgccgtcgccgccggcgtcaccctcctcgacacctccgacgtgtacggcccccacaccaacgagctcctcctcggcagggcgctccgggcggcaggcggggtgcgggagaaggtgcagctggcgaccaagttcggcatacgcgcggacgccgacgacggcgcctgggagatccgcggcgatcccgcgtacgtgcgcgcggcgtgcgagggcagcctccagcgcctcggcgtcggctgcatcgacctctactaccagcaccgcatcgacaacagggtgcccatcgaggtcacggtaggtgaactgaagaaactagttgcggagggcaagatcaaatacatcggcctgtccgaggcgtcggcgtcgacgatcaggagagcgcacgcagttcacccaatctccgctgtccagctggagtggtcgctctggtcaagggatgttgaagctgacataatcccgacctgcagggagcttggcattgggatagtagcctacagtccactgggcagagggttcttgtcgagtggtcctacgatggtcgacaagttgtccgatcaagatttccgcaaggagctgcccagattccagccggagaacctggagaagaacgccgtgatattcgagagagtcaacgcgatggcggcgaggaaggggtgcacgccgtcgcagctggcgttggcctgggtacaccaccagggagccgacgtgtgccccatacccgggacgacgaaggtcgagaacttcaacagcaacgtggcggcgctttcggtggagctcacgcctcaggacatggctgagctcgagtcttacgcgtcggcgggcgtccagggcgatcgctaccatgacttcctcaacacttggaaggattcagagacacctcccctgtcgtcctggaaggctgatgaataacctgcggcttaattcacacgcggtgttgtcccattgaaagatggatgaggtgaccagatggaatgaataagagccaataaaatttcttcgcacaatgtaattttagcttgcttgctaaatcattctccaatcttttaaaactatataactctcaaatgagatgttcatcagccagc

SEQ ID NO: 94355 - DNA, 233 bp, Zea mays
  Clone ID: MRT4577_186042C.1
ggcatcacccagaagcaccatttttgggctggggatttaacttataatttagcctgacgggggtaacagcacccatcgatccgtattccatgctggttgatgcatgggtcttctggagccgaggatgaacacattacttactactgacacagtgtgaccttcatttaaaaacacatatgggtaacaacaaacacgtgtcgatcgtttttaaacactttggacttgggtaaaca

SEQ ID NO: 94356 - DNA, 295 bp, Zea mays
  unsure (1)..(295): unsure at all n locations
  Clone ID: MRT4577_186043C.1
ccggnccgggctcccacgcactccgcaattccgcatcacgcagaggcagagcngaccaacccagaccccaccccaccgcccgcaaccgcaagctcagattccctccccaccccaccccaccccaccgtnccgctcactccagcccagcccgagtncccacagaccagtgactgtgggcaccggcggtatgctgggggggggggtggagccatcctgttggacatcattcggccgtggccacagtggtgtgttaaggttggttatttttgggccgagagtaagaagatgaggtggg

SEQ ID NO: 94357 - DNA, 579 bp, Zea mays
  unsure (1)..(579): unsure at all n locations
  Clone ID: MRT4577_186044C.1
ccagccaacggcgtcgtttctactcaacgggcatgaccactgcctggnacacatcagcagctgcagtagctccttggtgtcaccatgatcactgacactcctcatggtatggtggcaccaaggagctactgcagctactgcttccagtcctccaggccaacggcgtgaattatctacattaacggtcatgaccactgactggaacacacattatcaaacaagaccaatacacgacttcacaagccgcagcggctacaatgcatggaacaggagcgcaaaaccccacccaacatgacctcaagctcttatacaaccggcaacgattcatgttcctccagctagaaccctagccaacccaagttcacctttatacgacgtaaacgggaaggcgctgatcatcaacacacggtcgatcctgatggaaacaggccaccacctccaagcctccggcttcgtaaaccaagaatgaagcacgcgcgagtcagaatgcatagctggagaactgagatcgatatatgcagttcaagcgtaaaaatagtgcaaatattcattatgaaacatctctgcgaattccgatat

SEQ ID NO: 94358 - DNA, 911 bp, Zea mays
  Clone ID: MRT4577_186045C.1
ccggccggggtggaaacctaacatcaaaaaaaaataagaatggaggtgtttcattcctctccgctcctcaaccaaacacaccctaagtgtggcacttcataagagagtcctgcaagccggccaagttgggttcttcctcgcctttgagacaactaaaattttgctacctacagctacaaggcacactcatgggtcttcagtcttcatagatgttgaggtgtcgtgaccggctccattcacatcccccatcacaggacacagggtagggcgagggccacctccactgtctaacatcatgatgttatgtagcagctagtggagccatagcctttgttgtgagatcgacctagagttgcatcaaggattcccagtcaacgaagggttaggatttgtgatgtacactgccatgcaacttctccggggaagcaacgacaaatcaattcttctcacactcaaatagtgcagtcacctcgattaagccgtcaaatgtcccatctatcaatgcgatggggatgttaccgcatatgtcggaggtaaactccagccgagtggaggagagcaccctctgttgggggtcttcttccccgccaaaggtccttaaggcaaaaacaccttcgacaaaatgatacaaaagcttgtcgaagttatcttcagccttggctcaactcctcgagatgaagctcaaggactttggcgatagtgcaagatgtcgaaggtcaatagcttcggcccataccaagcaaagaagaaaaaaggactagatagaccttattagtttcaattacttataaacatatgttcgagggcataaatataattgtacccaacctgtgtctcatgcctataaatagatgaacagtaccctggtactgttcacgctggatgggaaaaaaaaaaaaaaaaagggggcc

SEQ ID NO: 94359 - DNA, 2071 bp, Zea mays
  Clone ID: MRT4577_186046C.1
ccggccgcacaaacaaactcatttcccgtctccacttgttcctcctctgtgctctcgcctttccattcctccaccggcctcatcccccaactccgtcgagcattaccgtcagagggcggcggcgcggcgcggcgccgccgccggcgacggggaccgcgtgaggcaggctcccctcaaggctcgtcctcctcgtcgggaggcgtcgccgttgccccgccctctgggctggcgcggcgtggaggggacagctggagatccgcccgtctctgcttggattgcttccttctcccgcagagggtatgagcaatgtactcaccaaaaccagagtctagttttggcccaaatcccaactcaggtacacaccagcagcaaatggaattaactggggccaacatgggtcctggtaatggagcaaataacaataccaacatggctgggaggcaacgcttacgctggacaaatgaactgcatgaaagatttgttgaggctgttactcaacttgggggtcctgatagggcaactccaaaaggagttctgagaattatgggtgtacaaggattaacaatataccatgtaaaaagtcacttgcagaaatacagactagcaaagtatattcctgatgcttcaactgatgggaacaagaccgataacaaagacccaggagatttgcttgccggacttgagggatcctctggattgcagatatctgaagccctcaaactgcagatggaggtccaaaagcggctgcacgaacagttagaagtacaaaggcagctgcagttacgaattgaggctcagggaaagtacctccagaagatcatcgaagagcagcagcgcttaacaggtgtgaaatctgaaactcctgctggaggtgcttctgtcactgtatcaagtgatcaattcccagactcggagcggactgagccctccacacctgcaccagcatccgagtctccaactcaagttggtgcttccaatagggacactggagaccgaactgaagcaaccaagagcacctgtcatggtgattctctttcccgcaacgagccactaacccctgattccaactgccagaacggttctcctgtcgctagtccaaaccatgaaagggcagccaagaggcagcgaggcagtggtactgaattcttagattctgaggctgagttttcccttccgcgccacatcttcgagtcgagttcaggctcagagttccaacaatactcaatgtcctactcaggacagtagcttctgatgttcacatcatctctgcaccgttgctagcttgttcagcacgatgcgcatggtccgtaggtctgggtaggttgatgtctcaaggagcgtgttgttggtaaacaaagctgtaggtgttcagtgattgtctacatggtatacgtgaccagctatttaagttcctaggtttgtaacatgtatgtccgcctgcagttcagttgagatgcttcaaggctaaggttctgttgtgtgacctgtagacacgaggctgtcagcttgtattctcttggtaatgtgtgtcagcagagcgttagcattaagtctaattgaacagtgctgttatctgtaacgtctgagtttgatcagaaactgaagttaattgaggaagacatcaacaatgtcaatactcaatgtcctactcaggacagtagcttctgatgttcacatcatctctgcaccgttgctagcttgttcagcacgatgcgcatggtccgtaggtctgggtaggttgatgtctcaaggagcgtgttgttggtaaacaaagctgtaggtgttcagtgattgtctacatggtatacgtgaccagctatttaagttcctaggtttgtaacatgtatgtccgcctgcagttcagttgagatgcttcaaggctaaggttctgttgtgtgacctgtagacacgaggctgtcagcttgtattctcttggtaatgtgtgtcagcagagcgttagcattaagtctaattgaacagtgctgttatctgtaacgtctgagtttgatcagaaactgaagttaattgaggaagacatcaacaatgttctgatactaaaaaaaaaaaaaaa

SEQ ID NO: 94360 - DNA, 529 bp, Zea mays
  Clone ID: MRT4577_186047C.1
cggactccttttatttttgcttgcatgttgctgaaaagctacacaccacgaaacgaactctcggaccatacccacctaaccacgccaatgagctttaactggaatgagatgatcctttgaaccaagccctcttaaccctgtgtgaagactataggtgcccctacatttactgaccttacaggcccaccaagcgtggttgcaccatagacgccaccacatacactgattgcaatctatcctttgtttaaaaacctttgatgcatgctctctaacggcggaggtcaaatataacataaaaatgcttgatactctggcctgactgacaagaccgcaaaatttactataccgaggagattcaaaaccacttgtcatttagtctgcaacatgttgaccacaccaaatggttctactacgaacgcacatagaactatagcctatgcatctctctgcttatgaagtggcctaatttaacaaccaaccaaggatgcttgcctcaataagttatgcctgagaagagaagtgaagctcc

SEQ ID NO: 94361 - DNA, 461 bp, Zea mays
  unsure (1)..(461): unsure at all n locations
  Clone ID: MRT4577_186048C.1
aatgggatccccgaggccggccggngaaccctagcgtcacccacgcacccagccactcgtttcagccgcctccgccgcgcgtacaagcaagtggagagaggatgacggctggccacggtgtgggctcgcggaagcgcgacctctttgtgtgccccttccgtgagaagggctacatcgccgatcaccacctaactccgcctctacaagatggttgatacgacaatgctgggcgaacggcgccgtccacgaggatatgcctgcaaagttctacacactggtcgaacacggtagcgcgctggaactgcacccagcgcgccatcgtagtgaaggcgaataatcacggcatcggacgaatcagcatgaagagtatgcatgtgcgtgtgtagcatgtgcagacgtaccagtggacataatagatttgtcggaaggacgcgcagaatgagcacctgaaagaggatgcc

SEQ ID NO: 94362 - DNA, 889 bp, Zea mays
  Clone ID: MRT4577_186049C.1
aattcggcacggcactcaaacccctcatccccatgagaccgcacgagttggagcaaggctcagtgcccgcctgcccccgcgtgccgtgcgatgccatggaggcgcgcgtccctgggcgtcgtcacgtcctcactccttgtccgtctgcctgtcgccttgtctcgccttgcaggtcgtagacgacagacgagcagtagcagcagcacgaggcggccgggcccgggccacgccatgccggagaaggaggcgcaggccgccgcgttctgcggcgaggcggtgatcgccgagttcgagtccctcacgcgggacgccgccgccgtgcagcgcgacacgctgcgccggatcctggcagacaacgcctgcgccgagtacctccgctgccggggcctcgcgggccgcaccgacgccgccagcttccgcgcctgcgtgccgctcgccacgcacgccgacatcgagccctacattgcgcgcatcgccgacggcgacacgtcccccgtgctcaccgccaagcccatcacctccatctccctcagctccggcacgacgcaggggaagcgcaagtacctgcccttcaaccaggagctcgcccagtccacgatgcagatataccggacttcctacgccttcaggaacagggcgttccccgtggaggacggcaaggcgctgcagttcatctacggcagccggcagttcaccaccaagggcgggctgacggcgacgacggccaccaccaacgtgtaccgcagcgaggagttcatgcccacgatgcgcgccatccagtcgcaggtgtgcagcccggaggcgggtgatcttcgcgccgacttcgcgcagtcgctctactgccacctgctgtgcggcctgctgtacgccgacgaggtgcgcatcgtgt

SEQ ID NO: 94363 - DNA, 286 bp, Zea mays
  Clone ID: MRT4577_18604C.1
gcctcttgggtgcggatgcgtcccggcggctgcggtggcggcggtagggtgcgtcagctggtcgtggaggccgagtccttaggccggcgggggatggaggacagcaggggtgtcgcccaagtgctcatactcggaggcggcggcggcggaggcaacggcacagtcagaggatcgccgccaggtaggtgcagaaccgtccggtggagctgcccgtgacaggggactgttcggatctggaggcgcggatcgagaagggcatgtacgcctgccgattcatgagcttatt

SEQ ID NO: 94364 - DNA, 312 bp, Zea mays
  Clone ID: MRT4577_186050C.1
gcaaagcataagagatgatctggaatctgttatctattagctcatgaaattaataaacactggatctatttacaagccagcaccgaaactagacactcacaatcccaaatataaataacctcaatcctacaaacatactaacacctcaccgagacactatgtaaatcatatccatcatatcttactacatactcttcttaaacatcatcactacgacatcaaacataaatcagcatcatcatatgccaataaacccttccgcgacccacttatcctcgaccgttaacaactacattatccatttcactctac

SEQ ID NO: 94365 - DNA, 419 bp, Zea mays
  Clone ID: MRT4577_186051C.1
gcccccattcaaaaaaaaaaatatgattctcggggggggttccccaaaaataaactttgcaaggaaaaggttctaccccaaaactagttacatggtaagggtcatgggttttttttaaaaaaaaaaaaccgattcatggaggaattctctgaaaatctttcattccaaaaagggcctaattgttttttcccccccccctttgctggggccaggtttgaaatttaaccccctttccccttttaatccttttccacgcttttttcaaaaaaacccacagggctccccctttatttatggggggactggggccccgtctttaaaaaacgctttaccatcctttgccaccaactgaaattgccacgccggacctaaaaaccaagccaggggaactcccccaagaaagccccccaaaggggccc

SEQ ID NO: 94366 - DNA, 215 bp, Zea mays
  Clone ID: MRT4577_186052C.1
attatgctggcgtaggaagtctcctcattctgctcgactagacaatgatgatccagaaaccaagttgctagcaccttgaattaaccatattatgtcactggtggattactaccataccatctgctagtggacagccaagcgactttcctcctcatcatcatctatatctctcgctcactgattatatatgtactgctataataatctgtcgcgtg

SEQ ID NO: 94367 - DNA, 638 bp, Zea mays
  unsure (1)..(638): unsure at all n locations
  Clone ID: MRT4577_186053C.1
gcatagatggaacaaacataagttaggaactattcgcataaaaaatagtctagaataaaccaaatattcatgcaaaaattacaacaccaccatcacatttgatataggttaaggcaactattgcacaatctacataaatttaaggctttccggccacaacgacataattccctgatggcatcgaagtaagaactcaaactaagttccacacaaagccacaatggcaatacattttactgaattatatgttacttatttatgtcttgtttcaatatctagaacaagtaccataaatatcaactacagttgtctcagaagctatcagatttgcttccttcctagatcttcctgtcaatatcttgcatccacagcaaagagatgttgtgcaggccaaaaaacttctttttatgcagagatactttcaacagtttgttttatcaatttagattatgatgagcttgtataataccagtatagatggagacacagctaaattataaggtgagttggatgaccatttggtaagtgcaagaaagaactaaaggtgtgaattatttattgataagtggtggatgtacaaaacttagacatggacaagatacaggtaaacaccacacaaatatctactactataatcn

SEQ ID NO: 94368 - DNA, 195 bp, Zea mays
  Clone ID: MRT4577_186054C.1
ggacgactacgtgcgcggcggatggcttttcacacaagcgctgtatccgaagcggggtgtttattaacgttctatacatgtgggtccgaccctggtttattcattatgtcacacttttccagagtgattacagttaaattctttcattgttgcgcttcaggctcgagaaaaaagcttgtgcttgttttaacaacc

SEQ ID NO: 94369 - DNA, 275 bp, Zea mays
  Clone ID: MRT4577_186055C.1
cccgaccggccccggcaggcgggccaactccccctataggggggcggattagaggggggggtaattattgccaggggggggggctttaaaaaattgttttccccttacaattccccacaacctaccagaaagaagcataaattgaaaatcctggggggcctaatgaggggggttactcaaattaagggcggggggcccactggcgggttttcagtccggaaaactggttgggcccctggattaattaatccgcccacacccggggggggggggtt

SEQ ID NO: 94370 - DNA, 388 bp, Zea mays
  unsure (1)..(388): unsure at all n locations
  Clone ID: MRT4577_186056C.1
gccccgcgacccgcgaaagaacggagcaggcacgcgcgcgcgcacgcgccgcgacgccgcgagggggagacgaagagcagcgcggagcaggacggcgggaggaagcccgacgacgcgcaggaggaggaggagaaccagggcaccgagaccaacaacaaggacaacgacccggccgacacaagggagaaacaggagaanggaggcgcccacgaaagaggacggcgaccagcacaaccccggcgccaagaagagagcccggacggagaccagcgcgccacccgaaaccaaggcacagcagcgagaagcgccggcgaacaaggcccaacgaaaggagcaacgagagcagggccaacagaggaacccgggaagccacaacagggcagaaaaa

SEQ ID NO: 94371 - DNA, 400 bp, Zea mays
  Clone ID: MRT4577_186058C.1
tcgcccaccctttcgtttaccggcaccaacccagcgcgggggcaccggcgacccggaccccctttccccgagagggatggcgacggaacttacaggagggcaattggtctcgaaccaaaggaacgacccggtccaacccaattaccgatgcctcccgggcaaaggataccaaatcaccttccggcgggggttattaagccccggcggggcctaccacggtttcacaggccgggaaggcaaacgcgccctaggtatgatgtccaaggacgagggcagaacatacggggacctgataggactcaccgacaaggaacttggcgtcccctgcgactgggagaacaaggtgcaggccaagtaccccggcgtggaccgacttaccggcgacgcctgaactcggtag

SEQ ID NO: 94372 - DNA, 536 bp, Zea mays
  unsure (1)..(536): unsure at all n locations
  Clone ID: MRT4577_186059C.1
tgggaccctcgaggccggccgggactgcattcctccaagccangagaggcttaggaaggatattggacccatccaccggtctgtcttctcaggtcgaccggaggacagaccaagcgcgctcgaccgtgtaggcatatgatggtgggagaaagacgcgtgcgacagaacgccatgccctaaagggcggcgatgctgcgcggcgtgcccttcgactacctctccttccgcgtccgcgtcaagccctacctccaccagcctgaagaggacatctattccgaccgtgaacaagactctgatcccgctactaccgacaccatgcaatcgaccgacgatcgcgacgtcggatgaccagaggaaggatctcagagcacttcgaaggaacgtccgtcgactgctcgactgacgaccaatgcggacgttggagagagtcattttgtcaagcatcatgtactgaaacccttacttagactgttttgctagcatgtcccctgcaaagcctcattctgacacccgtgtgtgagatcttcttccctgct

SEQ ID NO: 94373 - DNA, 226 bp, Zea mays
  Clone ID: MRT4577_18605C.1
catgaggggctgtgatacactgtttcaaaaaatcgttttagtcagcagaacaaatgtgtagatgatgacatggctaacgaatgcgatcccgctgatcgctaacaaggtgggcacacagactcaggcgaggaagaagttattgcatgttcgagaaagagacagtctatgtgaagcgggcacgagcttacacaccgtgctatgaattcttcactaaaacgaaggaaat

SEQ ID NO: 94374 - DNA, 2051 bp, Zea mays
  Clone ID: MRT4577_186060C.1
gtctgcaagcaatctacgcagcacactcgttctagaaaaactaacgcgataaggctcaagtgggtcaacaaaaaaaaaggaaggaaagaccaaacgataaggctggaggcttagctagaaaggtccctagcgccctgcgacgacgcttggtaaatagatccttttctaaagtacacttcgattttctcagtttgttgctcagtgcgggtgtcgcggtccccgctttttccaggatcacagcgttgttggacgactgcgcatctaccttcgcagttatctggaatttggagttacagtccacgttcgcatgaattggaactttcaactgccaaaacatacaattatctggattttggagttatagtccacgttcgcaaaaattggaactttcaactgccaaaacatacaagatggcagtaaaaacacttgctgaactatctctacaagacagagatgtgaccattcaagtccaagtcaacaggaaatgggaatttaaaggaaataccgatgatggtcctatcttacatgttgacatggttctaacagatgcaatgggaaatgcaatctatgctgaaatgcctagcaaattaatagagcaaaaaggttcattgttacagttaggcaaagtatactacattcgacgcttcagagttgcaaattcaaagtcacagtacaaagttctcaatgcccctctcatgatctatttgactctttactcgatcattgatctttgtcgtgatccaccatctacttttccactttatgtctacaatcttaccacgtatgatgatatagatgcaaatggaccaaaaagtaaagactttcatgcatctctatatctaaatggtggtgcagcttgccactggaatccatccattactgaagctgaaccatattatgaaaggatgaaggttgtaagtgcactgtcaccattactagaatacttgatgatcaaccgtggtggtacagagcatgtaatgcatgtccaaataaaccatccatgcaatcagcagtgtcctcatgtcgtacatgtggctctacagatgctattctgaggtacaaactgaacttcatggcttccgatggcactgctgaaatgcgaatgttctgtttcgacaacattgccaagagaatcattggaaaaccatgcgcttctctcttaacatcagctacaagcacttccaatattccaccagatttagcagcgattgtgtccctcaaattcacatttgttgttgtttacaatgaaatgtcgtttcaagtttcagaaaaagaactcttcatcaagtcagtcatagcttcacatggaagagatctaactttcccgtcacccaaactaaagattccagtgcaaccgtcaactccaacgcaactactaggtgcagcaaaacagcaagtttcaccttcttcagcactgtccaaactatcgactgccatttctccagagaatagtcctcaaactgaagacaatcttcaaaatgaagaccagaacatactggcttttgaatcaccaccaaaaagggctaggcgtaaatccttgaagtttgactgtgacaaaaatctacacgatgaataaaaatgaaacaagtctggcttcaaagttggaacttctacgcagcagcacatgtatatagcttttaccttacttggaaaaaaatgtctagacaacttttgttgatgcatcctactatatatgtatgaagtctcatgtactcctaaaaatatatgtatatatgagtactactaaacaagaactgtttgaagcttgctacaccctatggtgacaatttactatgtaatgcttacagtcgtccgtatcgctctatatacatgtgtaatagtataataatgtcccttctatatgatttagatataaataagtattaaatttccacaaaaaaaaaaaaaaaaaaaaaaaaaaaaaaaaaaaaaaaaaaaaaaaaaaaaaaaaaaaaaaaaaaaaaaaacgggcgggcggccctaataaaagtaaccaaactgtcacctgacattcaattcactggctctcttttttacatacgcccacaatt

SEQ ID NO: 94375 - DNA, 1766 bp, Zea mays
  Clone ID: MRT4577_186061C.1
cggccacgcgtccggcgcaacgcggtcgtgattgcgagtgagtccgcacgaaggtggccaactcccaagcccctaccggcaaccctagcgaggcgatggggaaggcggaggcgaggtcaagggggcgcggcggcggcggcggcggcggaggcgccagcggcaatccggggaagatcttcgtcggagggctcccgcgggacaccacggatgctacatttgtgaggcattttggacagtatggagaaatagttgattcggtgataatgaaggataggcacacatctcagccacggggttttggcttcattacatactctgaccctgctgttgttgataaagtgatagaggacaatcatgttatcaatggaaagcaagttgaaattaagagaaccataccaaaaggttcggtgcaatctagctctaaggatttcaagactaaaaagatatttgttggtgggcttccgtcaacactaacagaagacgaattcaagagtttctttgcaagatatgggactgtggtggaccaccagattatgtttgatcatgaaaccaaacgttcccgaggctttggatttatagtttttgcttctgagcaagttgtagatgatttgttagcaaatggaaatatggttgaccttgctggttcaaaggtggagatcaagaaagcagaaccaaagaaatcctccaatgcaccaccaccagtgcatgttagaaatgctaggtcagcatatgatagcggctctagagaccacccttcagctgacaactatggtggaatggccagtgcttatggaaactacaggggtggtggatttggtccttataggagcgatacaggatttggtgctaggctcagcagctatggtggggtaggtgattttggtggtgcatatggtcgttactatgcaggattaggagggggatatggagccgcgtcttcgtttggttatcctggtcgctttgggttatatggaggaggttttggtggatcttatgctggtgctgacttaagtggctatagacgcggtggaggtgatgagagcttcggtgcccctggtggtaatcctgggtttggtggtgatgctgaagagagctttggtggccctagtagttctggctttagtggcaccgcctatggtggggcatatgatcctacgctaggtggttatggatctgctagcacacctgacatgaataggggaagcttcactggaggatatggacgatatcacccatatggataacaagaagagcccttgaaggcttaacacttgcatgcacgtttgctgcccgtcattggagaacacccaccatttctggacaatatccagctgcctgaagcttcaagaacaacttaatgtcatgtgtacatgttttctcgttcccgtgagctttaacttatatatcctatagcatgtagtgtgatccagagtagacgttgtatcgaaggttattgtgtttggcataatatagaattctggtatactttgtagtagtttttaagcttctatgtaagcatactccatctgggagcagattagctgtgtgaacgctaggagggccagtctctaccacttagcattgtacctgatcaagttattcactcttttggtttacccattgagagcattgtccgtgatgtcctccttggttcacctagtattagctgcccttagctggggttgaggagattatgagataaatgacatttgtgctccaaaaaaaaaaaaaaaaaagcggcctaagtttatcttcattagctggtc

SEQ ID NO: 94376 - DNA, 609 bp, Zea mays
  Clone ID: MRT4577_186062C.1
taggggccttttttttttttttttttgggtacaaactagctcggcatatgtgagataaaaaataaataagattacaggtgactcctggagatatgaacacatgcctgtacgactcagaattcgaggccgcgctccctgggaaaatcgaggagaagctttatagcggccattggtagagagaaacctccctcttgtgcgatagacaaacttggtgatccctttctccaagaaagacttgggaagctgctcaccgatgttttgaggtatttcgattcctggcccaggtgagaattcaaatttcttggagacagatttgagcatgggttaatctgaagccagatcaccttgatttgtgtcgtcacatgacttgaatgtacagatgtttgtgtgaacggaatacactcaacctcaggctctcagtggtgtcacttaccttcttgaccacgtgtatgtgaagaacaactcattgccctctgtggagtggacaccttgaccttggtgacgaccgacctccccggcgtattttcctcctcggacggtcaagaatgggacgaggatggttccctacacgaacgacgcataggagtgggtgccggcgatgggctgcga

SEQ ID NO: 94377 - DNA, 595 bp, Zea mays
  Clone ID: MRT4577_186063C.1
ccccgcgtccgatagtttcagatgtcagtttgaaacagacatgtggcctttgaagagttttagatgcttcttgttctgagaattgctctaggccagttcacgtcgtgttcttcatgtcgtcccatgagaatataacgaaggaaacaagaagcacattaatagaagtagcaagatcacagttcatatcagcatgacattcatgaagccatcccggtttctaggattcttgttttgctctgtccatggcacgccaccaacattcatcccaaaaactgacattttttgcaacataaatcaggtaaacgagagccctggaaatagcaggaattaattcaggaaagtacacgagcaagtaccaagggtcaatgagcttaccttaggaaggaatatcatggagagaaatgaaagacaggtttttttgtctccagttgctctacacagtaagtctatgaggaaggagcaaaagaagttgctctttcagttgtcagcggaattaatttaactcaagcatacttgcctatgggcaaacaagtagtggacttacacaatgatcgaaaggacagagtatagtatgcttgacatctatgactacata

SEQ ID NO: 94378 - DNA, 857 bp, Zea mays
  Clone ID: MRT4577_186064C.1
ccggccggggtcaaacaaattcaaagctgtcgcacccggccggcaatgggtctcgtcgtctccgccaccgcgtcctgcagcgatatcttcttcagccgacgccgctcctcaagtccgcctcccccagccgcggctagcactcccccgcccacgtacacaataccggagccggccctcgtccgcgtgttccgccacttcgacgcggacggcgacggccgcatctcggcggacgagatgcgcgagttgtgcgggtgcacagccgtggaggcagacgagatggtagctgtcgcggaccgcgatggagatgggttcatcagcctcgaggagctcgaggcgctgtttgaggacggcgaccggtcagacacgttgcgcgctgcgttcgccgagtacgacgagaacggcgacggcgtgatcaccgcggaggagctgcgccgcgctctgtggaggctggggatcgtcggggaggagatgacggccgagcggtgcgcagagatgatcgcggtggtggacatagacggcgacggggtggtctgcttcgacgagttcaaggccatgatggacacggcggcggcgtcatgaaccatacgcgcccggcgctctgcaccacacgtgtacgtgtacgtctgatattgttcgtcgacatgataacaccctaattagcagtaaacccattagttttagggtttcacgttctagtctagttcgagattggtttgtgatcggattaaagttttgcgttgtggcgccgtgtgcaattgatttcgatcatttcctttaatttcgcacctgttggatcgttagaaagttgaaatgaatgacgtatagaatttcagaaaaaaaaaaaaaaaaaagcggcc

SEQ ID NO: 94379 - DNA, 189 bp, Zea mays
  Clone ID: MRT4577_186065C.1
catctacccatacacttccataccttcataaatacacaacctatatcctaaatcacatcaaattgatccataaatcttactccattcatacaactcactaatataaactcatttatcttacatcaaccacatattaatcaaacatatatatatcccatacaaacttaacatcaatactaactactcatt

SEQ ID NO: 94380 - DNA, 468 bp, Zea mays
  Clone ID: MRT4577_186066C.1
ctgacattcagctaggatggatactgcaattgtgcgaccgacatatattgacaccaaaacgcccctgatgtgggagaatatcaaatcgattgggttaatagatgaaatataagagcgacgacagtggagacacacaggcagtggaccaaggacgtggaggcatacaggaggaaagcagcagcagcagcaggcgaccgcaaaaggtgacgatcccaatcctggcggaccctttgagggactccatccttcagctgcatatggtggaccccaaaaagaatgacatgggggaaccaaaaatagattcccgcgcgctccatttaaaacggcccgacagggaaaaccaggtggtcaccaagtaaaaggccattacaaaacatcccatttacgagggggtgggaaataacgaaaaggtcctcaccgacggcatttataaaaagatggccgccatgaatggcaattggaaccccc

SEQ ID NO: 94381 - DNA, 545 bp, Zea mays
  Clone ID: MRT4577_186067C.1
cgggccctaggccgtcggcgcggcgggggcgggcgcggagaggccccggcggaagaacgtgcgcatctcgagcgacccgcagacggtggcggcgcggctgcggcgcgagcgcgtgagcgagcgcctgcgcgtgctgcagaagctggtcccggggggcagcaagatggacacggcgtccatgctcgacgaggcggccagctacctcaagttcctcaagtcccaggtccaggcgctggaaaccctaggcacgacgacggcgaccaacgccaacagcagcgcgagcgccaccaccagcaggagcagcgcggcgagcaggtcgccgcagtacaactattacggcggcggcggcaataataataatcctgccggctttcttggattcagtaacgttatttctccggctgggtatgtaaatccgggtggatcgtcgtcgaatactggcagcaacaaactgctgttttagtgactgttcttgtgtgattgttgtttgtcgtccggagcggacgatgcacatacacatgcatgcatgcatgttgctgtttcac

SEQ ID NO: 94382 - DNA, 320 bp, Zea mays
  Clone ID: MRT4577_186068C.1
gagaaaagaagccaagtttttaaatgacagcctttcagcaatccaccctttcttaagggggagggatataaacttaaacaccgaattcataggggggggatacaatacaactcccaatggtttttagttttttgttccacgcacaggttttaaaagggcattcaaaaccaacggggagcttggcatcaaatgcttgtaaccctcgggcaccatgacgggattaagggttggaggggtgaacttaacacaccaagccttgagctttggggaaccgggctgtttttccaggccagaggcggcgctggtgtctccactggggg

SEQ ID NO: 94383 - DNA, 400 bp, Zea mays
  unsure (1)..(400): unsure at all n locations
  Clone ID: MRT4577_186069C.1
gctgnnnnaagctaacatatcctttcaatccacataagttcctccagagcttggttactcagttctatacgaattcctgtctgcaacaaggaactactttagatgtagctcaactgaagaggatggtagcaaagcgaggaataattgaaganttcacgaagcaagtngatgggaagaggtacctactcgtcctggaaaacatgtgcacgatgggagagtgggacgctatcagggcatgcctgcctcacaggaataagggcaactggattatcgtgtccaccgagcaccatgaaatcgcaagtttgtgtgttggacattcataccaagtgttggagcttaacagtttcagctgagtacctgtngcgcttcttcagggacagagactngagagtattctagc

SEQ ID NO: 94384 - DNA, 334 bp, Zea mays
  Clone ID: MRT4577_18606C.1
gtggggggttttttttttgggccgcccaaatggcctactttactgaacaaaaaaatggattggcataatggggctcgaaaatacctttacagaaaaactttttatggggtgaaacagggtcctctctcattacatgtaaacaggggttaagtggcctctaaatggttttgggcttggtgtaacaaatctattttttctatggggccttaatttcaattttggctcgaactttttttcctctttgtgggggttctttaccttccgtaattggggtctgcttgccacataaccataggtgggaggtgttggcaacaacccattaggtggggacctc

SEQ ID NO: 94385 - DNA, 245 bp, Zea mays
  Clone ID: MRT4577_186070C.1
agtatgcaaaaaattccaatcattggaacctacaagtggatgttaagcttatgacacataacttaacatactttgactaccttatctccaaaatatagccactggcaactagctctaggaataatgaaaaacatagaagaaaaatatggagctatgcgctcacaggaagaagaaaatgtccatgtcaataggaaatgtccagacggacaccgacaagcccatatgccttcctccaaatccaatac

SEQ ID NO: 94386 - DNA, 248 bp, Zea mays
  Clone ID: MRT4577_186071C.1
aaattgatgcaaattttgaaaggtggatgtgcagagaacagattgctggataaagatgctctgctaaacatttgcaatcgtgggggcatcaggaggtagctaacgtgcaaaacgaggtggtccttgctcagtaggcgatgcataggctggaaacagcgcatgacaacagaattttgtcaggagatgaactctgcgtgctaggaaagctaaagaaacactgttttgttaatgcttctatggaaagaata

SEQ ID NO: 94387 - DNA, 808 bp, Zea mays
  Clone ID: MRT4577_186072C.1
cccacgcgtccgcaagcaagcagaaggtcaaaacacaagttcatgactgagtcgatttcaaacaccactgcaacaaatgaacatcttagacacttggctatggaccgtaggtctacaagagatgaatgcatgaatgccatatcaaatcaactaaaagatattgaatcccttgaagctgaaagtgacgcacatggagataagagcctagagacggctcttatgtggtatgataagtttcttggttttcaagttgttggaggagaaggggtgaaatttgtgttcaacaaaattgatgtgcaaaatcctgacaagaagtattctttttgcataaaacttgctggagaaagatacatcttagtctggtgtgttccatctgtggacgatgctgaagaattggtgaaggatcttaactgcagcaatgatctgtacaaatttgtgagggccatgagagagatgttccaggctgctacaatcagtggaaatctgttgccaagctccttttgccctgacgtatcatccataacatcttcatcgttctcagcgttatcactggattccagaagtgaaaaatagcattaatcagagtcataccatgacacttgacttagcaatgggctgcggatatctgtacagtacaagttgaagcacttctgaagccctcttctgttacacacgctagcagtgttgtataatgcttgtctgctgcttgcatttctgactccaaacttgtcttctattacctatcattcttaataatcatggtaatgtttgagccaaaaaaaacctgcagcccgggggatccactagt

SEQ ID NO: 94388 - DNA, 751 bp, Zea mays
  Clone ID: MRT4577_186073C.1
gacggctcttatgtggtatgataagtttcttggttttcaagttgttggaggagaaggggtgaaatttgtgttcaacaaaattgatgtgcaaaatcctgacaagaagtattctttttgcataaaacttgctggagaaagatacatcttagtctggtgtgttccatctgtggacgatgctgaagaattggtgaaggatcttaactgcagcaatgatctgtacaaatttgtgagggccatgagagagatgttccaggctgctacaatcagtggtattttatgctacatattctcgttacgtgttttgtcttcaatcatgacataggttccaagctcaggactattgggcatggtttgcggtagttttttttaagtcttttgaacttagttagttatttggtggtttgtaaatgtagcaaccaactcgtcgttattatttatttggagttatggtttgcgttttttttgtgtgtgtgtgtgtgtgcaggaaatctgttgccaagctccttttgccccgacgtttcatccataacatcttcatcgttctcagcgttatcactggattccagaagtgaaaaatagcattaatcagagtcataccatgacattgacttatcaatgggctgcggatatctgtacagtacaagttgaagcacttttgaagccctcttctgttacacacgctagcagtgttgtataatgcttgtcttctgcttgcattttgactccaaacttgcagttttgctttttgtaa

SEQ ID NO: 94389 - DNA, 995 bp, Zea mays
  Clone ID: MRT4577_186074C.1
ccggccgggaaaaaaaaaaaaaaaaaaaaaaaaaaaaaaaaaatgtatggcttttgcaatcgcacacctaaataccttgtgcttatactccttgttacctaaatatgctcactgcattgcccaaaaaaaaaaaaaaaaaaaagaccgaaaacagagcgacaacttcatcaacgaaacgatctcacccccaacgcccagtctctccaccgtcaacacacccagagaccatcacgacaatcggcaaaaatggcggacaacgactctcccgtcaccctccgaactcgcaagttcatccgcaaccctctgctgggccgtaagcagatggtcgttgacatcctccaccccaaccgtgccaacatctccaaggaggagctccgcgagaagctcggttccctctacaaggcccagaaggaccagatctccgtcttcggtctccgaacccagttcggtggtggcaagaccaccggcttcgctctcgtctatgactcccccgaggccatgaagaagttcgagcctcagtaccgattggtgcgcgttggcctcgccaccaaggccgagcgtgcttcccgacagcagcgcaagcagcgcaagaaccgacaaaagaccctccgaggtacggcaaaggtcaagggtgccaaggcgaagaaggagaaataaacgactcgatgacttggcttgggcttgtgtatatcctcgggctggttggggagcggctgctgttatgtctgcagctgcgtgcattcggtggtcatgcgggtgcgtccatttactacggtccatcctcgtcgtcggcgccggctttggcatagggtacagggacttgctgggcggacgcgggggctatctggactcgacgagggggattgaaggctatgctttcaccttccttgctcaatacactagcatgaaatcaatggtctttttcgggtttcggaccaaaaacaaaaaatagcaacgtctctgattttcacgaaaaaaaaaaaaaaaaaccgcgg

SEQ ID NO: 94390 - DNA, 246 bp, Zea mays
  Clone ID: MRT4577_186075C.1
gacaaccccaccgataggtcatgctgctgcgatggcgtcccggtacgacgggtggggaggctgcaaatacgccagctctctcttcaacggcatgatacgtctttagagcaaagcccacatgctgaccagactgagctcttccttcttgtaataaacacggcatatctcatgctcgagaacacatatccgccaaatcttcaagcactccactcctgcgcgctgtgctccaaaccactgacccaccac

SEQ ID NO: 94391 - DNA, 424 bp, Zea mays
  Clone ID: MRT4577_186076C.1
gtaccggtcagtacttcccgggtggccccacgcgtcaaataaatcagtcccagcagcgcaagcacgcagcccccaacacacgcctcttctcttcatcgctctggccacagggcatgcctgcaggcatgcctgcgacgtcgatgagctattggcaggggcttacgagttaggactcttcattctgatgggtgacagatcgttgtccttaagaatggtgtctacggcatcaaaggcataatataggtaggcaacatttctttttttctttctgacagctgtgtatttatgatgctattgggtatgcttgataaaatagtggaaccctaaaccccaaaaaaccctaaacccttattgtctgtttttgagctaatgtcacacatttggtacaagaaattctgtaaataaaattgcgaaatatggcaac

SEQ ID NO: 94392 - DNA, 400 bp, Zea mays
  Clone ID: MRT4577_186077C.1
ttttatcattgaaccataatatattaatcctaataaatgagatggctgacctttacctaaactttcagataaccaaacgttaggtaaaatagcacacaccgcagccatgtttgcatattaaataaaatgactctaccctacaggaccaaaatagcatatgaagtacatgacagttacttagagaaaagccctaactgcataagaaaaacaaatgcttagctgattatagaattttagtgaaaatgacgaaacattctgctctgcagaggggcataaactagcaccaccagaataaacttctaaggttacttcctctacggcttatatataccaagatttgtttattttactggacattggttcacctccaagggccacatatgttgaaggtggacaaacc

SEQ ID NO: 94393 - DNA, 303 bp, Zea mays
  Clone ID: MRT4577_186078C.1
atttcgagatagcccgtgacctaatccgccatcaaccgcagacgcctccgcctctcctgccgccgccgcctcctcctctcctgctgccgccgcctcctcctctcctgctgccgccgcctcctctcctccacttctctcctcctcccgtcgaagacctagcgcgtggtcgttgttgccactcgcccctctcctgctcccgcgtcttcgaccccaccctcgccagctcccgatgctctgtcgagtggagaagaggggtgcggcagagaaggagaccagaggatggcgatgggggaaggagcacca

SEQ ID NO: 94394 - DNA, 918 bp, Zea mays
  Clone ID: MRT4577_186079C.1
attgggtacctcgaggccggccggggtccatcctcagaccctacaggcgaacagcctcccaagcgacagaacagcctcaggaggcacccccgcggttagtctcgaagcttccgttcggaaccagggttagggtttcgcgtcctcccgtcgtcatcctcagccatgtccgggcgcgaggtccgcgagtacaccaatctcagcgaccccaaagacaggaagtttggtaaagggaaggataagatcgacgatgaggacatcaccttccagcgcatggttgcaaagatgcaagaggttgctggtgataggggaggctaccttcacggacgaggagcattggacagcgatgatttgctttacctgaaagagcaaatggaagctgaggaagatgcagagcgccttcttcgtcatactgagaagcgggcatttgctgcttttaagaaagcagcaattttagctgattctacacctgctgtccctgtggctcttcgtgttgaacctaaacctaaaagtgatataaggcaacaagatcttttgaagaacattgttgggatcaaaccaaagcgcccaaaagttagcagcccttcacagccaacagatagcaataagcctaaacatacggaagaagaccctgtcagcgagttgtcgtcatcgcggaatccgttgggaccatctcatggggctgtgaatcctgaccacacagcgccaaggttagatgaaccaacagaggtgaagcaacagaacagagctggaagtttgcttggtttagcttatgagagttcggatgaagaatagttgatcatgcgattccaatgggaactggactatttcttgtcagatgtctgcattccaaacgacagaatgtaggttgtatattaggtttttttaatggactattattaggttgtgtttttgaaagac

SEQ ID NO: 94395 - DNA, 1107 bp, Zea mays
  Clone ID: MRT4577_18607C.1
ttgggaccctcgaggccggccgggaagccgttgaacgcgttgggcggacacacccggcgcgcctcccgcattcttctagagacccccatcccagccgccagttcccggacaccggattgctccccaagacaagcccaaatctgggaccataaacaaaccgcacccgagcggcccaaatcgggatctgacggcaattccccaattcgattccatcccatgggttggcgttggcacgacgacgacggtgacagcggccggggcctcggcggtgtccctgacctcgctggtggcgggggcgatggggcgcagtgcgccacgcgacgggtggtgcagtcccgctgccacacggaggaagtcgagcccggccgatttgtccgcaagtgcgagaagacggagcagctcctccgcgactgcgtcggcaggccctctgaactggtggaatccaaaactgaaaacactgaagaagatgtcacagaagaaatgaagagcggttcactttctcttgggtttccaagaaacgagcccttcgcattccctggactccgcagtgacatggaagcccttgagaaagacttctttgggagcctagggaacgtcctggatgaagctgagcggatggccaacagcttcgtcagatcttttggttttccacctgctcatgacagcggatcaagtccatttcgaagacagcctgcagagaggcatattgaggaagataccgcaaagaataagactgagagcgactactcagaattcaggagcaagatttcagatgtgtaagcagctgtagagctgcagttatctggcctgtgtccacagagctgaaacctgagaagtgagagctttgcaatctcacggtccttatatgtttctctttggaacaaaataggtacttgcggcctgcaggtgctgtttagcctcgcttagtatggtaatcgtaatggtagatgaagtgatttgcctgtcagaggtgaggagtattatctgttatgttcggttttgcagggccattttgtacagtactttttgcagacccagcatttgaaatgtttgcattcttgcgcacaggcaatgtttggagcagaaagtttgttatgagctttcccc

SEQ ID NO: 94396 - DNA, 642 bp, Zea mays
  Clone ID: MRT4577_186080C.1
aattcggcacgaggtctactcggtggttgataccaacagatgcaagaggttgctggtgataggggaggctaccttcacggacgaggaggtatttcatgcttcttttataggaagacccctgtaaagtttgtagctcccttgttaaccttgttcttcagcattggacagcgatgatttgctttacctgaaagagcaaatggaagctgaagaagatgcagagcgccttcttcgtcatactgagaagcgggcatttgctgcttttaagaaagcagcaattttagctgattctacacctgctgtccctgtggctcttcgtgttgaacctaaacctaaaagtgatataaggcaacaagatcttttgaagaacattgttgggatcaaaccaaagcgaccaaaagttagcagcccttcacagccaccagatagcaataagcctaaacatacggaagaagaccctgtcggcgagttgtcgccatcacggaatccgttgggaccatctcatgggactgtgaatcctgaccacacagcgccaaggttagatgaaccaacagaggtgaagcaacagaacagagctggaagtttgcttggtttagcttaatgagagttcgatgaagatagttgatcatgcgattcaatgggaac

SEQ ID NO: 94397 - DNA, 1202 bp, Zea mays
  Clone ID: MRT4577_186081C.1
ccatcctcagacagaacaggcgaacagcctcccaagcgacagaacagcctcaggaggcacccccgcggttagtctcgaagcttccgttcggaaccagggttagggtttcgcgtcctcccgtcgtcatcctcagccatgtccgggcgcgaggtccgcgagtacaccaatctcagcgaccccaaagacaggaagtttggtaaagggaaggataagatcgacgatgaggacatcaccttccagcgcatggttgcaaagggattttggttctctactcggtggttgataccaacagatgcaagaggttgctggtgataggggaggctaccttcacggacgaggagcattggacagcgatgatttgctttacctgaaagagcaaatggaagctgaggaagatgcagagcgccttcttcgtcatactgagaagcgggcatttgctgcttttaagaaagcagcaattttagctgattctacacctgctgtccctgtggctcttcgtgttgaacctaaacctaaaagtgatataaggcaacaagatcttttgaagaacattgttgggatcaaaccaaagcgaccaaaagttagcagcccttcacagccaccagatagcaataagcctaaacatacggaagaagaccctgtcggcgagttgtcgccatcacggaatccgttgggaccatctcatgggactgtgaatcctgaccacacagcgccaaggttagatgaaccaacagaggtgaagcaacagaacagagctggaagtttgcttggtttagcttatgagagttcggatgaagaatagttgatcatgcgattccaatgggaactggactatttcttgtcagatgtctgcattccaaacgacaggcctggtgtattgatgagagctctcactgagtcatcctcaggttacgggtttgaaacagcgtgggtttggaacagtcagtcaccaggtcatgccaggagtttgaaacattgtgggtttaaaacggccttccttcatatttgcagaggaaggctgcctcattttatcctctttagtatttagctgtgtaattggttttataattagattatatttaatattcataataaacattcaaacatccgatatatatagactaaattttagtgctggaaccaaacatcccctatattacagtacatcagtttgagggtttgaagaaaaaaaaaaaaaaaaa

SEQ ID NO: 94398 - DNA, 522 bp, Zea mays
  Clone ID: MRT4577_186082C.1
tgattttgttggtggctattgagttgaaggatggcatgtcatcttatttccgagaggcttctcaaattagtgcctcgggtatccttgaatcattgactactgaaaggtgtttagagaggatctctttggagcgattagaagtcctaggtgatgctttcttgaagtatgtagttgggcgtcataactttatttcatatgagggacttgatgaaggtcagttgaccaggagacgttctgatatagtgagtaattcgaatttgtatgagttatcaattagaagaaatttgcaggtatacataccggatcaacactttgatcctattctaattctggcagaaggaagaccatgtaaagttgtttgcaatcctgacagagaagcgactttacacccaaagaatattgacccagatagacgggaaaactgtaacttgaggtgtacaaaatcacatcattggttgcactaggaagacaattgcagatgttgtggagtcacttcttggagtttttattgttgagtgcgga

SEQ ID NO: 94399 - DNA, 207 bp, Zea mays
  Clone ID: MRT4577_186083C.1
acacgcagacgaaaacggatatagtcaccagatctccaccgggaacctaccgagcatagcatggacggggccgtctgccgctcgtcacttacctgtgtgttttgcagtccgcgcctgcgccgtcctgcgccgtccagccatatgcctctcatactaggcccgagtggcttcgcaaatctcgcctgcaccgatatagcgctcacgcta

SEQ ID NO: 94400 - DNA, 383 bp, Zea mays
  Clone ID: MRT4577_186084C.1
ataattgggttttttaaatttttttgggggtttttacaatttgttttttttatatgagtttattttaactataaattggaaaaatgaagggccccaacgcaaaacatgtggagatcaaaaaccacaccgaaaacggtttgtattagcacgaaaaaaaaccgggacaccaaaagaaacccccaaccccaaggggctcggggggggggaccacgaaggaccttaaccgcacgaacggggggaaaaaaacgccaccgaaagaacggggggtttacaaaccaaactactcaacccacagcaccccccctttagcctggggataaaggcacgggggaccaggaacccggggcccgcccccccggggggcttgaggggacccttacggg

SEQ ID NO: 94401 - DNA, 168 bp, Zea mays
  Clone ID: MRT4577_186085C.1
cagcttgagaatgaattcaccttcaatcaagtttacattatgttgcacaaaaaaatagaaattattctacaccacgcaaagaattgaaaccacatgaaatgacttatgggggatggtgagctgtgactgctttgctgaccactttggatgccattgtaaataaaggtt

SEQ ID NO: 94402 - DNA, 434 bp, Zea mays
  Clone ID: MRT4577_186086C.1
gcgcaaacaccaacccgatacgcacaccagtgaggggtgttggctggccttgccctctgcctcgtcctgtgcgtctgcgcatgctgagacgctcacactgccatcgccatgacgagaggcggctgggcgtgctggcatgcacacgcgcacgcgcacgctcgatgtcactcgtacgcgcgcgcgcgatcgcgatcatgctcacgctctcgagtctcgaccatgctcacgctagcggtagcatcaccccaccgccggtccacctgccgccgccgacccacctgcgcaccgccgatccatgtgccgccgccgatctgatctgcgcgaccacaccatgtacactaaccctactcgaacccggccctgggctcagatctcatagcccagaccacacgccatgtcccgatgcacacacagatcgctatcccaagccccga

SEQ ID NO: 94403 - DNA, 198 bp, Zea mays
  Clone ID: MRT4577_186087C.1
atgagggggcagcggctgtacgactccctcaaggccctctccgatgtgtccaccccattgaatccattcctcctccatctcgccatggtggacatgttggtgctcttcgaaaccccaccagattttgccctattcaaggcgctcgacaaggggaagctcgataaggtcgaggtgagtgactgccgctgcattttctaa

SEQ ID NO: 94404 - DNA, 325 bp, Zea mays
  Clone ID: MRT4577_186088C.1
tcgctcccgcgttatggtgtcgctgatggacgacgtcaccgccgagatcttcctccgcctcccgccggacgagcccgagcacctcttccgcgccgccctcgtctgcaagccctggctccgcgtcctccgcgacccctccttccgccgccgctacagcgtcttccaccgggcgccgcccctgctcggcctcctccacaggctccaggtcttcgaaggagaccccgccgcccgcctcgcccccaccacagcggcgcccctctcgccctaccccgacctctgccgcacgcgccccctcgactgccgccacggccgcgtcctcctccac

SEQ ID NO: 94405 - DNA, 523 bp, Zea mays
  Clone ID: MRT4577_186089C.1
atttttaggtccacccaggcgtacggagaccaacttgaaacatttaaagcacaattgtgttccaactattggctcttcaaatatttccgcctgggtatggggcgttggtctttttgcaaatgctggtacggcgaccatttttccacaaagctcacaagctcctatagcttacctttttcccccgtacctataaccaacagcggtctcggggttgtgaaaaccacaattttttaaccctacaggatccaacaggcaatcggagctgggattttacctttttaacccttgttcctccaacaattataagcccttatacagcagttacctttggtgcatttattggcacaaaacattagggcacatcaactacaacaacttgtgcttgcaaaccttgttgcctacttttaaaacaggagtttttttcattaaacccaacacctgcattgaactttgttttttattgaacaacaacaactaccattaagccgcttattgttgcctcccccagcattttttcctttaa

SEQ ID NO: 94406 - DNA, 461 bp, Zea mays
  Clone ID: MRT4577_18608C.1
gaaacccaattaaacatttttttttttcaaatttttaagggggcatgaactaaactttagggggggggggggcccccacccacaagcccccaagggccagcattaataaaggaagggggggccttttctcagactcagggccccaaacatgaataatccaatggtaactggccttacaatccaatggggaaaaaaatttttttgccggccctgtttgttaaagggcccgtttactaacaaagcccagcccaaggggcgaacaagcggggacaatcgcattgggggcctgatcattttatttggactttcccaacacttacaagcttttgaattttttgcataactccaggggtttttaggggctcctgggccccccttgggttttcctggaaaaatttaacacctttcttatgataggggcggaaaaaatgttctggatctctggggcttgcataactttg

SEQ ID NO: 94407 - DNA, 244 bp, Zea mays
  Clone ID: MRT4577_186090C.1
cccacacgtccggcgagagatcttatctttttcgcccgaacatgagggctaagtggaaggagaagattatgaggaggctgaagaggaatcttcctaagattaggcatccatctaagtagatcctgatgcagtgtccttcatcaagtggaagatagttgattggtctttcatcttcctcttggtttttcctgttatgtctggccctaaaatgcttaggcatctaaatttcctgtttttgaacttt

SEQ ID NO: 94408 - DNA, 217 bp, Zea mays
  Clone ID: MRT4577_186091C.1
gggacggcaaaacccagtgggtgggtacccgttgccatctctattctcacatagtaaaccattgggcaaacaagcacacaactgacgatcagttcactgagacagcagggcaattacactcccagcataacagaacaccgtacataagtgacccaaacactcgactagccagtggtctggcagagttgtttgttgggccatcatcacatattttaca

SEQ ID NO: 94409 - DNA, 603 bp, Zea mays
  Clone ID: MRT4577_186092C.1
tttttcacgcaacgaagttcactttattactttaggaaagcagcaccgaggcacgatacatcgcgatcaacgtgcgtcacgcacgatgtaatgagctgagaccctaatcacaaacatgactggccacctcgttgtgaccttccagcgggtcttctcgcccttcatccaaaagcaaatctccctcatcagcagcgccaccacagctcccatgtgaacgccgaaatcgatgatatcctagatgcggcacgaagcaacttgatctcgacctcggtggcctcttgcgctgcgcgggaaacgtcgcactccccgaagacgcctgaaggaaagggagaggagacaaagagctcggccgaagcagcctaacatgtggcaatgtgatcgcctcatcggcgacgactaccctacaacaaaaggagaaagggggaaaatatcaaagcttgagaaggggttggataaactcataggaggaaacttaccttgaccatggcccgtggaacgcgacagcccaagcaacctgagatctgtcaaacaacccggtcagaggtacgctcaagaagggccaaagtacaaggaagcaaagtcgccaacagcaaactacgaccg

SEQ ID NO: 94410 - DNA, 257 bp, Zea mays
  Clone ID: MRT4577_186093C.1
ggagagctgaatcttctgctcggtgccggcctggctgaaggtcgcaacgccgggttcccagttctcgcatgcctggagccaggccaacacgatccttgtccccaacaagcagtgtaagatgaaaccgagcgcgtaccacagccatgacctgacgctttgctgtggagcccgcttgtgatcccagatctatgagcctgttctgatggcgaaagttcagattacattgtcacttgctctatgcttctcatttgatcttt

SEQ ID NO: 94411 - DNA, 359 bp, Zea mays
  unsure (1)..(359): unsure at all n locations
  Clone ID: MRT4577_186094C.1
gtcgcgtggcagagccgcgccgccrgcaactgcccacrcmattgacamgttccaaccatcvgccgaaccgcgtgtccsaccgsgkgtgtkkgccgaaaaaagaakgcttgggaacagtcbgattgacggaccaaagaaagcatggcagtacccgtyctctaatagaccacraaagaataaatccccwaagtgaagtgtcaaagtckggtggaattgctccttgagwgttaaagwgaggtktctaaaagtgtgtttattagtcytttctaaaagactctawtwgtgwgttgtgagttgtttacaaaaagckaaaagggbtbtccycyaaaattgaaaakscaaangggaggtttwtatkg

SEQ ID NO: 94412 - DNA, 507 bp, Zea mays
  Clone ID: MRT4577_186095C.1
cgcgccctggctcccgggcgaaccgatggccctctacttatccccccagcgcaaatccgggctctcctcctggcgctacaagccttggccttccgcggcaccgggattggcgctgcctcccccgagctggggagggcctgcaactactagctgtgctggggttttccgtggggagtgagcggtcacctcctccagggcggccagtacccggaacacggggacgccctggctcctggttacctagacgttgaacaagcttacgcgccaggtgaggttctgcaactcgcagagaactcagagagggataacatgaagactccaatccggccgctgcacatccaggtcggcgtgcgcaacgacgaagagcagaccaagctggttggcggtgccaccagcgcgagcggcggcggtatgcccactatgcactatgaactaccgaccaagaacgctggctctaccaaggctaccacctgcaaaggacgactactagcagcgctgcccactgca

SEQ ID NO: 94413 - DNA, 838 bp, Zea mays
  unsure (1)..(838): unsure at all n locations
  Clone ID: MRT4577_186096C.1
atggcgtctctctaccactcctccctcccgctctccccgccgtcctccagctgccatggtgttctctccttggcccctcgaaccgcggcgcccttcgtctgcctctgcagagcgccaccgcaagacgaccacgacgcggagctcctcggcgcgctccagtccaacggcaacggcagcctcctcagagaacaacatcccgcgtcagccaaagttcttgagtcggcctctgcggaattgggtgacggcggcggcgggaggaggagctctcaggctcagctccgggcgcgtgactgcgcgaggcggatcatgagcctccccatggaggagcgggtgaaggtgctcgacctcctgcagcgcgacgaagcggcgctcaccatctctgactacaacgacattatctccgcgctggcgaggggcggggattacgactccgcggtcgcgctcttcagggcgctcgagcccaacggcgtcgttgcgccggacgcccactctttcgccatcgccgtgcagtgcttctgcaggaagggcgcgcccgacgaggcaaaggagacgcttgacgagatggtggctcgcggctacctccccagcgttgccgccttctccgccgtcgtgggctgcctctgcaaacgtggacgcgtcaccagggccatggaggtgttcgacaccatgcgtaccgtcgggagcgagcccaccatccgcacgtacaacagcctcatcggcgggctctgctacgtcggncgcctcgaggaggcgcgggacctcctcaaaacagctcaggactcngcccagcagacggcggacatctacaccttcaccattgtgctggacgggttctgca

SEQ ID NO: 94414 - DNA, 303 bp, Zea mays
  unsure (1)..(303): unsure at all n locations
  Clone ID: MRT4577_186097C.1
gcaaccgaaccttaccatgcaccatagactctttgcgccagaggcagacgcacagcgggccgancagttcctacctctgcggctctccctcttgccaaatccccccacataattcttctccctccccgtctcctctcgcgctcgcgcgtggtgaggtgaggtggagttccgaccccgaggccgcaatggccacagcggaggtggtggtggccaacggctcgtgcggtgccgacaccaaaaccgtgtttaaggagatatacaccaagcccaagcatgagatgctctacgaccccgccttcgaat

SEQ ID NO: 94415 - DNA, 627 bp, Zea mays
  Clone ID: MRT4577_186098C.1
ggccgggcaccaatgctgcctggtgctctgcggcaccaggctcgatctgggcccaccacccggcggcgtaggcacgccctgaaggtagggtggcagacttcgccacccacaagcacccaggtctgtggaaaggggtgatgacgaagacatgcagactcttgcaagccacactggcagtgtgatgggcaaggctggtttggctggtaacgaagcaccgaggggggaattccctatcaccgctggcacgcacgggccaaacagggggagtgctacagatggacaaaagcgacacatagctggagaatgaggcactacaacaagagaggaaaattaacacatcagagatcccgagacatacaggtagcgtgagaatcaaggaggaccaggacataagctgaaagaaaacattgcaaatggagctggaagatggcccgaacaagaacgctggattggtcactgaagagccttggaagccgaagaacaacttggctgaatatgatcgcagaagatggtcataaattacattgttgcctgctaatacatcgcaggcacagccaagctacatctgtaaatgcatgctagcggagctaacacatgaaattgtgcccgactctatggacccacaga

SEQ ID NO: 94416 - DNA, 135 bp, Zea mays
  unsure (1)..(135): unsure at all n locations
  Clone ID: MRT4577_186099C.1
nnatnntcccgggtncgnacnccacgnncgtccgcaccgagtaaggatcatgccaagagcgagacaggcctgtagaagggacggaaacaatgaagcgcagctggaagtcagggaagaacaggagcgcaagcacct

SEQ ID NO: 94417 - DNA, 314 bp, Zea mays
  Clone ID: MRT4577_18609C.1
gagcctggacttccgggtgcactcacgcgtacgctcaggattcggctgtcgctactttatcaccaccactactgtgcttgcttgcccctttcccttgccttgtgagaccataagagaagcgagtcgtcgttcgcgtggcatatgcccttgtctgccgccgggcttggcttttacggtccgctccagtgcctgtcgaccgccatgggtgggctcgcggtgaacaataatggagtcctttatctggagaacattcctatctaggaggtgttccagcagctgaaatgcatccgcgaggggctgtcctccagctaggg

SEQ ID NO: 94418 - DNA, 503 bp, Zea mays
  Clone ID: MRT4577_1860C.1
gcacaaagagtcattgtaggacagcaataaactaatgagaaggaggtagtaaagaaggtaaggaatatagcctaagggcggtgatatagtaggtggtgagatctataaagctctgagtggttgctgttatttatttactgtgctgattgaaaccgaaaaatataaacaaggcaatgtcgataggcggctataatatactagtgaggtagcgtcgagaaagagacggtggtgctataacagggactcgtactgcagctcgcggagcagcgagtccttgggtgtgaacgtcgagagcaggggtcgtggccctggttgttagtggcagataaacacgatgttatagaaaacaaataggtttactatactaaataagccgtgaggctgagcccggcaggtgctccgccgcgcgaagcctgggaaatgtcgaggggctagtacgcgcagcaaactgttgacactttaggtaattgcaagcgtgttaattgccgggcaagatgtaagtt

SEQ ID NO: 94419 - DNA, 205 bp, Zea mays
  Clone ID: MRT4577_186100C.1
ctcggatgaccaaatattgcgatatctggcccaaatcacggggagcaagtaggtcccactctttctagccatgtaacttgacacaaagctgaaaaatggctacatgccgggaaggaaacactcccgggacggacgagcaagagccatgttttagacacccgtattgaagacaaggattcaagggcaagcatcaaagactttaaaa

SEQ ID NO: 94420 - DNA, 314 bp, Zea mays
  Clone ID: MRT4577_186101C.1
gccctttaatattttattaaaaacctcttaaaagagttagtattaatacgacaaggaaatagcaaccactaaatacgagaaaataacacgacttaaaaccatagaaacttaaagcgttaaaacaacgatcaaaaagaatcaatctattcattgacagcaacacgccagccaatgatgacaccaatgtgtataaatgtaggaataagctgcctgctggacacatgcacaataacatgcaagtagtcttcaaggtcaatcaaaatttgaaatatattgatgacacgcggaacgacgacaaaaaagatttttaaacc

SEQ ID NO: 94421 - DNA, 364 bp, Zea mays
  Clone ID: MRT4577_186102C.1
caagctccttgttcttgatgtatgtgttgttaccgatcccatagagggaccctgctaacatggttctatggctgaactcttttcggctacctaaaaccagcgggtgtgtatgaatgtgtataaaccccattgttaaagcgtacagatctcagacatcaatcgcaacaagaatggttaccattatcacccttgttactacgacaaccggctgacatattacagctggttccttgggtccatttggtggtgcagaacataagggcacaacaactacaacaacttgtgctagcaaaccttgatggatactcgttaggaacataactttcttgcattaaaccaactggctgtattgaaatctgctggt

SEQ ID NO: 94422 - DNA, 355 bp, Zea mays
  unsure (1)..(355): unsure at all n locations
  Clone ID: MRT4577_186103C.1
gcgcgtctattcttcctgctgctctgtccacctctctcgatgtgggccgnctccgacgcactaagccaagtgctgaggctttcgatggtctcttcgccggggacgagcacccaggtactccctcttattctcttcccttcatgctgcgcgaagtcctttgcggggcgacacgggcggagtccgcgccgccgacgcaagagttcggtcgcctcgctcctaccaacctcgccgtcgcctgggcgccggtccaaggatggcggccggagatgcctttctgctttcctcgggcgttctctcccaagcgtgcttgtctccttgtgcctgcgccagctaggacgcttccctggacaagctg

SEQ ID NO: 94423 - DNA, 702 bp, Zea mays
  Clone ID: MRT4577_186104C.1
catcgccatgcccccgtcgccccacccccgcgcgcgtcttcctccggcatgcggcagcccccccgagctcgcccgcgcaccaatctcgccgtcgggtatcccgcccgcgagcccgcgcaccaagctccttccccgcgacaagctccctcccccgcgacgcgtcttcctcctcgccctagatcgccgccccatctctctcctcaccccgcattccccgccgcccatgctccgctctctactcgccccagatcgtcgcccctgttcgcgtggattgggtaccggtcccaactatctccatggattgcgcgtccgcgacaacccaatctcctcccgtgctccagggaaggcgcgtcctccccccgtgattctcgattccccgcgtccgcgccccagatccactctcctctctcccacaatccccacggactctgccccgtatcaccaccccggctccttagaacgtgatccactctcctctctcctgcaatccccgctacctcaacccagatcgccgccctcgctctcgatcctcgcccacgctctccatggaaggcgaggccgcgatgctcgcgtggatctatgtagaggctgcgacgctctcccaggaagactactgccagtgctccgtgctccatgcgccgcgctggaacgccaccgtgcggtccatgtcctcgtagtatcgcccagactcgccgacagcaa

SEQ ID NO: 94424 - DNA, 1381 bp, Zea mays
  Clone ID: MRT4577_186105C.1
ggacaggaaagaattgcttcaatggtatgagcctgcataatatcagtgacaacccaaatccttatgacgaggcaatatccatcattgggaaaaccttatctgcttttgatgaggataatttaattccttgctttggttttggagacgcatctactcatgaccaagatgtatttgccttctatcctgatgaaagaccatgcaatggttttcaagaagctttagctcgatacagagagattgtacctcatcttcgcctttcgggtcctacgtcattcgccccaataattgacatggccacaaccattgtggagcaaagtggtggccaataccatgttttagtaattattgctgacgggcaggtcacaagaagtgtagatactgaatttggtcagttaagcacccaggagcaaatgacagttgatgctattgtacaagcaagccaattcccattgtctataattcttgttggagttggagatggtccatgggatatgatgaaggaatttgatgacaatataccagctaggtcttttgacaatttccagtttgtcaacttcactgcgatcatgtcaaaaaagataagtcaaagcaaaaaggagacagagttcgccctttcagcactaatggaaattccattgcaatacaaggcaacattagagcttggaattttaggacgtcgaattggagagtcacctgagcggattccacttcctcctccttttgcaagttatagcacagtttcaagagcagaaccatctcgggcaaatagttatcgaagtgtgccttcacatccaagggaggagccagctgtaaattcaactatcacagcatcagttacatccccatcagctgccgaaagtagagttttagaaccccagatgtgcccagtttgcctttccaaaccccgggacatggcatttggttgtggccaccagacatgttcagaatgtggaccgcaagtcacagattgccccatctgtcgaaggcccattgacacgagagtaaaattgtactaattatttttgggtggaactaggtttaactgaagcacatgccaggagtagaatccactaaaataaatctctatttgactgttaacgatgtagtgtgaattaatttaataaatcagacgtagagaaaaggaggatacttgttctttgcttgtatcctgttcctacattgtgcgttgatagatgtgaggctacttccattatctgatactggacaggcgccctacttcgctgcggcgattacatataatgttgaagtatggttatggtttgtctgtaaactggatggtatttggcttgttagtatggataacctagcttgtatataaagagacaatcattagtaagtgatgtggtttggtaatatgaat

SEQ ID NO: 94425 - DNA, 321 bp, Zea mays
  Clone ID: MRT4577_186106C.1
cggacgcgtgggcaactagcaacatagatagcacaatagtgtaccaacaatggcggccgagatattttgcctccttatgctccttggtctttctgaaagtgctgctacggtgaccattttcccacaatgctcacatgcttctatagcttcccttattaccccgttcctctcaccagcggtgtcttcggtatgtgaaatcccaattcttcaaccctataggatccaacatggtaactacacaagcattgaaccttattcaatcctgcaggctatcacatctggcatcttacctccataactcgtgttgctgcatcaatcgtc

SEQ ID NO: 94426 - DNA, 1619 bp, Zea mays
  Clone ID: MRT4577_186107C.1
attcggctcgagccaagaacttgataccatgaaagacactgatcagagtgatagctctgcaaatgtcacatctgacgctgaagaaagtgtagaagatgatgattctgtgtgtgtcagtgatgatgctcaaaatgatctgaagaataccaagtgcaaattggaagatgcttccaaagaatcttctactgctcgagaagctgaacggagtgatagttctgcaaatgtcattgctgatgctcaaaatggatccgaacctaccacaaatgagttggcagtcattacgatcagtaacgacaaggaaaatgagtccatgcttttcacatgcaactcagaagttggtttcaaagaatctattattggtcaagaagctgaccatgatgatagctctgcatatatcagttatgatgatcaaaatgaatgtgaagttactgcatgtcattcagaaggtgctcaaggggaatcaaatgtaattcaagaaggtgaggataaaactgcaggcgctgaaaataaactggaatttacagcatgtgaatcagtagatgcttctttaaaacctgctatgcctcaagaggctgctggagatattaataccacagatgcaaccaaagacattcgtgttactgaagaaactaatgaatcattcaatgcgcaaatgccagcagaatgtacggatgcaaaagaaccttctattgatgacatatgtggcgcgttcagcggaatgaacctcaagggtgatgtatattttgatcctgctgagtctgccacatgcccgaggaacaagttgatcatctccaggaggagaagaacacctgaagaggaggaatacttgcgaggtttcaatccacgggcaccgaattttcttcctctggaactggatccagacgcagagaaggttgacctcaagcatcaaatgatgggtgagcggaagaatgctgaagaatggatgattgattacgcgcttaggagggcggtgacaaacttagctcctgctcggaagaagaaagtggagctccttgtccaggccttcgagactgtcctaccacatgacgaagatgacaagaaaaatgtctcacctcaaggcctgtccaagcctgcaactgataacattagagttagtggttacactgatgttgatgtcgacgcgcaagctactaactcggaggttgctgcaatattatcgcgagtgacctgctccaagtttgaatgagagagcgctacttactaatttgctagaggtaactagagaattagagatctctagctgagctgtgacagaggagctcactcctgctccacaaggaaggataactactcattagtcattactgatcaaggtatccctatccagttgctgagttgcaaagaggatgctcccggcttgagttatgtaatttaaaagtgtgtatacatgtctcgtgtgctaatgttgtctgatattgtgctggtggatctgtgaggattggaaaatgtcaatggtgatgaggtccatgctcctttggcaaagatcaataaaactcttcttgagtgctccaaaaaaaaaataaaaaaaaaaaaaaaaaaaccctggggggggggcccggcccccaatcccccctttagggggggggttttaccacccc

SEQ ID NO: 94427 - DNA, 569 bp, Zea mays
  Clone ID: MRT4577_186108C.1
cctcgagccggccggaacagattccggaccagcactaccatatcatgagacgtgcatgcgcgttgagatgcagaccgactcggccatggacaaggtagctcctcctctcctcgccgacgccagccgcactgtgatcatggcgcaggagccaccgttgaggaaaggccgcgctgcggtcgacttgatctgcagtcacgtcatcatgagccagcgcgccagggaaacagtgaacgtcgcagacggagagctgaagcctgaaggaaagcgtaagttcatcgccaaggaagatgaggcagaacagcactggcagaccgcgatggcacaggcagcgcgagaaccccatgatgacacacctgccctacatcatcatcatctggatgtacacccccttcgtcatcctcgccatcgccagcgccaatggatgtatcaggggctctgtgccatgaccgtaacgcgatcagtcagcctggatcataaatgctgactcgccagactgtatcgtattcagcgtgtgccctgcgactgtgtacctatctatatgaagacaagagtccttgcgtgtgagataa

SEQ ID NO: 94428 - DNA, 289 bp, Zea mays
  Clone ID: MRT4577_186109C.1
cccacgcgtccggacagttttagcgaccttgtcaacggagcactggaagggttgtttcatcctgttggaatgggcggtgaaggtgaagccaccgtaattgaggagaataggttagatcgtgctggagaaagttcaagagcgttggacgacgtccaagcatctgaacagtgtaacgaccatagagagagtcacgtaccttattccggcaacgtctctcttcgatcggaaagtagcacaacgagcgctcggtcctttgcatttccagcactgcagaacgagtggaacagca

SEQ ID NO: 94429 - DNA, 149 bp, Zea mays
  Clone ID: MRT4577_18610C.1
cgtgatgcgtgcgcgggcgcgtcggcgcaggcccggggatgctttttgaggcacttccggggaaggggccaccacacatgccaactgggtggccgggcaataaggtggcgcatcacggagaagtgtccatcgacaagcccctaggacca

SEQ ID NO: 94430 - DNA, 462 bp, Zea mays
  Clone ID: MRT4577_186110C.1
aaaccacgaaacggggagggtttacaacaattcggggatataaaaggtccctcgaacggaatcatcccccagcataggcaaccaaacttccaaaaataggtaagttagcaaaccaaaaagcctggaacactcgttacaggacaaacaaggattcatccctcgggggggacaacaaaacctatcaagatttttcaaaaaatggtttggctatgaaacaaccattcctaaattagattacccctgatagccctggggcaagggaaaacacctggttattaacacaaacaaaaaccaaaattttttttgggggaacccttggtcctattaacccaagggcccctccactttaaaaaaaatttttggttccacttgagcaaaaatttggttctccctcttatcgactattttcacaaaaaaaatcccggtgggaccaccctttggggggggcctctgaccaaaggg

SEQ ID NO: 94431 - DNA, 285 bp, Zea mays
  Clone ID: MRT4577_186111C.1
gccggccagtgccgaggaagtcgtcagatccaaccatcatcagaatctctccttcagcccacgatgcttgccacgagagtgctacgagccgccgcgggcggtcccaagcccaacatcaccgccttcaacatgcgggcgttccaagcatcaaccggccagcctcgatacgatccctgggagcgaaacgaggcctggcgataccagggtccctatagccgctggaaccgtctcaagggcggtttccccggtctcggtatcgcgacagtcgctttcaccgcttactgc

SEQ ID NO: 94432 - DNA, 755 bp, Zea mays
  Clone ID: MRT4577_186112C.1
acaaaacttaagaaatgcccctgctgttcttagacagtccagagcaaacgagctgatttgtatgatctattgaatgagctcaactatgtttctatgtaacggaattaggtttgagaaatgaaagattgtatgtctcctaatttagttgctcatgtacttctttgttcttttaggaagagttgctcctgcacttctggatgatccattagattcgggaactgatgtaacattttaggtccagacaatagacatccctctacagtttcagtttccctgcttttaagttttctgcaaaaaaatattgtctcccttctaaactataatcgttttggcttttcttagtacatgatttataccagtataatttttgctatatatctagtcataaactaatatctaggtgcataacaaagctaacaaaattgtatatcactatgtatttagaaaaattaaaatgatctataatttggaacaaaaaagagtactacggttcatacaaaccattctggcctagtggccatcaaaacatagaacaaaaacatcctttttgccctccctttttaaacttcagaacttgcacttcttatttcttgtgcagttacaaacggtatgtcatttttacaacattttgccattctattcggtacaggatatacgatacaagcttctcatactgttagcttctcaccagagttcaaagggcggcattgcggacgcgtgggcggacgcggggcggacgcggggcggacgctggg

SEQ ID NO: 94433 - DNA, 375 bp, Zea mays
  Clone ID: MRT4577_186113C.1
ttttcgaggttattttttctccgctcttttactagagccgtggattacaaatgtgtgtggtatcaacaaggcccaagatgaaagtttagaagcagcgcagctacttaaacctgacaatctaattaataaggctaaagtggatccggggcatcatgtccatgacactggctgcgcatggggctcattggcaatacacatggtgaatagaactggctgcaagtgcacaagaattacattatcggacgagcaactgaaatatgggaagagagaggtgaaagaatttgtattacacgaccgcataactctcctgctttgcgaataccgtcaaaaacctaacggacagaagttttataggattataagttgtgggatgct

SEQ ID NO: 94434 - DNA, 288 bp, Zea mays
  unsure (1)..(288): unsure at all n locations
  Clone ID: MRT4577_186114C.1
ggagcgtgagaggaggatcttatgcgacagaattttgttaggatatacgggtggaaagaagattaagaagaagacggggataagggaggggaagacagaagatttttttttttttatcaagttcgaggttttgtccatgatggngattggttaggagaatatatagatggatgtcatggactaaaaaaaataatagtgtggtcgttgtagaggaatcaatccaatgtatgcgtagatggcaaagaattgtttttatatagtgttactgaagttgaatttagtggaagt

SEQ ID NO: 94435 - DNA, 362 bp, Zea mays
  unsure (1)..(362): unsure at all n locations
  Clone ID: MRT4577_186115C.1
agacgaggaagggcgnagcaggcgacgagaagccccggggagccgaaaanaagcacaganccggagacccccaaanagggcaaccgcaaggaaccgccggcccgaaaccaagagcaggcaagagacaacccggcgaacggaaacaccccagcagccagaggaaaagaaagcaaaagcgacacccgcagcagcggngagcgaaaagggagcagcccaaaccgcgaaaacggggccgcgggagagcaacacaagcgacgcgccgccaggcgaagcgcgcgagggccgcaccccagacggccaaagaccaccagccgaaagcaccacgagcccacgcgccgaaccgagcagcacggggcacgagg

SEQ ID NO: 94436 - DNA, 231 bp, Zea mays
  Clone ID: MRT4577_186116C.1
ccctttttatctcatcacttggataaataattaatcgtaacttatgtgaaggagaacgaactgtacatatcctgatgcttctccaccaacaaaaaaaaacaagtagaccttttactattaaagtatatacaaacacaaaaatatttgaatccccatttacaaagtgtaccctactgctctcatcctttaaccattcaaccacctcctgcaagaaacaataataactaataa

SEQ ID NO: 94437 - DNA, 364 bp, Zea mays
  Clone ID: MRT4577_186117C.1
ggtcaagcgaaactttaggaaggaattgtacagacaagtagcttaacaacactggtgagactgaacgtgcaaactacacgagcacggggatacaacgatattagtatcaggcgactatccacaaattcatctagagtgttaatcatgtcgcctgtaggaaataaagcatcctctttaaaagtttgctgcctcatttgtagaagtcaaagtctgactcaggcttcttgacgttggttcggtaacccttctcgaagtccttggggaggataacataccgatttttgcggacagcatgcatgccagcttcctggcaaatagcagtgatatcagcagcactgattttatcaggtctggagacataatc

SEQ ID NO: 94438 - DNA, 404 bp, Zea mays
  Clone ID: MRT4577_186118C.1
tttgggtgtttttttttttttgcttaccgggcacggggagcccggttgccaaacaagcggctggggacccgcgtccaacggctggcacccacaagacgacacaaagatgtgtttgcgtacgcgcaaggagccgcacggacggggggggggaacgcggacaacgctcggagccaaagaagcgcagggccttgccgggagcggatgagtgctgaagaactaacgctagaccgccgtaagggggggaagaggaggccggtgacactggcgaacgcggaaagcaaggaagccagacgcggtgcctgcggaggcgtgactctcgggcgagtatgggacgaccctgcacgagggctcagatggtgcactgggaagaagaagctggcttttgagccagcagccgcaagacg

SEQ ID NO: 94439 - DNA, 329 bp, Zea mays
  Clone ID: MRT4577_186119C.1
gatgaactgtttgaacgcgtcgttcgaacctgccttgaagcagtctgacactcccatcgcggtcgtctccctctgcgtttggttgtccagtttcagtcccgagacgtcgtaatcgctagatgatcgatgaacgccaagaagattaagctgcgcgactatcaccactgctacggatcgccgtcgccgatgtgtgacccacagatgttcccgcccgcagccgccgccaccaccgcagtgctctccttgcacccggggccggggctcgtgggctccctgccgcagcggcatggcggcggctgggtgcacgaggagctcaccgaaacgacccc

SEQ ID NO: 94440 - DNA, 179 bp, Zea mays
  Clone ID: MRT4577_18611C.1
ggaggacgtccgagctcaccatccagtttgttgactggtgctcaaatggctttaagtgcggagttaactaccagagtacaaacgttctgcctgattctcacctaatgcaactgcacctcactaactgcatgacctcctactacaccattgatctgtcagtggtcttcccaatcgatcac

SEQ ID NO: 94441 - DNA, 122 bp, Zea mays
  Clone ID: MRT4577_186120C.1
cgcatgcgcaacgtcaactcagcatacagcacgaggtcagtgctattattaccattacctccagagcctcggcttactgtgcagcatactgagtcacacctaccaactatagccacaccaat

SEQ ID NO: 94442 - DNA, 339 bp, Zea mays
  Clone ID: MRT4577_186121C.1
gttgttgggttttttttgggggggggattttcactcttttaaattttttaattttatccattatttttttttagtgaaagggatcccttctttaaatagtgcgctctgactggttaacataaaaagaaacatttggttcacctttatgcggcgcgcccattgtggaattggatgactctttagtggatcttgcacccacatttttcggggaggaagtttcggcacctgtacttgatggcccctttttccgtggacacaagtaacgcaattcttgcatgtggcggcccacttggttgagaggtcgtcgcatgtccacacgcccgaccaggtggtgcactt

SEQ ID NO: 94443 - DNA, 273 bp, Zea mays
  Clone ID: MRT4577_186122C.1
gtgcgcgggcgacaaggtgacgggcctgctcctgcgcaacgtgtactgcgcgctctcccagcagtgcaaactggtgctgtacggcaggatccagtgcaatgtctagtgcaccgagcaccaggtcatcacggcgccggccatgaaggtctgccaggtggagttcgacaaagcgtacgtcgtgaaggagggcgaggtcaccaaggcctacagcttcacctgcggcaatgagaagaacccgcgcctcagcgagaactgcaagatgtcctgcacccc

SEQ ID NO: 94444 - DNA, 418 bp, Zea mays
  Clone ID: MRT4577_186123C.1
gttccattcacccggcattcttcccccttggtcctggctcacacacgcctcctgtctctcctgccgggcacttccctgcacccatcgctccttgtgcgcctgctgtccgtctgtggatgggtcgcgccatatctgcagtgtcacgtaggcccctgggtctttctggggcctgcttgctccttgccttccgccctctgggtctttgggcatggttgcccaggaccatggaagaaaaatcttcacttttgcaagaaacagtagattatgtcaccaatattttaaaacatattgtgtcatttgttgtgaagaagaatgatgaactttctcatggtcttactaacataagttcagcattggatacaatgggctctgctttctcctcaatcaagagcttactgtcttctccaatatttaatct

SEQ ID NO: 94445 - DNA, 1111 bp, Zea mays
  Clone ID: MRT4577_186124C.1
gtaaaaaaaaaaaacaaataaaaagagacattctcctattctgtagcgcgacggcaccgctaaaacctagcagaggctcgtgccgccaccgccagccgcaacaaggaaggaaccaggaacacgatgcccaagtccaagcgcaaccgcccagtgaccttatcgaagaccaagaagaagccaggtttggagcgcaagggcaaagtagtcgccgagataaaagatgccgtggacaagtacagcagcgcctatgtttttacctacgataacatgaggaatcagaagctcaaggacctcagggagcagctcaagtcttctagcaggatatttctcgctgggaagaaggttatgcagatagcgctggggcgttcagctgctgatgaagctaagacaggcctccacaaactttcaaagttccttcaaggcaactctggtctgttattcaccaatcttccaagggatgatgttgagaggatgtttcgagaatttgaggagcatgattttgcaaggacaggaagtactgcggcagatacggttgagcttaaggaaggccctctggaacagttcacacatgagatggagccatttctacgcaagcaaggacttccagttcgcttgaacaaaggtgtcgtagagttagttgcagaccatgtagtttgtgaggaaggaaagcccctttcgccagaagcagcacagattctgcggctgcttgggatacagatggcgacattccgtctataccttgtatgtcgctggtcgagcgatgaatttgaagcttacaaagaaggcttgatgcacctaggagctgatgattcctcttaagcttgtgtttcgtgtatacacaacacaaagggcgcacttgctgtcttggctgggttggaaactagaaagatgctgtctgcagaaaaattttgctagtgtatttctgagattcagtggggggttttgtatgtgcgacgcggtgctgaacctaaagaaactgtttggattcaggtttctgagttgggtttacttgttcaaactgaatgtagctcagtggcaaatggcaaatctgtacctcgtgcaatgtttttgagccgtccgattaatcacgattaatgatccaagtaggttt

SEQ ID NO: 94446 - DNA, 247 bp, Zea mays
  unsure (1)..(247): unsure at all n locations
  Clone ID: MRT4577_186125C.1
caggggcaaacggcaaaggcaaggcctttccgcgcgcccgccgggacaccccaaacacaggaagagcccaccgaagaagaggaagcgaagangccaggagccccacacacaaggnagccgagaaggagagggagacaccccgaacggaacaccccacgccccgaccacgagacngaccgaaacaagccacccaccagccaggagccccgaccggaagaagggcagcacgacaaaccgaagccgaagc

SEQ ID NO: 94447 - DNA, 1385 bp, Zea mays
  Clone ID: MRT4577_186126C.1
acttcctcctcctcgcgagctcagctcgcgctccgccgcagacagcgccgccgccctctcctcggcccccccgaaggaagcttgcgctttgccgccacccactgatgccggccgccgcaggcaccccatggccccgaccgggcggcgtgaagacatttcctgaaccactgtgattagtacagcgaaactaaccacctttcgaccggccgggactggcagcgagcacgagacgaacagacctctaaaacctagcagaggcccgcgccgccgccgccaaccgcgacgaggaaggaagcaggaacgcgatgccgaagtcgaagcgcaaccgcccagtgaccttatcgaagaccaagaagaagccaggtttagagcgcaagggcaaagtagtcgccgagataaaagatgctgtcgacaaatacagcagcgcctatgtttttacctacgataacatgaggaatcagaagctcaaggacctcagggagcagctcaagtcttctagcaggatttttctcgctggaaagaaggttatgcagatagcgctggggcgttcgcctgctgatgaagctaaaacaggcctccacaaactttccaagttccttcaaggcaactctggtctgttattcaccaatcttccaagggatgatgttgagaggatgtttcgagaattcgaggagcatgattttgcaaggacaggaagtactgctatcgatacggttgagcttaaggaaggccctctggaacagttcacacatgagatggagccatttctacgcaagcaaggacttccagttcgcttgaacaaaggtgttgtagagttggttgcagaccatgtagtttgtgaggaaggaaagcccctttcgccagaagcagcgcagactctgcggctgcttgggatacaaatggcgacattccgtctataccttgtgtgtcgctggtcgggcgatgactttgaagtttacaaagaaggcttgatgcacctaggagctgatgaatcctcttaagcttttgtttcctgtatacacaaagggctcacttgctgtctttgctgggacagcttttggtaactgtgcgtgtggccatgtaccagggagtattggaagttagaaagatacaatctgcaggaaaaaaatgctagtgtatttcttcattctgccccatatttactcaactgttgaaaggtgtaagctgatttgaatatcgtatcagcattagttaagaggttgattgatatcatattcttgtaatgatagaatattctattggaaaccataaccctaactagagttttggggttccctattaatagggagaaaacaaatataggctggaccaagcccattataggcgtagcacacacatctaacaccctgtaaaaaaaaaaaaaa

SEQ ID NO: 94448 - DNA, 577 bp, Zea mays
  Clone ID: MRT4577_186127C.1
cccaccgagttccgtgagattcctctcttgctcgcgctctttcccctgcctctaggcatagcgtacctacaggaatcgtctcgagcgccgtctacctcccacatatcgtgaccatgcagcactaggatgctgaatgccaggaccccgatggacccgtcctctgcatcaataactgtgggttcttcggcagtgccgtgaccatgaacatgtgctccaaccgccacaaggagatgataactgaacaagatcaggccgagctgcctgcctcctctatcgaccgtatcgtgaacggccgcgacgccgtcatgcacccggttgttgttgttagcaacccgcgagtacctgatgcccgagttgagttgctaacaatgaacgtgcatgagcccgctgatgttgccggacccatggatgaggtggcgcggatctccaaaccggggaatgtaggaccgaaccgaggcagcgcctgcaggaatagggttggacttacacgattcaactgccgccgagggaacttgtactgcgtactccaccgctacttcgacaaggacgactgcaaagttccactaccgaattgctg

SEQ ID NO: 94449 - DNA, 824 bp, Zea mays
  unsure (1)..(824): unsure at all n locations
  Clone ID: MRT4577_186128C.1
atgcttcgctcgctgggcgacagcatcnggaggaaagaaaggttgcctctcccccgccttggatttgatagccgctagctgattaagcgtaacacgctctgtccctaccagcagctagcacaaaaaaatatctccaagaaaagagctgaaatcgcagcagcagcggcaacgtgctcagcttagttagcagtagcagtgctatctctttcagctaagtgggagagctcgctcgctagctgaggagtgcgcgccattaatggcggaagcggaagggcagctcgcggcctgctgggggaagcaggacgacgagtggaggaaaggcccgtggacaacccaggaggacaagctgctcctcgaccatgtcgcccagcacggcgaagggaggtggaactccgtctccaagctcacaggtctcaagagaagtggcaagagttgcaggctgcggtgggttaactacctcagacctgatctaaagagaggcaagatgacaccccaagaggagagcaccatagtccagctccactccttgtgggggaacaggtggtcgacgattgcacgcagcctcccggggaggacggacaacgagatcaagaactactggaggacgcactacaagaagggcaagccgtccaagaacatcgagcgcgccagggctcggttcctgatgcagcggcgtgagatgcagcagcagcagcagcagcagcaacagaagctgctacttgggcagggcaaggacgccgagctcgccagcgccactgccgaggacgacgtcgacgagaagatgaccggcaacgtaggcccggcagcgacggcgctggctgaca

SEQ ID NO: 94450 - DNA, 257 bp, Zea mays
  Clone ID: MRT4577_186129C.1
cacccgaatcctagcttaatctatttaggtacgaaaccgagcatcagaaccctaatttttgggtatgtgtatttgtatctgcctaattacaagtttatataggcaacatgtcttataatttcgtttgttttgcaaaagttactgggtcacgcatgtcgtcttctgctgcggtggacgagatggagctggacggcattgatcggcaccgggataaggagaggatggagaggcataggagggaagagaaggatcacaat

SEQ ID NO: 94451 - DNA, 394 bp, Zea mays
  Clone ID: MRT4577_18612C.1
acgctttgcggcaatccagccgctccggggccgctgtctccgtctctggcagactcgcttcggctcgcgttgctgctccctctcccttcgctgccggtgccaaacaggtccgctcatacgccgccgaggccaaggcctctcctactgaggtctcctcgatcctcgagcagagaattcgtggtgttcaggaggaagctggtcttgccgagactggacgtgtcctttccgtcggtgacggtattgcccgtgtccacggtttgaacaatgtccaggctgaggagcttgtcgagttcgcctctggcgttaagggcatgaccatgaacttggaagccggccaggtcggtgttgtgcttttcggctctgatcgtcttgtcaaggagggtgagactgtccg

SEQ ID NO: 94452 - DNA, 201 bp, Zea mays
  Clone ID: MRT4577_186130C.1
gctttatttcacataactgaaccaagaaagcatcggagggtatattttgaaacacccgtcagtttaaacaaacaaagcaaaaaagcaagctagcttatcggcgcggtgggaataaaaaaaaaaggtactcagtgccccacgtatttgacgcaagactgaaaataagtggcacataccagcgctcttcgctctgccattgag

SEQ ID NO: 94453 - DNA, 430 bp, Zea mays
  unsure (1)..(430): unsure at all n locations
  Clone ID: MRT4577_186131C.1
tggttggacctttgggctgatttagcgcttggattttatcgagtaggccgagaccgataatcctacggcttaatagtccgacggaatgcttagagagcggggtcggcgtaaatagaagtccggagtaaacgttacttccgtggccctatccgtcgcgcgtaaagtcggagtcacggcgaagaagaccttctcccattagtatactgtanactccgtcgggaataaaatctcggcgtctttcgcattcgttcccaacgcgaccaacggagggctatacgtcggaaataagtccgttacgtaggagcctacgacttcnttaatcggcgttcntctgcctaaggaggttacgaagacgggagccgaagcgcattataattcgaagagtacaactaagaagaagcatggctaggacgtgataaacgccggggac

SEQ ID NO: 94454 - DNA, 290 bp, Zea mays
  Clone ID: MRT4577_186132C.1
gaagtgaacggtaacacgatactttagggggttttttaaaactcggccgaggtccaggttgggcccacaaaaaagtcactgcaggcgaacgggcgcgtcgataaaacaataaccccaccttttgtcgtacccgccaaaatctatatagactgggttgccttcgtcaccaccataggggactccgtcgtggaaaccctgggacagtaataaccaccaacacggtgggggaaatgggaggcgaccccaccaagaacggaggggaaggctctgccgtccccaacttctgggga

SEQ ID NO: 94455 - DNA, 248 bp, Zea mays
  unsure (1)..(248): unsure at all n locations
  Clone ID: MRT4577_186133C.1
gcaagcatcgaccttctagagtagactcatgtgtatgtctgatagtatcagcgtaataacgttagcataatcagtgacatatgtaattcctatagtgaagttaaagtcgacagcagtgttccggtacaacatacaaccgagttcatatatgtngattacctgtagtaggtgatgaaataactaacgcacataanttngnatncgcgcgctaagcagattacgaacnattagcctgtcnttgcggctgc

SEQ ID NO: 94456 - DNA, 154 bp, Zea mays
  Clone ID: MRT4577_186134C.1
cgactatgtaaatcaatggttagttggctaccagcaaatgaactggggggaatcctggatctgaaccagaaacacgttaagctgttgcttcactgcaaagcaatcacacgatgttggcactatatatgtaaaagatatgccttctttggttaaa

SEQ ID NO: 94457 - DNA, 638 bp, Zea mays
  Clone ID: MRT4577_186135C.1
ggccgcttttttttttttttttttatttttttttttttttttttttttttttttttttttattttttttttttttttttctttatttatttaattttattattgaattacaactaataagcaatctaaaagaaggcaccaccaaaaaagagaaaaagaaaacaaaccaaaaggggtagacaaaacaagaaggacaaagggcaacaatagggggagacggaagagggggggggggggagccggaagcggcggggggagggggaggaacgggggggggggggagaaggaagcgggggggggaggaggaggggggcaagaggggggggggggggggggggggaaagaagcagcggggtgcagggcggccaaagggcgaaagaagtcgctggcggggaaaaaagggagggacaagcgggcgaaaaggaaaaaggggtggctgcggaaacgcagcacgggggaagggagacggcgccacaaaaggaagaaagcgggggcgctgagaccacggagacagagttgccggagccacacgggggaccacaggggggacaagaagctgcctccgcagagcgcagaagggaaggagccaagaaggcccgaaaaacagagccggagacaggaggaaccagggggaaaaag

SEQ ID NO: 94458 - DNA, 788 bp, Zea mays
  Clone ID: MRT4577_186136C.1
acccacgcacacgcagtcatcacgaagcaaagcgaaaccgcaaaggactcctccggcagagcatgcgcgttgctgcgacgcggcccgcctcctccgctcccgttgccctcctcgccgctctagccctcctcttcctcgtcggctccgcctccctcgccatcggagccatggccagccacgtcctcggcggcaagagcgagaaccccgccgcggccaacagcctcgagaccgacggcctcgcccgcttcgccgtcgacgagcacaacaagcgcgagaacgcgctgctggagttcgtgcgggtcgtggaggccaaggagcagacggtggccggcacggtgcatcacctcacgctcgaggcgcttgaggccgggcggaagaaggtgtacgaggccaaggtctgggtcaagccgtggctcgacttcaaggagctgcaggagttccgccacaccggggacgccacctccttcaccatctccgacctcggcgccaagagagggggacatgagcctggatggcgtgatgtgcctgtgcatgatcctgtagtcaaagatgctgcaagccatgctgtgaaatcaatccagcagaggtcgaattcccttctcccatatgaacttgttgaaatcgttcgcgccaaggctgaggtggttgaagacttcgccaagtttgatatcctcatgaaactgaagagagggaccaaggaggagaaaatgaaagctgaggtgcataaaaacctcgagggagcttttgtgctgaaccagatgcagccagagcatgacgaatctagcagc

SEQ ID NO: 94459 - DNA, 200 bp, Zea mays
  Clone ID: MRT4577_186137C.1
cctgtataccgggctccatccacgcgtccgtggacgcgtggggagaatccctggatgttgggcgaaagccaagcgaggtacagctgacgcttgctaggcatcggatgtgaaggcccgaaccaaagatcatcatcaatctcatggagtctagcgaagaccgactatggtaccctagatgattatgcgagctgaacgacatg

SEQ ID NO: 94460 - DNA, 705 bp, Zea mays
  Clone ID: MRT4577_186138C.1
attacaaggcatggagaaggcaagggaaaggagaaacaggaacaggaggaggctgggaagccaatatgcgggatctgtctctcggaggagctgagagctactgtacaagcggttcactacaatcaccaagtcatcaaaggtagatcttggtcttggagtgagaaaagctgtagtcaaggtcgaagagcgtgatcaggtttatcagcccactgaagaagaaataaggcgttggctagacccatatgaaaatgttgtttgtatagagtgcaatcaaggtggcgatgataatctcatgctactatgtgacatttgtgattcctcagcacatacttattgtgttggcttgggtagagaagtgcccgaaggaaactggtactgtggaggatgtagactcggtgacgagggaccatcatatactggaattcagcgtacagtagcttatgaaagacaaaattacagaagtcatgtcggtagttctgtaagttttggcatggctgtaccaggcggtacatttgaaaggccgtcatcaatcaatcctcgccattcttttcaagggattgatctaaatctatctccaagagagtttcccggagaatcacatcctgctgaatcacaagtttcaactgatagcgtatcaactcccactggaagagctggaaaaactatttcaggaaggcgtgaattacaacggtacattcagagttt

SEQ ID NO: 94461 - DNA, 414 bp, Zea mays
  unsure (1)..(414): unsure at all n locations
  Clone ID: MRT4577_186139C.1
cgggatccaccatcacacacagcaatcgcacacaagcacctcgacgtcacacggngcgctgcgcacagacacaccaagcgtcggcaccaatggcttactaccaggaggtggactactgctcggaggaggtgaggtcggtggccccggccggcttcggccgccacggcggcggcgtccagcagcacgtcgtcaaggagaagttcgaggaggtcgacgcgggctgacgcgccggcgccttcctccaccaccaccatggtcaccacggcggccacggcttcgtggtgcgcgagacctgcgccgcggtggtcttcttctcctgctccggcgtggtctccgtgcgctgggtgagcttcctcgcccgggctgtctgttcctcccgggcggtcggttttctcgcccgtttcgcgcctgtct

SEQ ID NO: 94462 - DNA, 273 bp, Zea mays
  Clone ID: MRT4577_18613C.1
agggcggttcgccgcccgacgtcgcgagaagtccattgaaccttatcatttagaggaagaagattagagtgcactacgcttataatttaggaatggacttcgtggcattttgatacctgtacccgtagtttcgcaaatgtcccatgttatggtgtggtatggttaatttgaagaatccttatgtactgaatctctgcaaaaagctatgttgtggacagaaaaaaaaaaaagaagataaatagaagaagaaagcagagagagaggtgtagtaga

SEQ ID NO: 94463 - DNA, 727 bp, Zea mays
  unsure (1)..(727): unsure at all n locations
  Clone ID: MRT4577_186140C.1
ttaacggcgggcaaccccgtcgagtccacggtcgtccaggcggcagcgaaccggctgcggagcacgccgctgttctccgagcagaggatggcgtggctgcagccacccaaggcgccgcgcaccacagcggcagcggcggcgccacctcctcctccgctggcgcctctgctcccagatagccgccatggggagacggtcggcacggtagctcaacctcagccccggtcgcaaccagaagcaagacctccggatgcggcggcggtgacgacctcttcggtctgctccggcaacggtggtcggagccagctcaagaggagccgccacctggccgcggactgctcggtcagtccggacgaggacctggacgacgagcccggcgcgacgaggaggtcggcggggctttaacttttttcgcttcttctctgttctcatgtttctcttttctgctctttcttccgtcatgttgctcagtatgagttcttcgtacttttgctttcttttttactacattgtttccgtttctcttctgttcttttttacttctactcnnnnnnnnnnnnnnnnnnnnnnnnnnnnnnnnnnnnnnnnnnnnnnnnnnnnnnnnnnnnnnnnnnnnnnnnnnnnnnnnnnnnnnnnnnnnnnnnnnnnnnnnnnnnnnnnnnnnnnnnnnnnnnnnnnnnnnnnnnnnnnnnnnnnnnnnnnnnnnnnnnnnnnnnnnnnnnnnnnn

SEQ ID NO: 94464 - DNA, 2503 bp, Zea mays
  Clone ID: MRT4577_186141C.1
aagaaggccaggatagggagtgggagggagacagtggtggaccctcaagtatctattgaggaagagacatggccagaccttgagtcagactcatcggactttgagtttgcgacgtccgatgaagaacctaacaatgttgaaacacctgtagctgagcagactacagtcagaaaaggaggaagaagaggatatctgagtcagagtcatcctcagattctgaatttgttgtatcaggtaaggaattggaagaattgagggagcctgagcctccaaaggctgcaccaaatctgcatgtgtccttgagaaggatttgtattacaaggcatggagaaggcaagggaaaggagaaacaggaacaggaggaggctgggaagccaatatgcgggatctgcctctcgcccacgcgtccgcccacgcgtccgggaggagctgaaagctactgtacaaggtgtcctcaattgttgctcacactatttttgcttcgcatgcatcatggaatggtctagggttgagtcgagatgcccattgtgcaagcagcggttcactacaatcaccaagtcatcgaaggtagatcttggtcttggagtgagaagagctgtaatcaaggtcgaagagcgtgatcaggtttatcagcccactgaagaagaaataaggcgttggctagacccatatgaaaatgttgtttgtatagagtgcaatcaaggtggcgatgataatctcatgctactatgtgacatttgtgattcctcagcacatacttattgtgttggcttgggtagagaagtgcccgaaggaaactggtactgtggaggatgtagactcggtgacgagggaccatcatatactggaattcagcgtacagtagcttatgaaagacaaaattacagaagtcatgtcgatagtagttctgtaagttttggcatggctgcaccaggcggtacatttgaaaggccgtcatcaatcaatcctcgccattcttttcaagggattgatctaaatctatctccaagagagtttcccggagaatcacatcctgctgaatcacaagtttcaactgatagcgtatcaactcccactggaagagctggaagaactatttcaggaaggcgtgaaatacaacggtacattcagagtttgttcagaccaagtctacctagtagaccagacacgtaccacaatattgcgcagaacagtggtggtgtatcaagaaatgaaccgaaccgctggaacttcccttcttcatcagaagcaaacacatcacagaatctgcctgatggcattcagaaccatcacagtgaccttccatttgttcaagctcacagcaattttgctccatttatgtccctagatggggatgatttccagcaaattgagggtgtcaagagcaacctcaggaacatgcagtagagcccttacggcgttactagaagctcgattctaccctgtgaagcttaccaagggggcaacatgtgccgttttaatggcttgtggaactgaacataacaaaagcttgtgcctgttgcattctcccagaaattgatgtggttcggctcatttgcggagatgtgatgtggtcaacgatataagatacatgctctctttgtttaagtttaggcattttttgttgtcgtcattcttattcattcagtcattaagcacaacctcagattacacagcgaagaaggcatttctgaatgtcttgatagcttcaaatttatacattgtaatattgtggtaacaccaatttcattaggctgaccattcttttcctcgcgagatgctcttttgcctactaggaatgctgataactgagcttcccagcctcttctataatcatataccgcgcggtggcaaactagcctcgttcgggtactggctttctgctctattagcatactggtctagtggatcaaccgagaaaagctatcaacaatcttagtactaacaatctatggtctgaagactcgtcttctttaagtgttttgttgtatagcgcagctgctttttgtacagatgaatgtttgttccatattgcttaagtttgttgtttaagtttaggcattttttgttgtggtcattcttattcattcagtcattaagcacaacctcagattacacagcgaaggcatttctgaatgtcttgatagcttcaaatttatacattgtaatattgtggtaacaccaatttcattaggctgaccattcttttcctcgcgagatgctcttttgcctactaggaatgctgataactgagcttcccagccttttctataatcatataccgcgcggtggcaaactagcctcgttcgggtactggctttctgttctattagcatactggtctagtggatcaaccgagaaaagctatcaacaattttagtactaacaatctatggttctgaagactcgtcttctttaagtgttttgttgtatagcgcagctgctttttgtacagatgaatgtttgttccatattgcttaagtttgtatccagtatccccttc

SEQ ID NO: 94465 - DNA, 216 bp, Zea mays
  Clone ID: MRT4577_186142C.1
gcgccactcacgcatacaagcggcggtagggctgcagccaccgcgcggttcattaccgcgcggtgcattgcacctcggttacctgcacctcggtgatctccaccgcggtcacctgccgcgcggtcacctgcaccgcggtcatgtgccgcgcggtcatttgcagcgcaccatgcactacctactaaccgcccagctaagctattccagcacaccatg

SEQ ID NO: 94466 - DNA, 156 bp, Zea mays
  Clone ID: MRT4577_186143C.1
atatgcgaacgcagctgacgtgaccacggaattcttgtcgagaatgtacatcatcatgaatttatcaagaaacgtgttaaggggattggtgtaattctataatatagcaagtcattatagatcagtatctaaatcagttgatgtgaatgcgtcttg

SEQ ID NO: 94467 - DNA, 191 bp, Zea mays
  Clone ID: MRT4577_186144C.1
cggacactttcgtccactctttcgcccacttttccagacccactcctccggccacacgttgtgccactcttactgcgactcctgcgtgccgacacttccaaggtgcatcttgccatgtgcatgatcttcaactccaccaacgtcacacaagtgttctctcttatcaacagctaaatctacctcatgtactc

SEQ ID NO: 94468 - DNA, 1110 bp, Zea mays
  Clone ID: MRT4577_186145C.1
ccggccgggcatactacttggggtcaccgtggtaatcgtctaaacccacgacgcatgcatgcacggacgcacctcaacggtcgagacgccccgacgcctcctatccgacggcggagaaaacacgcgtgagggggcgtgcgactcgccacgttatatttcgtccgccttgctccgcctccggcgcaccattttcgtcagctcctggcgcccggtggctcgccggcgcaaattaagttccagagactccactgcacagacctactgagctctctcctcttctcaaccattcaccagtaaacgaatccaccgaccaccactcccaggagcagggtattccgactttgattacatggagccaaggaggagatgaggtgttcctggaaggatcgtgggataactggacatcgaggagggcacttgagagatctggaaaagatcacgccgtcttgttggttctgccatccggagtctaccattaccggatcatcgtggacggggagctgaggtacatccctgaactacctcacgcagctgacgaaagagggcgagtggccaacgtcctcgatgtccatgactacgtgccagaaagcctcgacagcgtagccgagttcgaagcgcccccgtctcccgtgcacagctacgacctgcattgcccgggcgacgaggagttcgccaaggagccgcccacgctcccgccccagcttctcgtgtccgtcctcgggggggacgtcgatagcgctggccatggcaatcaagctttgaagccacagcacgtcgtcctcgaccacctgttcatcgagaaagggtgggggtcgcagtcgctgctcgccctcggcgtcacccaccggtttgagtccaagtacgtgagctttgtgctctacaagccgttggagaggtgatggtggtactgtctactagctgtgtgtgagtggaagaacagagtggactgctggaggtgaataatgtgtgtgtgtgcccttgtatagaagggaaatgcatgcaggagcttgtagctgtagctgatcttttattttatttttttattttcctttcactttcgacgaaagtaataaattagttgaccatgcatgcatgcttcgtgcaaaccga

SEQ ID NO: 94469 - DNA, 1336 bp, Zea mays
  Clone ID: MRT4577_186146C.1
ccggggccagtcgccacgttatatttcgtccgccttcctccgcctccggcgcaccattttcgtcagctctcctggcgcccggtggctcgccggcgcaaattaagtaattaacccgaactccctggcattctccgcgggcctgtagtcttgtagcctctcgcttgcttcgccgtagcacttgcttaattagggcggtgttcgagaggtgggtgtggtggtgtactggtgtactagtactactcgcctcgcctcgcctcgcctcgagggtttgtttgactggcggaggcaggagctgcggcggtccgggagcgcatggggaacgcgaacgccaaggagggggagaacggccacatggcggcgtctcctgagccggcggctcccaacggcggcggaggaagcagcagctcggcgggaggcgctgccgcgcgacctccaccgttgtcgccgccagacgacgtgatgctggagcgtccaccgcccgtgccctatctcttcgtgccgcaggttccagagactccactgcacagacctactgagctctctcctcttctcaaccattcaccggtaaacgactccaccgaccagcactcccaggagcagggtattccaactttgattacatggagccaaggaggagatgaggtgttcctggaaggatcgtgggataactggacatcgaggagggcacttgagagatctggaaaagatcacgccgtcttgttggttctgccatccggagtctaccattaccggatcatcgtggacggggagctgaggtacatccctgaactacctcacgcagctgacgaaagagggcgagtggccaacgtcctcgatgtccatgactacgtgccagaaagcctcgacagcgtagccgagttcgaagcgcccccgtctcccgtgcacagctacgacctgcattgcccgggcgacgaggagttcgccaaggagccgcccacgctcccgccccagcttctcatgtccgtcctcgcgggggacgtcgatagcgctggcaatcaagctttgaagccacagcacgtcgtcctcgaccacctgttcatcgagaaaggctgggggtcgcagtcgctgctcgccctcggcgtcacccaccggtttgagtccaagtacgtgagctttgtgctctacaagccgctggagaggtgatggtggtactgttgtctaccgtgtgtgagtggaagaacagagtggtctggtggaggtgattaatgtaataaatctgaatgtttcgacgaaagtaataaattagttgaccatgcatgcatgccgaaagtaataaattagttgaccatgcatgcatgcttcgtgcaaagtacct

SEQ ID NO: 94470 - DNA, 413 bp, Zea mays
  Clone ID: MRT4577_186147C.1
gctggtcaactaatttattactttcgtcgaagtgaaggaaataaaaaataaataaaagacagctacagctacaagctcctgcatgcatttcccttctatacagggcacacacacacattattcacctccagcggggactctgttcttccactcacacacagctggtagacagtaccaccatcacctctccaacggcttgtagagcacaaagctcacgtacttggactcaaaccggtgggtgacgccgagggcgagcagcgactgcgacccccaccctttctcgatgaacaggtggtcgaggacgacgtgctgtggcttcaaagcttgattgccatggccagcgctattgacgtcccccccgaggctttctggcacgtagtcatgggacatggagggacgttggccactcgccc

SEQ ID NO: 94471 - DNA, 524 bp, Zea mays
  Clone ID: MRT4577_186148C.1
gtaccctcgggttcttccgggaggtcaccccttgcttccgctaatccctcaagctcgatattcggcccggagcgaggagtactgatggattgtttatatatattagttaaattggcacgtgaggagaagtgcctacttgaagcgaactgattgagcaggccgcaaggcatgaagagatggttgtatttcttgataagaggtttcttattgcaaatgtggatgagcctactagcaaagcagcgaacatctatgctttagtatacataaatgagaatgttgctcgactgacgtccatgactctgtgattctgctatcgagcagatctgcgatgatggaggaactaatagtatgtgagctgttaacgagtgaatactccccgagatataggacctgaactgaccagtatctgggatggcatacagatactggaaggctacaaggtatctatttgatctgctgctgaagtgtcatactctagttacctatacaaaaatggtgactatcaccataatctggagacaaca

SEQ ID NO: 94472 - DNA, 313 bp, Zea mays
  Clone ID: MRT4577_186149C.1
gttgggggaaaacgattttggttattgggaatggttcaaaaagaaaaaagttgggacaatagagagggaaaaaaacggaaaagatggggaccggatccgcaagaaagacctgtgacacgacaactttagctttcaaaagatcaacaagacaagggctacggggggtttaatcgccgggccgtaaaaagccaggggggcgcaccaacacccccaagagaaaggaaacaggagggttccgaaggcccccaccccaatggggggaaaaggaaggttaaagaattaaagggggagcttccaaaacccccgggaactt

SEQ ID NO: 94473 - DNA, 885 bp, Zea mays
  Clone ID: MRT4577_18614C.1
ccacgcgtccggaggaatttttccagctgacacgataccacccctatttgagtctgacaaagaaacagatgaacgccattatcaactttggcggatagaaaatggagtcgcagaaggttcgactgagaacccaaaaggcgaagcaatcccgctggagtacaatcttgctggcttgaacgccatttcgttcgagaagggctgctacatcgggcaggagcttatcgctcggacgcaccatcgcggtgtcatccggaagcgcctaatgccaatgaagttcgtcgacgggaatgggcaagaactcgagcaggccgtcgctccaggctcggaggtcgtggacgaggcttcaggcaagaaggtcggggcagtgagcaccgctctgggctcccgcgggatgggcctgctaagactcgaagaagcactgaaaccgggctcggccctccgcgccggcggcaacagggacgtgagggtccaggcgatcaagccggagtggtggccagccgagtggacgcaggtgcttcaggaacagcgcgcagccgcttgacagtggagctgtatgtagtaatggaccccaaacccaaaccctgcctgccgtcagttagtcgcctcttggaagaggacccaaacaaactcatagctaaccgttttcagcttcggtttttagtcttgttgtctggtgtatcaaggcggagcctgtttttttttttccctcgcagaagacgaggaaggcaggagggcctgtttctcttcctctctgcctgctgtgttcacctgcggcatgtcgttcagaacgagatgagcaaactgtgtgagtgtgtgtttgaataagtttatctgtactacactgaataataagtttctctgtcggatgatcttgaaaaaaaaaaa

SEQ ID NO: 94474 - DNA, 502 bp, Zea mays
  Clone ID: MRT4577_186150C.1
aatggagcttcccacaaaattacccaaacagcccaccatcagtcagatttacctctgaaatgtggcatccaaatggtcaactttttattagtgaaaatagtatttatttactccatctacagttatgttttctgacatcatgcataatatttgaggaaacgccagtctaacctgatgggcgggtttgtatctctattcttcatccacccagtgaagatccaaacggttatgagctcgcaagtgagcgatggacacctgtgcacacacttgtaggtactgatcacagcacattcaactccacacagattgtccatgtttctttcagtcaccatgatttatcactaggtcattgtgtttgtggccaacgagtattgttctaacagttatgttcccatagcaagctagattcattgttgtgttttgttcagggtactttcaccacttctggtatggttctgtctgtaatgtgccaggccgcattatatcgctaaaagtttcactt

SEQ ID NO: 94475 - DNA, 172 bp, Zea mays
  Clone ID: MRT4577_186151C.1
gcacgagctcctcctttatccacactgcgtcctgcggtcctgcgtcctgcagtcctgcacctgcgtttcgcggtcctccccctcccccccagccctcacggcccccccgccccccgggcaaaaaaagccaaacaaccaacggggcccaatggggaaaagggccttaacggaa

SEQ ID NO: 94476 - DNA, 1342 bp, Zea mays
  unsure (1)..(1342): unsure at all n locations
  Clone ID: MRT4577_186152C.1
aaaccatatcataagcaaccaaccaaccaactgcaaagcagaagcaggaacgagagatcaagatcgatctttctctttgagttcccggagcgatcgagtgggttaatggcgaccgccgggaaggtgatcaagtgcaaagcggcggtggcatgggaggccgggaagccgctgtcgatcgaggaggtggaggtggcgccgccgcaggccatggaggtgcgagtcaagatcctctacaccgccctctgccacactgacgtctacttctgggaagccaaggggcaaactccggtttttccaaggatcttgggccatgaggctggaggcattgttgagagcgtcggagagggcgtgaccgagcttgtgccaggtgaccatgtcctgccggtgttcactggcgagtgcaaggattgtgctcactgcaagtcagaggagagcaacctttgtgacctcctcaggatcaatgtcgaccgaggcgtgatgatcggtgatgggcagtcccgcttcaccatcagcgggaaaccgatattccacttcgtcgggacctctaccttcagtgagtacacagtgatccatgttgggtgcctagcgaagatcaacccctcggcacccctcaattcggctcgagggcaaaccccggtgttcccgaggatcttaggacacgaagcgggaggcatcgtggagagcgtcggagagggcgtgaccgagtgcaaggagtgcgcccactgcaagtcggaggagagcaacatgtgcgacctcctcaggatcaacgtcgaccgcggcgtgatgatcggcgacggtaagtcccgcttcaccatcagcgggcagcccatcttccacttcgtcgggacgtccaccttcagcgagtacaccgtcatccacgtcggctgcctggccaagatcaaccccgaggcgcctctcgacaaagtctgcatcctcagctgtggtatctcgaccggccttggcgcgacactgaatgtggcgaaaccagccaagggctcgacggtggcgattttcgggcttggggctgtaggccttgctgctatggaaggtgctagactggctggtgcatcaaggatcatcggcgtggacatcaacccagcaaaatacgagcaagctaagaaatttggctgcactgaattcgttaaccccaaggaccacgacaagccagtgcaagaggtgctgattgagctgaccaacggcggcgtcgaccgcagcgtggagtgcaccggtaacatcaacgccatgatatccgccttcgaatgtgtccacgacggctggnngtgtcgccgtgctggttgggtgtcccgcacagggacgaccagttcaagacccaccccatgaa

SEQ ID NO: 94477 - DNA, 232 bp, Zea mays
  Clone ID: MRT4577_186153C.1
gcccacagcataaggcggggttcattgggcaaacatggggggcgccaaacaccctgcactcatatgaaaatccttggtcagcctcatttgcccgacacctagatggtaaacgcctaacatagggcaaggccaagaccctgctgccctgttactataaagctaatgtatcatggacccgaggatgtaagattacgacgtcgacctgctaaatgctccctatgaaattgaccca

SEQ ID NO: 94478 - DNA, 743 bp, Zea mays
  Clone ID: MRT4577_186154C.1
cattgggtacctcgaggccggccgggaaacgcgtacacggcactggctgaacggatatgtaaacggggaaagttgcgccgctacggtccaggcgttcttgctgcctccctcgtagactagactctagaccactatatatacagtactcgtccccgttttcttcctcaccaacttctcatcatcagccaagtgtaaagagtgcgaagaagcagtagcaaaaggattccattctcgtgttcttggagtggtccatcgatcgagctccgtgaaagagagagagagagagcaagcaatggcgacagcagggaaggtgatcaagtgcagagccgccgtggcgtgggaggccggcaaaccgctgtccatcgaggaggtggaggtagcgccgccgcaggccatggaggtgcgtatcaagatcctctacaccgcgctctgccacaccgacgtctacttctgggaggccaaggggcaaaccccggtgttcccgaggatcttaggacacgaagcgggaggcatcgtggagagcgtcggagagggcgtgaccgagctcgcgccaggcgaccacgtcctcccggtgttcaccggcgagtgcaaggagtgcgcccactgcaagtcggaggagagcaacatgtgcgacctcctcaggatcaacgtcgaccgcggcgtgatgatcggcgacggtaagtcccgcttcaccatcagcgggcagcccatcttccacttcgtcgggacgtccaccttcagcg

SEQ ID NO: 94479 - DNA, 207 bp, Zea mays
  Clone ID: MRT4577_186158C.1
cttggtttttgttttttttttttttttttttttttttttttcttatatttgaaccaattctactgtaccttatcttgtaaccatgtacatatcatatgcaggctaggttcaaaaaaaatttgaatgtgcatggagtagcacagatctaaatttattatgcgtggggatgaaaccggacggtaaatgcatacatgcatttattgtttt

SEQ ID NO: 94480 - DNA, 945 bp, Zea mays
  Clone ID: MRT4577_186159C.1
ggtacccccgggccggccgctcgcccctgtgccttcgctcagctcgccaaggaggttgtccgccatggtactctgcatcccgagctcccgtgctcgcgcggcttcctgctcgtcggtgcttagactgaagctcgcccggcgcgcccatctctctgtctccccaacgctcgccatcgtctcctgtctggtcgcgccctgctccgccgtcgtgttctagccgcgcgtgctctggtggccgtcgtgctgatcgccggctgaaacccctttagtgcctgacactgcatctccctggtgttcgcctctgttttcccctggcgccgagcccctccatcctgtcctagcagcaaaagcccagccactgcgcaagctacctgctcgatagaatgttcagccgctcgtcagatctgcgcagtccctgcacgatgtcgcaaaatccgctcgttgtcgatgccgcgcttcgtgcatcgtgtgttcgacgaaaatctccagcatgtggacagcacacgcgtgagccgagtttggtttggccagttgttcggtttgcgatttactcttcctgcgattatagtactctgatggaccctgttttgctctcgacctctcagcacgtgggttacagcatcaggtacgatccagtggtaagaattcgtcatgacgttgtgtggctaggagatgggaggtaggtcagtgttgagcaccaaaatgaggtccgaatggtccgcgcctgtgggccggacggtccgcgcacgcgcagagtagattagggttccgagttttgtgctatgtttgttagctatatccgcggaattagctcggaatccggtcgtgtaaagggtccagccccctcctctataaaaagagaggcctacggccgatttgtaataaaacaatcgaatcaatacaagttctatttcgccatctaaaaaaaaaaaaaaaaaagcggcc

SEQ ID NO: 94481 - DNA, 1850 bp, Zea mays
  Clone ID: MRT4577_18615C.1
cctcgaggccggccgggacaccaagcagcccaacccatcggttcgacaacttcacagaccagtgagtgacacacacccatgccgccgccgccgccgctcgcgcgccgcctactcctccagccgctaccgagcggcgcgcgcgccctccacacgaccccggccccgcgccgcggcccgggggtgctggcctgccgcctggcgtcccgcgccgtggtccgcttcgcggggcccgaggcggcgcgcttcctccactcgctgctcaccaacgacctcctctccgccttctccgcggccggcgcgtcgtcgccgcagcggtacgcgcccacgccgaacgcgcccgcgcggggccccgcggcgcccgcctacgccgcgctgctcacgccgcagggcaggttcctctacgacctcttcctctaccggcccccgccgcggtcccagatgctcgaccgcacaggatccgcgccggagaccggtgaggcccccgaggggcacccgcacccgcaggaggtactcgcagacgttgacgccgccgaggtggacgacctcgtcgcctgctttaagagatatcgtttgagatccaaggttgaaatagacaatgtaagtgagaattttgcatgttggcaaagatttggacatgatgtagtgcacactgaaccttctactcaagaacctgaggctcaatccattgggtggggacaaggtgttgaccatgctggcgagtcagctgcgcaagggaacggtcatggatggcaatggctcaaagatcctcggttggactaccttggttacagaggaatttttccagctgacacgataccacccctagttgagtctgacaaagaagcagatgaacgccattatcaactttggcggatagaaaatggagtcgcagaaggttcgactgagatcccaaaaggcgaagcaatcccgctggagtacaatcttgctggcttgaacgccatttcgttcgagaagggctgctacatcgggcaggagcttatcgctcggacgcaccatcgcggtgtcatccggaagcgcctaatgccaatgaagttcgtcgacgggaatgggcaagaactcgagcaggccgtcgctccaggctcggaggtcgtggacgaggcttcaggcaagaaggtcggggcagtgagcaccgctctgggctcccgcgggatgggcctgctacggctcgaagaagcactgaaaccgggctcggccctccgcgccggcggcaacagggacgtgagggtccaggcgatcaggccggactggtggccagccgagtggacgcaggtgcttcaggaacagcgcgcagccgcttgacagcagcggagctgtatgtagtactggaccccaaacacaaaccctgcctgtcgtcagttagtcgcctcttggaagaggacccaaacaaaccccatagctaaccgttttcagcttcggtttttagtcttgttgtctggtgtatcaaggcggagcctgttttttttcctcgcagaagacgaggaaggcaggagggcctgtttctcttcctctctgcctgctgctgtgttcagctgcggcatctcgttcagaacgagatgagcaaactgtgtgagtgtgtgtgtggcccaaacacgcagtgtgttcgaataagtttatctgtactacactgaataataagtttctctgtcttgatgatcttgtacaacgttttatattggacggtcatgggctctgtacgttgcgttgctctcgcatgtaaagcatttcatgctgagggttgtctcagcattatactgttttgttaggaacgcaattatgataaaaggatttgttgtgggcttatttaaatatataattttatttttttattg

SEQ ID NO: 94482 - DNA, 191 bp, Zea mays
  Clone ID: MRT4577_186161C.1
gggggcgcgtgcatgctacgggacagacatgtaataatgaatcgaatccaaaaaaaaagagccttgatcaacaaacacaacaccattggcccgacatgaaaactattcgataccaaaatgtggaataaggttccatatccggacctattgacccaccatagacaattaggcagtagcaactgcaaacaagc

SEQ ID NO: 94483 - DNA, 247 bp, Zea mays
  Clone ID: MRT4577_186162C.1
gatgaatttgaaggtgagagagcagatgaggacgacgaggaggacgatgatcatccagatggtgatgataatgatgatgatgaggaccaggagaactgagccctcgcattgatgcggtggagttatgtaacccgtttaggggatttgtgtcagttggttgacttagctcgatgtcaactgatatgactgtataggtgcggatgaagtctaccaacttgaaagggcgactggaaagcataaatagagg

SEQ ID NO: 94484 - DNA, 344 bp, Zea mays
  Clone ID: MRT4577_186163C.1
ctgaaaggaagcagtgttacacgtcgggatgaacatcactacacaatgagtaacaggctacaccaatatgcacatccgtctgcacacgtagggtataaacatatcaaaaagagctgagcctacatgagagtctttaacagcttaaatgtccttcaacacagacatggctgacacatcagcaccctatgttgaccactataggacattgcggatgtagcacaaccttaataatttgattcaccaagccgccaatatatcctttaccaactccaccttccaaacgggggaccatctccaaagggcttttatgctaaacaatgccatgggcacagattttaacaagt

SEQ ID NO: 94485 - DNA, 291 bp, Zea mays
  Clone ID: MRT4577_186164C.1
tggaacgcgcaccctcccatctaggtctaccaaaacgatgtacagaccggaccttgggcctgccctatcgctgacccataacactaaagagcccatgcgctttgcttgctatgtgtaccaatatgctacttactagcaccggtgatctcttacgtggcctcaacgtattacgtatgaatgcactaggtgctagcacgatacaatcatacagttaaggttcgagtaaatctatgttgttgacaagtatgatacacttagtgacagaactttctggtcaatgtatattgcaaa

SEQ ID NO: 94486 - DNA, 415 bp, Zea mays
  Clone ID: MRT4577_186165C.1
gcagcggaaatcttattaccaaattttacatgttacatcaagttttacaatgtacatgatcggagtgattacaaaagtgattcaaagaaataactttgaaacgttataaattgtttataagttgaaatatatgctagcttaagtgaccatcctcaataagaagtatagaagaagtacatagacttatagaaggttgtgcccaccggcacttaacaccatcatcagcagcacaaaactataacctggataacactaggttagtgtttgttaggggatgtccacttgacgatcatccttgccctagcacttgatcaggcaggtccgttcatcagcatcaccatgcggaatagcccgcgcttggggtcaacttgggtcatctttcgcatcacgcgattatttaacataccagtaattt

SEQ ID NO: 94487 - DNA, 776 bp, Zea mays
  unsure (1)..(776): unsure at all n locations
  Clone ID: MRT4577_186166C.1
caagccgccgctgcgcccgngctggctttctccggtgggcgcgctgctgctccggctggccgccggtttcatcgccgactacaggctgcggatcggggtggtggcggccgggcccaccgccacgctggccgcgttcggctgcgtcggcgccgtgctggggcgcgcacccgtggcgcggtcgtgcgcgcgcgtcgtcggcggaggctgggtcgccatggccgtcacttcggcctcatgagactcttcaaggccagcggtatatgaaggatgggagaggcgtggcagggcgggcctcacgcttctggtgtgtgtgactgctgctcggtcggtgctgcatgctgctagctctgcttccatgcatgtgcctcctgtgcgtgcacctcctagctaaaccatgcataattaataacatatatatacttattagtatattagtaattaccatgatagatatatatgatgcacgcacacgcgtgtgctagctagctacaagcagctcgatggctcaatccccttgctagttttgcatgcatcgactatgcggtcatgtgctgctgttgttgaacaccgatcgaagcttgttaccatgcatgcagatcagctaggttttgagccaattaacgtaatgcttaccttgtactggtctagctatgctagctactcgatctgatcaagagtgatccatgtgcaagactaaggcttgcatgtgttgtaagcattatactttaaaaaatatatgtacaactaagtctaatatataatttatgagtttatct

SEQ ID NO: 94488 - DNA, 223 bp, Zea mays
  unsure (1)..(223): unsure at all n locations
  Clone ID: MRT4577_186167C.1
tcgtaatactaaatctgtactcnaaaaaaatggctgggcatactacatatgctcgagggattatactcanaataatntngatttttccatttctattattgcctcaaagctacaatctttcatacatatctaaatataatcaattttatccaactttattatacacacttaatctttttctttacactctcattatttttcatggcttttccctacaattcca

SEQ ID NO: 94489 - DNA, 456 bp, Zea mays
  Clone ID: MRT4577_186168C.1
gtaagctcggaattcggctcgagtgcgccccgccactggatgctcagcaaactcggcggcgtctgggcgccgcgcccgtctacgggcccgcacaagctgcgcgagtgcctgccgctgtcgctcatcttgcgcaaccgtctgcgctatgcgctgacgcgccgcgaggtgctgcagatcgtgatgcgcaagagcgtgcaggtcgacggaaacgtgcgcaccgacctcaactaccccgccggattccaagatgtgatcacgattccgaagacgtctgagcagttccgtctgctgtacgacgtgaagggccgcttcgtgctgcaccgcatcacgccggaggaggcgagctacaagctgtgccgcgtgatgaagttcgacacgaacaagaaggcgttgatcggccacaaccccttccagactggtcagatgtctgcgatcccgtaccgggggacccacgat

SEQ ID NO: 94490 - DNA, 571 bp, Zea mays
  Clone ID: MRT4577_186169C.1
cctcttgctcagccgaagaacctttctcttgatccttcgatacatcctgctcattggcgaaccaaactacatcttccttcaatactttaacatggacctgtggaccacctacggaaaccataaaagtgcttggcaatcgacaccttattctgtgcaaggaatgacatctgccttggtaccggcaaacggtgagaggactccatagtccacctgctttgacgcaccagcataacgcaccgccagcttcctcagtgacaggacactctgccatatagacatgagcgccggaccgcccctaataaccagtggcgaaccctgaggcccagacccaagcttccataggagctacaagttccgttgttcacgaaaacccattcctaggagaccctgttaccatcctgagacaactcgtccacagccgacgctaaattagtgacagcccttttctcaaacgtaggagcagagacagcctcagacaaacagtctgccccttatgaacctaaaactggaaccgggcggggaccagaagaagcaggcaggcgccgtcgtgataaccaacaaactggagccc

SEQ ID NO: 94491 - DNA, 330 bp, Zea mays
  Clone ID: MRT4577_18616C.1
aaaggccgggccaattttacccgaaaccccaaattggggctccggcggaaaaaaaaaagcccccccgcggggggggcacccaaattttttacccgacaacacaaaaaggtcattcgtggaagccgcgtaaaaaacaggttaaaaaaaaggggaaatccccccaattttggaggggggggaacccccaaccccaaaatgtactaaaaatccaaaaggccccccccccccggggggaaccatgaaaacaattgcgggggggaaaaagcgtaaaacccaaaacgaaccccagggggccccaatcctacaaagggagaaaaactttttgggaag

SEQ ID NO: 94492 - DNA, 426 bp, Zea mays
  Clone ID: MRT4577_186170C.1
cacagattagggtttcggcggcaacaatggttgcgcgacggcggaaccaacgcgcgtgggcgggtctaggctcgggcgatggaggctgatgtccggactacgatggcaagggcgggtggatccgacacgtgcgggcgcgacggtggctgacgtgcgaacacatggtcaggtgggatccgacacgaacgaggtgcggctctagccgacgcgcggcggggcgggtttgggatggacagaaggggtccgtgacggccggacgacaagtccgcgacatcggcggcccgccgctgacagatggatgacgaggaccatcaatcaggcatcgtcatccttgagacctagcccgtcataggaaacacatctgaggtgggagcggctgcaataaaaattcacaaaaaagggaggatgcaataaaacataagtgag

SEQ ID NO: 94493 - DNA, 431 bp, Zea mays
  Clone ID: MRT4577_186171C.1
ttgggtacctcgaggccggccgggggtgatccttacctgaagcagcggctgcggctgcgcgagtcctacatcaccaccctgaacgtgtgccaggcctacacgctgaagcggatacgtgacccgagcttccaggtgagcccgcagccgccactgtccaaggagttcaccgacgagagtcagccggcggagctggtgcagctgaacgagcagagcgagtacgccccgggcctggaggacacgctgatcctgaccatgaagggcatcgctgccggcatgcagaacaccggctaggccaagatacatagcccctgtttgtttcagctttttggagcttctggccatcaaaagctgctgcggactgccaaacgctcagcttttcagtcagattctataaaattcgtttggggaaaaaaaaaaaaaaaaaagcggcc

SEQ ID NO: 94494 - DNA, 772 bp, Zea mays
  Clone ID: MRT4577_186172C.1
gtcgaggaggacctgcgccacgccttccgcgtcttcgacgccgacggcagcggcgccatctccgccgccgagctcgcgcgcgtcctccgcagcctcggcgagcccgcctccgtcgcgcagtgccgccgcatgatcgagggcgtcgaccagaacggcgacggcctcatctccttcgacgagttcaaggtcatgatggccaggggaggaggctgcttcgcaaagatcgcctaggtaattagaggttccctcccccagccctttcgaatctgctgctccacccatccccccacctccgttcacacagcagccgagcgtatggcgtcgtgtgcggtcttaagtaaagtgtatatagaagccaagatcatcgtggagaagcactagcgctagattcttctctctactaataattgggaaccacggcggatattgctttttgcaagattggagcctggatgaaagcagtggttcagagctaacttctgttctagagatgcggatgcttgactctgtgaatgaaagagtagacgattcgaacctactcctatgtggatctctaattcgtgtgtttccacctctcggaatatgtgaatgttttttgcatgtttgtttggtatttgttagatccaatgtaaatctggtaatctcagcgcggtggaatccgtaggctgttaatttagctcgatgcagataaaagctgtagtgatcttttgttgaacttgtggaggatttttttttcttaagatctcaaacatggaacaggaatattcttgcg

SEQ ID NO: 94495 - DNA, 580 bp, Zea mays
  Clone ID: MRT4577_186173C.1
gctgctcctctccgcaccgaccaccacaggttcggcgcttcggcttcttcgcttctcctcgtccgtctctctacgcctctcccgctcgcgcgcggattcctgagctggttagatccgccgccccatcgcccttctgatgcaacggagtttggagagctgcgatggggcttccgctccgggtgcttccgttgcgcgctgacaaatgcggtccccgtttggtttgtactgtcagtatcggtggctccagtgcagtgtcggtggctccactgcagcgtcggtgccttctagttttgatcccactgcagtccaattcagatcgacctttcgagcttgcctcagctacgaatccaattacgtaggcttactggcttagcctcctgcagctatacatggagatggagatgccatctcaggcttattaactagtgccactgtcttctaaaactcagctgtatttctgttatgcaaataatagaaatgaggatcgcctctgtcggggaaaaaactagtgccactgtctgctcaacctgccgcgagctgctccagctcgctctatacggagctccttggtatttagtag

SEQ ID NO: 94496 - DNA, 556 bp, Zea mays
  Clone ID: MRT4577_186174C.1
aacgctcgacgcaagcaaaccctagccaccgagctagcggggagcctggagggatgaagagcctgttcaagagtaagatcaggtggcagcaccggtccaacgaccccgcgtccccggcggcgccgccgccgcagacgtcggggccgccgcccgcgagctccccgtcggggacggcgccggcgccggcgctctccgtctctacgccggtctcgccctcgccctcctccgcggcggcgacgcccacgggcgctgctgctgctgcggcggcggctggagcgggaggggaggactacatatcgtcggaagaggagttccagatgcagcttgccatggcgctgtcggcgtcttccaacagcgactgcgcggggggcctggacggggagcagatcaggaaggccaagctcatgagcctcgatcgcttcgccgcccaccgggacgagacccacaccgcggagttcctctcccgccgatattgggattataactttcttgattaccatgagaaagttattgatggcttctatgacatctttggctcctctattgaatcctctag

SEQ ID NO: 94497 - DNA, 451 bp, Zea mays
  unsure (1)..(451): unsure at all n locations
  Clone ID: MRT4577_186175C.1
gcgagaagacgacangaggggaatatgggaatacctcacacgcgtgagaagaagcgttgtataatgaattgcggagaagaggaggaagtggaaggagacatggtgggaagaaaaggggtgcgcattgcgaaatcggacaatggcttttggaaaccctaaagtggtgaaaaaattgtatatagtgagaaggggagaggaaaaaggaggtgggagggacgaacgaaaaacgtaatacgggatgaaggaccggtatatgggggcacaaagacaaactccacgacaaatgataacccacaccaagaagagcgaggaataataaaaaggttgttttaaataaacatacttgaatgataccagacacatgtgttcacgtggttacagtcatacatgccacctcaattacgtgcaactaactatacgaactcatacacgttcttctttttctttttta

SEQ ID NO: 94498 - DNA, 505 bp, Zea mays
  Clone ID: MRT4577_186176C.1
aaagggcagggcaatttttttaaggaaggacccccagcacccttttaacaggggtgggtcaattttaacaagtttaaaaacggggggaacaaaaaaaaaaataaggggggactacaaaccccaacttgccccctgaaaaaaaaaaaacttagcgcttaggactggctgtttttttttttgaccccggacttggaaacctggagggtgggggcccccgagcttaacctaaaaagagctggtttggaaaaataaggcctgtaataattgccactaaccgggtttttcacagccttggccattttggggaaccccttggccaaaaaaaacttgggggtgaacttcgcaggggccttctgctttttggccttggaaaaaaaaagaaccacaaccaaatcctttgcaattgggtgaaacgccacaatttttttgttccccaaaccccaatgtttaaaggaggggatttttaaaaagtttttcggctccttgggaaaccgccccttgggat

SEQ ID NO: 94499 - DNA, 382 bp, Zea mays
  Clone ID: MRT4577_186177C.1
gggaaaacgaaccccatccgggggtccaaatggttgggggtctttcctggccccattttgaaattacggggctccatccaaattttggttgccaaagccccaaatttccccgtttaaaacaggttcttagactaaactcaccggtgcatgaaggggtagcagggcaattgttaacccggcacatgaacaagtttttgcaaaaggggggggcatgtttgcccataacgaaccatttttctcggggccctgtcaacgggggggaaacttagccccccaaaaacccattaatctttgggtaggcacaaaaacttttatttagccgggttaaatccccaaaaccaaggggtggtccagttccgaagttggcgcaaaaaatacaaat

SEQ ID NO: 94500 - DNA, 921 bp, Zea mays
  Clone ID: MRT4577_186178C.1
tcccggtcgaccgcgcgtccgcaatcctctgcaccacctggaagacgccaaaaaactcttttggacagaagaagaagaagctgttttgagggagggggatggcaaaattcactccacagaataatgcgcaaattccatggattctgatactagaacatggccgtggtgtgtttcacaggacgcgcctgccatctgatttgagggtcaagtggaggagcatgcagaggaagaagtgggcaggctactgatcttacacgcccccgcgcacgtagctgttgtgtctcatgctaaattactaaccataccttcatttcattcggctcgactgcagatctgatgccgttgacatggaacactgacgtggtacttgtacatagcgaatgtgcaagtaggaatggaggagggtttcttctaattacttttgcagcccttaatcctgtagcactgacgtggattggttgtgggattcggtgaacctaggcctcctctaatatgcacgtagatgatggtagagagattggtagattcaaacctacgcgaagaattgccaatagatgactttggctgcttcgttcgttcaaatcgcacatatatgttgctgccgtgactccataccgtgaagaagcttgcccaaagtctgcagttttctaaacccctggtcaaaaaaggcaccgataaaatcatatctccaagttgtcagttgactgcaaaacaaattagattttgtttggatactctagtattgacctcaatccatatatgttgagatccatgtatgttgaggtggattgggttgtaaattagtttaagttgtactccaatttacctcaacatatgtggatttgggtcaatactagagtatctaaactaagttaaggtgcatgtagagataaatacggatggaaaacctccttctgtttt

SEQ ID NO: 94501 - DNA, 648 bp, Zea mays
  Clone ID: MRT4577_186179C.1
ttttctcctgcgacccactaaagaggacttgttctcctagagccagagatccacagaaacaacggacaggagccaaatggcgcagcctgtcacctagctcaatccccatgctaccccatgatatccaatcaaacccgccgggttacgaccccttaggggatactttcccaccaacactccaagaagagttggagtggaacacaatgatccgacactgggaacaagatcccagtcattccgcatctgagacttgtctgagacatcaggtactttgtctccaggaacctgcaggactgcgaacacctcatatggtgccgatctgactgtcaccacaaagagaaagaggatcatccgtgcctttatctgcgaggcaacgaacatctcgtacacaggctatgaatatccaggaacgcaaggataatgactccaagaactaagatgtataactatctgtcccaaaggaaaacgcccttaaaattcgggtcagcatgaaatctgctccaggcatgggcgtggcctgatacttacacaacctatgcgtgatgatatctcttacacttacatacgcaaggtgcggatcctttcttttcatgaaatctcggagcaaagatcatctctccattatgtgggagtccaggggaatgctgc

SEQ ID NO: 94502 - DNA, 469 bp, Zea mays
  unsure (1)..(469): unsure at all n locations
  Clone ID: MRT4577_18617C.1
cggggcgactccacgccgtccgcatngtttgctgaaaatttntgatattgataggataaatgaccgaccacgatgaaaaggagggaagcgtcgggtgcattgtatcttgtcatcttcgtctccagatgaaatcttagcaagggcgcctagagattgtncgcaccaagaacaatcctagncttccagaaacctaaagcagaagaaanngtggatcttgatantggatgccccaggtaatgtgtttaatgtgtnntcccttgtgttcaaaccctttctttctttctttttttttcgtttgtncaatgacccaaatagccttaactggttatactcgcatcatggttgtagaattacaggaaagtatacccaccaccctgcgcgtttaacttgagagttccctcctaccgttttggctttttttcccctgtccgttttaactatgctccctgatgcagagcgagacaactct

SEQ ID NO: 94503 - DNA, 254 bp, Zea mays
  Clone ID: MRT4577_186180C.1
gtttcttggtatatttgcaaacgctacatctgtgaccatttctacctaatgtttacagcgctatctagcgttcggtatttcggcgtacctctgaccaacggagggtgtggtatgcgaaaaccgaattctatggcccttcttgtaccaactggccattggggttggcatcgcacctttataacgcgggtgccttcaacattggtggcctctataacgatagtcctttgtggtttttttcccgcatttttcgttta

SEQ ID NO: 94504 - DNA, 856 bp, Zea mays
  unsure (1)..(856): unsure at all n locations
  Clone ID: MRT4577_186181C.1
gggtacctcgaggccggccgggtttggattgcccgcagctccgcccgatttccccgcgtgcgctctctctctccgtcggcgacgagcctgggcgaccagcgccgccgcccctagcccaggtctccatcggacgcttcgccaggtcttgtttagacccaccgccggcaacgagcaactcttgcactcttttgatttcagttatcggatcccgcatcgtggaatgcttgccaaagggaggaaggtagctggaaggcgtgaagaaatgtctgcaaattatgcgtttggaccacaggatgatgatgcgattattaaacacaggcttctgactaggacaacgaccaccaggggtgagccgccactaaagaagcttcagaagaagttcatgtcctttgcaactgagatcgagaaggatgcagataacataagtgactgtgaaagactgtacaaggcctttctacatgaaattaacacctttgagctacctcttctgaaaagcaaggctgtggttgatgcaaacattagggagaaagaaagctttaatgagctgcaggttgagattgagcggcagatcttgcatgctaagactgatattgaggaccttaagaagcaacttgagcagagcaagattgagaggcagcacaaagaagagtgtgaagccatccggaagctgattagtttgcagcctccacggtcagaaactgaaaaactcattgcagaaccttgagaaggagataactgatttgaaggcggagaatgtagcatgcataaggactttggaaactgaagaagaagcagtttgcccttcctcctacatggtgggttgaggaattgcagatnctcgatttgaagatgagca

SEQ ID NO: 94505 - DNA, 530 bp, Zea mays
  Clone ID: MRT4577_186182C.1
tctccacaaacgagcatcagttcagttctttctcaaccgcaactccgcaagtccagtactactagacatacgcggcgatcacaagccagtctccactctccagcaaggcatcaggaccaagaagaagagaagagatggctggtccggcgaaggcgtcgtggatggtggccatgagcgtgggggcggtggaggcgctcaaggaccaggccggactctgccgctggaactacgcgctcaagtccatccaccgagctgccaaggccaaggccaacgtccgcgccggcggctcgcagagcacgaagcagcttccggcttccacggcggccctggtggagaggcggcgagcggagaaggcggaggaggcgctgaggacggtcatgtacctcagctgctggggacccaattagtattagcgcttagtagaatgtagtcatggcctcagatcagatttggccggttgccctgatcggttgtaaagacaccacgatgatgatgatgatgaaaatttcggctaggagtttatatcacct

SEQ ID NO: 94506 - DNA, 564 bp, Zea mays
  Clone ID: MRT4577_186183C.1
cgtaaactacaagcttcgagattggctttttgccagacagcgctattggggtgaacctttccctgtgagctatcttgatgataccaatgaaatggttcctcttacagaagatgacttgcccttgacccttcctgaattggatgatttcactccaactggtactggggagccacctttgaccaaagcaacaaattgggttagaaccattgactcttcatctgggaagcctgcgagaagagaaacaagcaccatgccacaatgggctggatcttgctggtactatttgaggttcatggatcccaaaaactgcagtatattggttgataaggctaaagaaaggtattggggtccagttgacatctacgttggtggtgctgaacattctgtcttgcacttgctttatgcaagattttggcacaaggttctttatgacatgggtgtagtctccactaaagagccgttcaagtgcctgataaatcaaggattgatactaggagaaattgagtatactgcatatagagacaatgaaggcagatgggtttctgcagactcagactcaagttt

SEQ ID NO: 94507 - DNA, 1238 bp, Zea mays
  Clone ID: MRT4577_186184C.1
ctcgagccgcatctgttccaggcccatgtaaattaggactgtgtccggtcccggatgccgatctgcttctatccctgcggccctccctgcccatctcccgatttccccgcgtgcgctctctctctctctctctctctctctctccgtcggcgacgagcctgggcgacctgcgccgccgcccctagcccaggtctccatcggacgcttcgccaggtcttgtttagacccatcgccggcaccgagcaacttttgcactcttttgatttcagttatcggatcccgcatcgtggaatgcttgccaaagggaggaaggtagctggaaggcgtgaagaaatgtctgcaaattatgcgtttggaccacaggatgatgatgcgattattaaacacaggcttctgactaggacaacgaccaccaggggtgaaccgccactaaagaagcttcagaagaagttcatgtcctttgcaactgagatcgagaaggatgcagataacataagtgactgtgaaagactgtacaaggcctttctacatgaaattaacacctttgagctacctcttctgaaaagcaaggctgtggttgatgcaaacattagggagaaagaaagctttaatgagctgcaggttgagattgagcgacagatcttgcatgctaagactgatattgaggaccttaagaagcaacttgagcagagcaagattgagaggcagcacaaagaagagtgtgaagccatccggaagctgattagtttgcagcctccacggtcagaaactgaaaaactcattgcagaccttgagaaggagataactgatttgaaggcggagaatgtagcatgcataaggactttggaactgaggaagaagcagtttgcccttcttctacatgtggttgaggaattgcagatctcgattgaagatgagcagaagagtatagcagatgagctgagagctattgctggagagcagaagatgagcatggaagaagggagcgtcggtgcttcagattccatggttgttgactgatcgagatacattcacatatgttgcagacctgcttgccaaaatccatcacatggtttttggacaatatggcgatttggtagatgtcttttgcggtgtctttgtacctcatgtaaattgaactgtatgctagtatgaagtgaaattgaagtacacgttgttgtgtaacaaagtcagttcttattgatgaattcagtcaatatatgttacttcacaaaaaa

SEQ ID NO: 94508 - DNA, 2006 bp, Zea mays
  Clone ID: MRT4577_186185C.1
gggaccctcgttgccggccgggagcaaccaaaaaccacccgctcacacagaccgccccaccaaaactggccaaaagcccccaaagagaccccacaaaactccccgttatcccccacccggacaatcttccttcagctgtccgcccgcggcccacccctccgccgtctccaccattccgccgttcccaccacgccactcgccagttcgtcactccctcctgtctccccccttgccgagacggcgcggacgccccgtcgcccaccccgatggcttccactctcctccacgccgccaccgcctcgctccagagctcctcccagcccgcacgcgcgggcgccgccaccgcctttcaccccctcgcgtccaccccatccatacgcctcgcgcgctcctcgttctcgtccaatcgccgcctcgaggtttcactccgggcggtttcggccggtcaccggttcgcggggaggggagcaccccggggccgccgcgtcgtcgccgccctagcaggggagcaaactgagggttcagaggtgggcgatgacaaggataacagcaacggggagataaagcccgaggaggctcaggaagcttggaaggtaatgctggagcagttcaaggctgaggccctgcggatgcaggccctgtcaatgcaggcgtatgatgtctactccaagagggcgagggaggtcttgctggaagcctctgagaagctgaagatacaggcagacaaagcacagaaggacctcagcgtgatcgctaccgaggttagtcaggagggacaggaatatctggtgatggcagctcggaactccccagactcgatcaaggatattacaacaacgttcagggctcttgggagattgaattggccatcagagtatgaggattatcatgtgggcattccgtttggtacctttcttacagtagggggtttcctcaacttcatgttgactggaagtacctctgctcttcgttttggtattgttcttggccttgcactgttgactctaggtatctcaagtttgagatcacatagagaaggcgaccgtcggcctcgtcttttggtgaaagggcaagctgcaatagctcttgtcatcttcttcagggagttttcagttctactccagaatggttggttcccaaaaatcttcattgttcttctcagtggagtggtggcagcattttacttctatcgcattgcaactggtaaccccaaagatctgagcagcaagaatgattcagcgaattaatgcactgggacgagtcagatggtcagtgggacgtagacccagaagattatggtctcttcctttccattttcttcatcggccttcaattgaggcaaagctcggtcctagcgtctaagatgtctgcgtgatgatacatggattcaaaagaattgtttgcttatctggcccacttcccgcactcctttgttcctttactcgtgtaatatactccgatgtcaggcccgcttaaacaacagtaataaacgaccttcgaaggtcatgtagttatcagttcagtttgtctggtgtttattgcatggggatagaagtgattaagtgaagcgttcaatgtttagtgaagtggctgaaaacaatcagggttagtattatgtaccttctcgcttgctcgtaaacaaacagatgataagttgtaaagggtacctgcagtggtacgatctagttgtttgctctaactctaagttaacctcttcgatggcacaaactaataaaaaaacttcgaaggtcatgtagaatcttcattattcttcctggtgtattcagggacgcatctgaacattgaacgcttcaaactggcacttctatccatctgagcagcaagaatgattcagcgaattaatgcttaaatcgtatctcatgcagcactgggacgagtcagatggtcagtgggacgtagacccagaagattatggtctcttcctttccattttcttcatcggccttcaattgaggcaaagctcggtcctagcgtctaagatgtct

SEQ ID NO: 94509 - DNA, 1547 bp, Zea mays
  Clone ID: MRT4577_186186C.1
tgggaccctctcgaggggccgggtccttcgagccgtccgccgctcccacccccaccagtgccaccactcgccacttcctcccgtctcctcccttgcagaggcggcgcgtaaaccccgatggccgcctctctcctccacgcctccgccgccgccgcctcgctcctgagctccacccagcacgcccgcgcgggtgccgccgcctttcaccccctcgcgtgtgccccatccctacgccttacgcgctcctcgttctcgaccaatcgccacctcgagatttcactccgggcgatctcggccagtcgccgtttcgcggggaggggggcaccccgggaccgccgcgttgtcgccgccctagcgggggagcaaaccgagggttcagaggtgggggatgacagaaacggggagataaagcccgaggaagctcaggaaatttggaaggtaatgctggagcagttcaaggctgaggccctgcggatgcaggccctgtcaatgcaggcttatgatgtctactccgagaggacgagggaggtcttgctggaagcatcagagaagctgaagatacaggcagacaaagcacagaaggacctgagcgtggtagctaccgaaattggtcaggagggacaggaatatctgatgatggcagctcggaactccccagactcgatcaaggatatcacaacaacgttcagggctcttggaaaattgaattggccatcagagtatgaggattatcatgtgggcattccgtttggtacctttcttaccgtagggggtttcctcaacttcatgttgactggaagtacctctgctcttcgttttggtattgttcttggccttgcactgttgactctgggtatctcaagtttgagatcacatagagaaggcgaccgtcggcctcgtcttctggtgaaagggcaagctgcaatagctcttgtcatcttcttcagggagttttcagttctactccagaatggttggttcccaaaaatcttcattgttcttctcagtggagtggtggcagcattttacttctatcgcattgcaactggtaaccccaaagatctgagcagcaagaatgattcagcgaactaatgcttaaatcgtatatcatgcagcactgggacgagtcagatggtcagtgggacgtagacccagaagattatggtctgttcctttccattttcttcatcggccttcaattgaggcaaagctcggtcctagcgtctaagatgtctgcgtgatgatacatggattcaaaagaattgtttgcttatctggcccacttcccgcactcctttgttcctttactcgtgtaatatactaagatgtcaggcccgcttaaacaacagtaataaacgaccttcgaaggtcatgtagttatcagttcagccccccccgtgtttattgcatggggatagaagtgattaagtgaagcgttcaatgttcagtgaagtggctgaaaacaatcagggttagtattatgtacctttctcgcttgctcgtaaacaaacagatgataagttgtaaaaaaaaaaaaaacccccccc

SEQ ID NO: 94510 - DNA, 1282 bp, Zea mays
  Clone ID: MRT4577_186187C.1
cattgggtacctcgaggccggccggggtacggcccattgggctggttctgctgcttgccgacggtccatccctacagccagccagccagggcaaaccggcaaaaccccaacgcaggagcaacacagcgtcgccggcggcgatggatcccctctccgtgctccgcgactacgctggccgcaacgagctggacaagatcatcttctccggcgacgagatccacttcggctctgactacaccttcccggcttccacccccaccgccttcgcctccaagcagtcaggtcgcccctacccgctctccgctgccgtcttcctcgcgcagcaccacgacctcaagcacaccgacttcatccaggccgcgcgcctcatcgccactcgccttgggcctcgagccgtccgccgctcccacccccaccagtgccaccactcgccagctcgccacttcctcccgtctcctcccttgcagaggcggcgcgtaaaccccgatggccgcctctctcctccacgcctccgccgccgccgcctcgctcctgagctccacccagcacgcccgcgcgggtgccgccgcctttcaccccctcgcgtgtgccccatccctacgccttacgcgctcctcgttctcgaccaatcgccacctcgagatttcactccgggcgatctcggccagtcgccgtttcgcggggaggggggcaccccgggaccgccgcgttgtcgccgccctagcgggggagcaaaccgagggttcagaggtgggggatgacagaaacggggagataaagcccgaggaggctcaggaaatttggaaggtaatgctggagcagttcaaggctgaggccctgcggatgcaggccctgtcaatgcaggcgtatgatgtctactccgagaggacgagggaggtcttgctggaagcatcagagaagctgaagatacaggcagacaaagcacagaaggacctgagcgtggtagctaccgaaattggtcaggagggacaggaatatctgatgatggcagctcggaactcccccagactcgatcaaggatatcacaacaacgttcagggctcttggaaaattgaattggccatcagagtatgaggattatcatgtgggcattccgtttggtacctttcttaccgtagggggtttcctcaacttcatgttggccggaagtacctctgcccttcgttttggtatcattcttgggcttgcaccacaacaacgttcaaggctcttgggaaattgaattgggcatcagagtatgagggattgtcatgcgggcatt

SEQ ID NO: 94511 - DNA, 846 bp, Zea mays
  Clone ID: MRT4577_186188C.1
atgaaaattatcatttattaaattacaacacgatgtagcaggcaacttttgtttcctgctactaaacgtctcatgcatgaatggtagttcatttcctacaaggccggttgccagaaatggcaacaaaaactatagtatctatctcgcccaatgccgatctatgtaccgaaatcatttgcagtgcaggcgtcttgaaatgaagaggccgaattctgtaccgagttttatttagcttccaatactatctttcgatccaccatttggtgtaggctgttgattagttcttggggtttcaatagtgcttgaaggaggagatttttcttcatcttctgttgcagaaagggcaggtggtgctccatgatgctgttgggcatccaattccattgctgcctctaatgaggatttgtgttcatttatttttccacgtgtgataatcacccggagatactctcgcaacccagtcaatactaggttttcttgcgcagcatttatctcagaaatatcttgatcacacgaaaccaaaggaaatgaacttctataatcatttccaaatgtggtattctgttcttcacacatcagtgcttgtgttgttggagatgcaggctcatttccaaatgtggcatcctgttcatcacacattagtgcttgtgttgttggagatgcaggcctagaaaaatccgatgttttagaccgatgggagcccgtttcatcgatgttgggttggtcactacatccttcgctaaggatgaccatggaggaggcttctttgaagtcctgctgtttgcagttaccattgcttaacccattatttgactgggatcccttctcttcagcaatcctcgtgcc

SEQ ID NO: 94512 - DNA, 1400 bp, Zea mays
  Clone ID: MRT4577_186189C.1
gccggccgggccgggatgcgctactctgctgctgccacggacgggcagcaagtaggcaagcacgtatcggccgggccctatatataattggcgtcctcgaggccggccgggatcgacgacgacaaacagcaagagcaagcaagagaggacgacatggcggcgccacggagcctggcggaccgcgcgctgcgcggcgtggcggacctgataaagctgctcccgagcggcacggtgttcctgttccagttcctgagcccgctggcgaccaacaacgggcactgcgccacgctgaacaaggcgctgagcggggcgctggtggcgctgtgcggcgcctcctgcgccttctcctgcttcaccgacagctacgtgggcgcggacgggcgcgtgtactacggcgtggtgacgcggcggggcctgcgcaccttcacgcccgacccggacgccgccgcccgggacctgtcggcgtaccgcctccgcgccggcgacttcgcgcacgccgcgctctcgctgctcgtcttcgccaccctcgcgctcctcgacgccgacaccgtcgcctgcctctacccggcgctggagctcgccgagcccaccatgatggccgtgctcccgcccgtcgtcggcgccgtcgcgggctacgtcttcatggtgttccccaacaaccggcacggcgtcgggtaccagcccacgcccgccaccgaggacttccagcacaaatactagccagccggttcttcgtcgttgcagagtactgtactgcgcgtgtgcctttgattgtctgtgtctgattcattcatttgcttggtggtgtgggggtgcctgccgtcggtctttgtacgtcgtctctgcttgttcatttgggctttcattaacttacggaatcaggtctgtaataattaatctgtgtatattcttcccgactgcaatgcatgcatcctcaaacacacaaaaaaaaaaaaaaaaaaaggcccctaagaggaaagtgaaatgttgtttccaatgcaagccggaatgacctcttcgtgtgctaatacacagacggacggacggacgtcaatgccttggcgtggtgcgtggtccgctcatgtgtcgctgatcaatcgcatcagtcctagtcgtcttccttcctgatgatcacccagacggcgtagatgacgcccggtaggtagccgaagaagcacaggaggaggcagatccagaactctatcttgaggccgtgcttgaggaagacgccgagcggcgggaggatgatggcgaggacgaggcggacgagcgtcaccatgttgtctgccatctctgcctgctactggtgctatggatcggaggaggaggtcgccgcagtcggcgccggagatccttgtgctgggcgtggcgtgtgtgtggaggaaccaagggtcgaggag

SEQ ID NO: 94513 - DNA, 266 bp, Zea mays
  unsure (1)..(266): unsure at all n locations
  Clone ID: MRT4577_18618C.1
gtcgtagcnctaatcttatcantnctaatcttagcnttcctaccattcctgcatacctcagaacaacgcagcntaacattccgcncantcacccaancctntantgaatctagtagccaatcnnnagtcttancatgagtcggaggccaaccagtagaacacccatntntcattnttggtcaantagcctccatcagctatntntcanttatcctcattctcataccaatctctggaattgttgaagacaaaatgttaaaatgaat

SEQ ID NO: 94514 - DNA, 413 bp, Zea mays
  Clone ID: MRT4577_186190C.1
ccgtcccaagctcaccacagagccgacggcgccaccgcgccgcggagaagagcggtccaaagtgcaaaacctggtggaagacccggcggtccagacctaaccctagctgggcagagcattgcccccggtgcctacgctcatgcccatgtccacctcggttacagggttgtctcctcatacaacgccctctgatgttctcttgggacatcacgtgcaatgatggacgctctctgtctgtctacaacaacccttttgcaggaccccttccttgtacactcctgcttccctgggtgaccgtcttccaggagaaagctctcactgtgaatgccatgcggatctgtcaggacactactatcttggttaacaagatcatagcttatccttgaggcataagtaggcgtactgtcccatgc

SEQ ID NO: 94515 - DNA, 1676 bp, Zea mays
  Clone ID: MRT4577_186191C.1
atggtggctgagggtgagacggtggcgctggagttcacacccattgctgagcgatgcctccagtaccttggcaaggtgttttttaaactctattctattgtttcttttaaaaagctaattgctcttgatatgggtgcattgattgccggtgccaaatatcgtggagagtttgaggatagacccaaggctgttctcaaagaagttacagattctgatgggcagaccattcttttcattgatgagattcacaaagttgttggagcaggtgttccaatgcacatcaacgtccattgcaaggaagatctaccagaggtaagacattggtgtgggtggctttcagaagatttacggtggctgcacctcaagcgcttcggcaaggtggacaacgccaacaagtatgagaccttgctggaggttgatatcgtgattattcacgacattgtcttattggatgatcttgacaaggagctcatcacttatgccattagaatattgtctgatgaagagctagaaacatatctaaaggtgattgcagtaatatccatgggaacagaagttatggaacatgacttgttaaatatcagagagctatatgatcatgtgttggccctactatatgactacttaagaaacaagatgaacactatcaccccaattctaacagcactgagctctaaagaaaagcattctacacccaagtaggggaggacctcaacgaccgtgcctttgtctatggcttccttagcttcctggacaagatctcttgcgtaatcgtcctatttgtcttggaattgtacgaagacacgaatgagatgtagcgagatgaggggacacggtgagcaggtacgagatgggcctgatctcctcatacttcaccgtcctctccctggtggtcacatccattctgaggctataggtcaccactccgaaagccattgcaatggaagccccactgcttgtctgacaaactgaagaaaccggtgagtgtagatgtcgatcgggttggaagaaatagttgtaccgttaggattaatatatggttcagactttgagaatccagacttgaacctggaagttcacttcattgatatgcttgtcatggtcgtgacggttgggctggagagcacgctggtaggggaggacctcaacgactgtgcctttgtttatggcttccttagcttcctggacaagatctcttgcgtaatcgtcctatttgtcttggaattgtacgaagaaggctggcaactgatcgggcgggtgcaacacatccttgttctgctgcagacacgaatgagatgtagcgagatgagtggacacggtgagcaggtacgagatgggcctgatctcctcatacttcaccgtcctctccctggtggtcacatccattctgaggctataggtcaccactccgaaagccattgcaatggaagccccactgcttgtctgacaaactgaagaaaccggtgagtgtagatgtcgattgggttggaagaaagaagaaagaaatgtgcatcctcttcaattagtttcaattagatttgaaagcaggtcactttgtaatagtatgtgtcttgtcatcgtgttggcacaacacatatgtgtatgatgtagttacgtataactcaagattctcattgctatgctttattataccaacaaagttcagatgtttggat

SEQ ID NO: 94516 - DNA, 781 bp, Zea mays
  unsure (1)..(781): unsure at all n locations
  Clone ID: MRT4577_186192C.1
tttttttttttttttttttnnnnnnnnnnnnnnnnnnnnnnnnnnnnnnnnnnnnnnnnnnnnnnnnnnnnnnnnnnnnnnnnnnnnnnnnnnnnnnnnnnnnnnnnnnnnnnnnnnnnnnaacatgacctaatagaataatttccataatttccatgggttatcagtattggattccgttgacatctctactcgagaccaccatcagtcatcccatcttcctcctccagcagcgccctttccctttcactgtcgagtggcgaaggtcggtcgttgtgtatcagcccgccgcctcctctgtcatatgtagggagtcccacgctagcgatgactaggagaagaggaggtcgtcgtcgcgcctgacatccaccaacaggccacggaggtggatggtgttgtgtccaggatcacgcccaccaatgatgaagtctgactgcctgccgcaactcgacccccatcccacgccgcctccgactccggcgagatgtcacacttcggtcgattcggaccaccgccgatccacgacacatactcactcctcgtcctcaacatcaccttccatgagtccccctcttccccgctttcgttctcgtctccagctaccctatgggctttgaattggtgcctctgcctcatttgggtggctcataggcacgatagctgatgacctcttccctctctccgacaagtacaacgagattgtcgacatctacatcccaagggaccaccgaccacaggcgagcgcgagtggaacaggctaacgatgtttctatctatgaat

SEQ ID NO: 94517 - DNA, 250 bp, Zea mays
  unsure (1)..(250): unsure at all n locations
  Clone ID: MRT4577_186193C.1
gagagacgcgaaagacaagccngnggggncgcngcccgaagcacagcccggcgcancccaacccacnaccacccancncggcgnccgccganacgancccgggcnnccaggggggggggggnganggcgacnaagaggagcgngagcacccncggcgaggcggagcngaaggggaagaaggnggacgngcgcgccgaccgcaacggcccacacaacggcgcccaggngaacaccggcaacacccggaaac

SEQ ID NO: 94518 - DNA, 569 bp, Zea mays
  unsure (1)..(569): unsure at all n locations
  Clone ID: MRT4577_186194C.1
tnnnnnttttttttttttttttggttttttttttttgttttttgggtaaggaaaaacaccaaacgggtgacggttttcaagtccaacattcaaagggttttttttggtttaaaaaacttacggggggcaacgcgttttcattttttttgatggttgccaccgttggggccgggtttttctttgtttccgcacacaaattccaggggtttttttttttttggatcaggatggcgaggtttgcaatccctggattactttttcgggatctttttcttggatggtttgcaacttggggacctttggcgattttaaacccattttgtggggggttctttaggatttcacgaacttttttacctttggtgggtttttttcataattcaacaccccaaattagacggtttgacccccaagccccattgggacattttttttaacaactggatcccttgacccttacaatttttgtttacccttttttggcacaagaggtgcagcctttcttttttccacaaatttatttcaattggggttttttttttttgcctcaacaagaatttttttttttt

SEQ ID NO: 94519 - DNA, 399 bp, Zea mays
  unsure (1)..(399): unsure at all n locations
  Clone ID: MRT4577_186195C.1
gctcctagtgccattattccacagttgctcccaccagttacttcaatggggtgggtgcatcttgccctttgtggttggtggcgtgcggctctgtgtgactttggttctgggttctttttggccgcgaccacacaaaaggggaggggggggggggggtttttctctnnncggccgcttcggtctgcctctggagggcggggttcggcctctcgtgtgtggtnttgtctgtgggttgcggggtttgccgccttctgctggttggggggcttctactgttgctgtgtccggtcgggcgcacggtttgctgcttctcgctggcttactgggtgtggtttttgctgctgcgtttcctcccctgggttcactgcggccctttgggtttttgggagatgttgttgt

SEQ ID NO: 94520 - DNA, 1119 bp, Zea mays
  Clone ID: MRT4577_186196C.1
caccccgacaattttgccctagtggtcaaaaactttgttgctccggtcagggctcctcctaggcagttcctgcgagctatactaatggtgttctgtgctcccgatgacgtttgattcttttatgtgaaaggccacggcatttgtgagatgctaatgagggaagtgacggatgtgtcacacaaattctttcagcttccttacgaggaaaagatgaagattaagatgacacgtcaaagtgggtatagagggtatcaaaagctaggagagaatgttaccaaggaaaaacgtgatatgcacgaagcagtcaattgcttgactcctattgcacctggcaaatacggagaccttggtaaaacacttgaaggagacaatctgtggcctgaatacccatcaaatttgaaggtagtactggaaaactatatcagccttgtcaaagatctttcaaggaagatcatgcgaggtatagctttggcattgggtgggcctgctgatgcctttgaaaggggaatagcgggagatccttactgggctctcaggctggttagctaccctgtttcaagcagtgatgagaaacgcactgatgatactgggatgatgggatcgcacacagactacggacttgttacactggttaaccaggatgatgacatttgtgcccttgaggtccaaaatcgttccggtgtgtggatacgtgccaacccgattcctgaaacctttctttgcaacatcggtgacatgctccaggtctggtcaaatggaatttaccaacccacagttcatagagtcatcaacagctcccatcaacgccgcgtttctgctgtgtttttctatgagaccgattttgatgctgccgtagagcccgttgagttgtgcgtggagaaaacaggcggcgtcgccaagtatgacaaggtcgtgtatggggagcgtctggttcggaaggccttctgctgctttggccatttatagggctggagaataagttatattgctactgtgaaaacaaagggtttactatatgcattgcacacacaatgatctgttgttaaacctatgtgatatatattgtgaaataaaggaccccttattgtataaaaaaaaaaaaaaaaaaaaaaaaaaaaa

SEQ ID NO: 94521 - DNA, 759 bp, Zea mays
  Clone ID: MRT4577_186197C.1
atcatccggaccatcttccctagctagcaagtagaaatggctgaccaagccaagctttcccgccacaacccctatacgaaccatgtgttccatcgtgtcatcatctcggcactcgtcctgctgctgtcctgcacggcggcgaccagtgaccggcaaccaccactgatctcccagctcgccaaggaccccgagacctccctctataccatctccgtcaaggctgacaagtcgccgctcctcctcgacctcgccggctcgctcgtgtggtcgacgtgcccgccctcgtcggcgcacagcacggtgccgtgcgaatccgacacgtgcgccgtggccaaacagcagtcctcgcatcgctgccggtacgtggacggcggccggttctgggagaaccgcgagccggggccgtcgtggtgcgcctgcgccgctcgcccgctcaacccggtcaccggccagtgctccaccggcgatctcacgagcctcaccatgaaagccaacaccaccaacggcaccatggagctgcgcccggaggagtcgttcgccgtcgtcggcgcgtgcgcgccgggccgcctactgggttcgctccccgcaggcgccgccggcgtcgcggggctctcccgtcgttcgctctcgctgccgtcccagctcgtggctcagcgcggcttcggacgcaagttctccctgtgcctccccgccttcgcgaccttcggcgacacgccggtgtacctgcccacgccggagcgaggcttcatcgactacacg

SEQ ID NO: 94522 - DNA, 500 bp, Zea mays
  Clone ID: MRT4577_186198C.1
acacacactgggacacaattcttgccattaacgaacaaaattggccacgagcatcgggcgcaaggtccaggagcgcacataacactgctcgtgcagactgtcagcggataactaacttaagtcttcaaccctagcaataacaccggcaggggtagccgcaactgtgacacaagagaaacttgcgattcaaagaacaaaccctcactggtatttgcgaacaatggcgcccggttaacaataaccccaggactgcatttttttgctaaaattgtcgggggggcgattaggccctttctccggggatcctccttgcttggtgaatgtactggggcatgttgggtacactcttagcatggatggggcacaaattggtgtgcccaaacagggccacaaggcatgcctcagcaaagggctgtaaaggaagcccacaatggtcctggcaaaggaatatattctggaagtgcccttcaatttccttaaagagcctatcgaggggcagg

SEQ ID NO: 94523 - DNA, 419 bp, Zea mays
  Clone ID: MRT4577_186199C.1
aaaaaattataaactttatttagcttgaatattaaattttatttgagaatgagtcccaccccataaaagcctgacttgttttaggattaaccaagcccttttcaatccttatttgggcccaaggatccggaccgggttggccaggcccaattttttgtgcactaatcgggacaaagatgtcaaaacccaaatgccgctggagttgcaaaaaaatcccccggatgtcatgtcaacatggtaaccacgtctatgcttaatttgacccacagcgattccgtttaaacaacaacggcagcttgtggagaaatcaaacggagccacctgggggtttttgtttaaaaataccgcccccgccaagttaactgacccctgcttctactagtatattttaccttaccaccaccggttgagtaataacc

SEQ ID NO: 94524 - DNA, 649 bp, Zea mays
  unsure (1)..(649): unsure at all n locations
  Clone ID: MRT4577_18619C.1
tagcaacatagaaaagcacagtagtgtgcgcaacccaatggcagccaaaatatttgtgcgctgctgtatgctccttggtgctttgctgcatgtggctgcgtacgnggcgaccatgtttcgccgcaatgggctcgcaaggcgnncctatagcttgccctttcttcgctcccgtacccctctcaccagcggtgtcttggggggggggggaaacccanttcttcaaccctaccggatccaacaggcantcacagctggcatcttacctttntcacccttgttcctccaacaatcatcagccctatttcttcagttacctttggtgcatttattggctcacaacatcagggcacaacagctattttttcttgtgctngcgnaccttgctgcctactctcagcagcagctgtttcttccgttcggccaactggctgcgttgggctctgcttcttatttgcggccgcggcggcttccgttcagcccgctacctgctgcctgcccccagcggtttcttcgcttcgcccaactggcagcgttgcactctcctgcttttttacggcggcngccgctgcttccattcagccagctggctggtgtgagccctgctacctttctggtgcctccccagttgttggcgttctaacaggaacag

SEQ ID NO: 94525 - DNA, 603 bp, Zea mays
  Clone ID: MRT4577_1861C.1
gacctttgtcgcttttgatctgacgtagtgacatgcggccatgtgggctgcggcaaagtccattgttcagaatttgaaagatgggtatttaaaagtgcttacttgatgaacaaaaaaaaaaaaaaaaaaaaaaaaaaaaaaaaaaaaaaaaaaaaaaaaaaaaaaaaaataaaaaaaaaaaagggaaaaaaaaaacccaaaaaaaaaaaaaaaaaaaaaaaaaaaaaaaaaaaaaaaaaaaaaaaaaaaaaaagggggggcccttttaaaggaaccaaatttaccgccccgggcttggaaaaaaaaaattttttttttggggccccaaaattaaattccggggccggggttttaaaaccggggaaggggaaaaaccctggggttccccaatttaaaccgtttggaaaaaatccccttttccccaagtggggaaaaaaaaaaaaggccccccccaatcccctttccaaaaatttggccaactttaatgggaaatgggacccccctttttcggggcattaaaaccggggggggtggggggttccccccaaggggcccctttacttttgcaggccctttggccccggttttttggtttttttccct

SEQ ID NO: 94526 - DNA, 823 bp, Zea mays
  Clone ID: MRT4577_186200C.1
cccccgcggccgcccgcccgcccgcgcacccgccggcccggccgtgcccgcgcagctacccggcgcccctgcggcaaggccgcgccggcggcgaggcagctgatcgaccgggcggtccgagcgtggcggcgcaagtacccgacgtccatggtggacgactgcgccgtcgtgtgcctgtacctgaaccggcgggcctcacctgctcccgtcgagagcagcagcggcctgctcccagttcccgacgacgtgaggccggccgcgcctttcacaggcagcagcttccgcagggctctgacgagcaacggccaggcggtgtcggaggaggggacgacggcggtgtggagagcgctggagggggtggcgcgggccaactccgtgatcaggctgccgcgcgtgggccgcgtgctgagctggcggaggcggtcgacctcgctggacgaagacgacggcggcgagcgggattgatggactcgggcggggagggcatcggaggtcgtcgttttcatggccggtacacgtagacgtagctagattcgttcgtgcatgggccgatggacgcgaggtgtaggatttgattggcctgtcgcattctggtgtggctgttgcaatggatgatgcgacatggacaggagtagcatttctttatccctggctgatgaatcagtgagtgcttttcatcctgctcgtctatgtactgctactgcacttgctgtaactgaaatttgtgggtgagattagcatctgacaacataagaagtgaagaacgtgactgcagtacatgactgatccaatagtgctaatttcatctaggtggttcggtttt

SEQ ID NO: 94527 - DNA, 440 bp, Zea mays
  Clone ID: MRT4577_186201C.1
gagagagagagaggggcccccgagtaacagttgcctttgaattccattcaacaattctgcgaattttttagcagtttcagttcagagtccaaaaggggggaaaaagaaagaaagatttggggcggccaaacttgttaaagataacagatccgcccataataatgctggctggtgcccagccaaatttttcccaattactaatcccgcattgcatgggttgcagtttccgcggcgatttccaaagccctttattattcttcttttcgttcatcttcttttgggcagcggccagtcactgattaaacacacacattcaccagcagcaatgcttgcttgttacaacagagccagaggaaggttgtgcttatgttcacagtgacacttccaatcttaagccgatgccttgtcgaacttgaggggcgttaccacctcccaggtga

SEQ ID NO: 94528 - DNA, 330 bp, Zea mays
  Clone ID: MRT4577_186202C.1
cggggcggaccacacccttccggtcaacggtccataaggtaatgtggtccaggttgaaaggccaagactcgaaaccagttcgggggaggcgtttttaatcgactgagggctaaggaatgtaccttcctggtttttgtccattagtggaagcggaggctttaaagggggtaaagatggtttaataagggtttttaatctgccccgatgggtttggttttgggcttttaacgattaattggggaagcccatgtttttttagtccaggaactgttagtaaatttttaggcttttaattaagcccgacttttaaaacctaaacgtccgtttgtg

SEQ ID NO: 94529 - DNA, 1521 bp, Zea mays
  Clone ID: MRT4577_186203C.1
tatatctaccatgtatgtatgtatgtatgtatgtatgtatgtatatgctgtcaaaaaaaaaaaaaaaaaaaaaaaaaaaaaaaaaaaaaaaaaaaaaaaaaaaaaacacattgggtacctcgaggccggccggggactcggtggcacgggcgcggacgctgccgctcgcgatatttgcgagagagagagaagagagggcccgagagccgaggacgagtgcagtctggctggcgtgatgctgcttcggagcgcgtcctcgccgctgctcaactgcgggcgcgcgccggctgcggcggcgtcggtcgagcacctcgcggtggtttcgccgttgttgtcaccggcagtggcggcgcctaggcaggggccggtgctgtgccgcgccatgtccgagggggacctcgccgcgccgctcgtgcccaagaaggacgatggacacgggagggcgccgaggctgtcggcgtccttgtcctcgtccgcctccatcttcgtcgaggaggaggacggcgagggcgaggaggaggaggaggacctggtcgcggtcgcgggggccggcgtggacgtgccgctgccgctgcgtcggctgctgacgaacacggggctggacgtgtccgccgccgcggcgctggcgttcgtggagcagggcgtcggcggcagcggcgggggcgggaaggcgtgcggcagcagcggcggcaagggtggggtcggggacggcgacggtggcagcaaccgcgccgccacggacgcccactaccggcagatgatcgaggcggacccgggcaactcgctgctcctggtcaactacgccaggttcctcaaggaggtggccggggacgcggcaagggcgcaggagtactgcgagcgcgccatcctcgccagccccggcgacgccgaggcgctgtcgctctacgcgggcctcgtttgggagaccagccgcgacgctggccgcgccgaggactactacagccgcgccgtccaggccgcgcccgacgactgctacgtcctgggctcttacgccgggttcctgtgggacgccgaggaggacgaggaagagaactccgagcccttgccaccgccttcgctgttccagggggcagctcagcgtccttccatcacagcggcctcttagatgatcgtgaactcgatctagatctcaccaccgcctgtgaacgaagctgaatctggaaccctggagagtggagagtgactgggtgataaccgtgcagaaacccccgacgagtgactcacatcgccggccggctcctcgccgcttgtgaactgaatcacggcacatgtaaaactgaatctggcagagcacacacgcgcctaagcctattagcgtctatagactttgcagggctatgtatagtagatatgtagattgagaccctgctgagcttgtacgtgcagtatgttcctagtcacttgtgtatcattactagtaatgcagtatccctcgtgaaataaacgtcaaaaccccttcctgctgcttcaaaaaaaaaaaaaaaaaaagccctgcgctct

SEQ ID NO: 94530 - DNA, 422 bp, Zea mays
  Clone ID: MRT4577_186204C.1
cccacgcatcctaggactcagcagcatcgtttaccactgcttctgtccctacctaggctagtcatcaaccacatgctctcagtgctcttcatgcaagcaacatctaccaaccatacctatctaatttcaagctcctctcttcacagtcagatgctccaacaacttcaggacagtgacctctatagcaaagtatgatgacaggacattgtccttggatctgaaggatctgcactcctctaccatccacatcaaccatgatctatgactatcacccataatcttcaccattattcagatcatgaccttttacacatccgttgctcaacttaaacctatgcaatcttgactaacagaacagatacttctattcatcagcacgcatatgatcttcatggcatctgtcttaaccatcatactaccat

SEQ ID NO: 94531 - DNA, 788 bp, Zea mays
  Clone ID: MRT4577_186205C.1
gattctcatccgctcactatagtccgatcaatcctgccgctcgcgcgaggtagaggcacgcaggccgagctaggtcaccagaggtcggagacgctcgctctcctctccatgcgacgggggataatgaaattcttggcatcaacgaggagcacatctcccccggaccgacagcaaacccgtcgcatctccgattctccaagctcttacagagtaaccggcggataccggcactaggcggggtcgcattcgacgtgtcgcacctcccggacaggctcatggagatacaaaacgacacaggcccttgttgctgatcactttttcactgaatcactagatagccctgaagaggtggatcggacatgccaacgtagctacatgtctcatactccatgatggcactggaacacttactctcgaggaaggtgaccctgatctatacacacttgattggcacgtgctgtacgcggtctgctaagaccacgatactggaaagaccctctcgacacatgttattgggaccctgaagatgctggaacttgagaagagagttggaagtagcaactggctgacatcaacatgctgatggttatggtgatgcacttgagcatactcaaactgaagcctacatgtggcaatgttaccccagttgaatccgggacgtgttatgatgagggtaagcgtgccgctgagacgctgatgctcgactatctcaggcagcatggcattgaaatccgaattgcctggagtttccacgcctatgggccaatgatgaacatagacgatggccg

SEQ ID NO: 94532 - DNA, 2728 bp, Zea mays
  unsure (1)..(2728): unsure at all n locations
  Clone ID: MRT4577_186206C.1
ttgggtacctcgaggccggccgggaatccttttgttttgttgagttataagtacaatattatttattattatcgtattatcatcccagcatcacacgttatcaggctgaagtcaatccaaatcacatgggaattgggtgtttggtgtttatcatccatccgaaaagcatgcaagaagccaatcaagatcatcacataacatcacatgtttttcgtcgtgacgtctcacactcccactagttgattgaggaagagacctgctcgcttctccctctccccgagtcgatcggtccagtccgagggaagaaggcaagaagctcccggcgcgcgcgcgcaagcgagaggaaatggcgaccagcaacggctcaggggtcgcgcagggggaggaggggaagacgccaccgcctgcggggtcgatcggcgggtacgagtccctgcacaggctcctggaggccaacctttcccccgatctattccaggaagcaagtcgattgctgctgggactgaattgtgcacgacctcttgaggctatctcactgcctgacgccacaaccactcttgcggaaacacacagttttgatttgcaggcattccgttttagtgcagacaaagagtttctgaggcaatcaagagttgttcgagtaggtctaattcagaactcaattgctgttcccactacttgtcactttgctgaccaaaagaaggcaatcatggacaaaataaaacctctaattgatgcagccggcgcttctggtgtcaatattatgtgcttacaagaagcctggacaatgccttttgccttctgcacacgcgagaaaagatggtgtgaatttgctgaaccagttgatggagaatctactcaattccttcaggaacttgcacagaagtataacatggtaatagtgagcccaatccttgaaagggatataaaccatggggagactatttggaatactgctgttgttattggaaacaacggcaacataattggcattcatcgaaagaatcacattccaagagttggtgatttcaatgagagcacatactacatggagggtaacactgggcatccagtgtttgaaacagcttatggcaaaataggagtgaacatttgttatggaagacatcatccccttaattggcttgcgtttggtctcaatggagctgaaatagtgttcaacccatctgcgactgttggtgaactgagtgaaccaatgtggcccattgaggcaaggaacgccgcaattgcaaacagctacttcgttggatcaattaatcgggttggcacagaagtgttccctaatcctttcacatccggtgatgggaaaccgcaacacgcagactttggccatttctatggatctagccatttctcagcacctgatgcctcctgcaccccatctctatcacgctaccgagatggcttgatcatctccgatatggacctcaacctatgccgccagatcaaagacaagtgggccttccgcatgactgctcgctatgagatgtatgcatccttgctctcagagtacttgaagccagatttcaaacctcaagtcattgttgatcccttgattaataagaaggcataaaaactgaggtatgctggatacttgggcttaaaaggaggtcatttgtgtattgacatgaacaggaaaaggtttaccatttagcagaataatgtctacgatgaagatgcaaaatggaggaagtttctttctttttttttcctttacatttccacatactgtaaaaatgtgtttggtgtagtttgagcttcttttactcaatattcgaaacagtaatgcttgttttgttgtataatttgctagagatttttcgatgaagaaattcaacaatctttaaaccaccgagaataacttagaaactccttcaaacataatgcttaattagttcaagagttattgttctcccatcattccatcgatcgcggccgggaggctcatattcgtgccgccgtgccgtcgcccgtgcccgttccttgcttcttggatggatgccgtatccaaatccagtccagaaggcgtgcttgggcgaactgactggataacaaattgcgaccgggaagagtggtccagctgccccggcagttgaacggtggaagtttgtgaacagttttagttctctgaattggcccaattaacgatcaagcggtcaactagtcactttctcttcatataggtggttattttgcaccactgagcttagtaatcacgtggactataaacgtgcttattgtaataatattcatactgatgcctgatggttgtgtacctcttccaacaacaaaaaatcgatagaatttagtacatgtcctcttttgttcctagacagagcctcagatgtaatggtgtttacttagcaatatcggtggagctgaaatttacctatggcctgatttcagaatcgtaaatactgtaccctgctgtactcaactctcgatctgtttcattgggtcgtaatcatatggatatctagatgacatttaggttcactttgttgatactggcaactttttccttttgacaggaagcaagtcgattgctgctgngactgaattgtgcacgacctcttgaggctatctcactgcctgacgccacaaccactcttgcggaaacacanncagttttgatttgcaggcatttccgttttagtggcagacnaaagagtttctgnaggcaatcagagttgggttcgagtaggtctaa

SEQ ID NO: 94533 - DNA, 305 bp, Zea mays
  Clone ID: MRT4577_186207C.1
ctcagccgtacgatcccctcagccacctggttctccttctccttcaccccccagctctccttctccctccccacatctctcttctccctgcgtgccgccaccgccgcgacttgcgagtccatataattgttaccatttataatttcaatcgtatatgaaatgtcttctgtccttaaaaactccatgtgaagacatgattcctatttcctaaagaagggcagacctagtgtagtggtgagagctgtctcattgcatcagatcacagattcaaagcaatatcttcgcaatttatgagagaacgttaa

SEQ ID NO: 94534 - DNA, 278 bp, Zea mays
  Clone ID: MRT4577_186208C.1
tctttgtttaaattttttttcctttttttcacgtgacaacacgtgtacacatgtgtttaccggagcgagaacgcaacagcgggttaggagtggctctgacaggtgataaacaataggtgagcgtgagaaagatgcgggctcataggaacaccctcaaaaggaagaatacaagagtaactcatacacataagaggggggagagcgccggggctttaaacaatggtcagaagaacgcagctctaacccggaaaagacactcccaaagggtgtgcaaaaca

SEQ ID NO: 94535 - DNA, 396 bp, Zea mays
  Clone ID: MRT4577_186209C.1
cgcacgcttccttagcaacgtactaggtggacactagtcgcaacaatagagctacaatggttaccaagagatttaacttccttatgctattagctgtgtctgcatgtgttagctaacgtagacagatgaatggctgaatgctgacatgcatcctatagctatgcgtcattgcccacatgcattgcataagggctagtttgatgatgaggaaacgcaaagtagttaactcctataagcattgaacaggcgatcacagcaagcaacatacatttatcacacttgtttaaacaatggctagccatatgttgggtgtaatgattggtgcagactattaaggctcagcagctgcagcgactatggctacctgagatcaaccaagtacgatgtgcaaacctt

SEQ ID NO: 94536 - DNA, 544 bp, Zea mays
  Clone ID: MRT4577_18620C.1
cgctcgcatcctctttttctcttctatgtccgcacgtccatccatgtctgctgtgggtcacgctgctcacacagactcacacatgcgcccccacacgatccatctagacatggtgatgtactgtaacgactgtagcggaccattcatcataaacaatcccagcggctaccagattatcctgatcggagactttatcagatcgcttagaaaaagaaagggttctacctgagggcgatgaagatgatgaacgtttacaggcccttccatcagcagcactacgcttaccttaccgacacgcctttcttacccagtgtgggggagtacataatttccggactggtaaaacccatggtgtaccaagctaaggacgtttggatgacatggccgctatatcattgtggccaacaagccatgagaggcacacccctctaccattcgaacagactaccacgctgaatgcggaatgaaactcatccatggaagcgacttcaagcagaacgggaagaaggagatcgctctctggttacctgtacgcttggcacag

SEQ ID NO: 94537 - DNA, 248 bp, Zea mays
  unsure (1)..(248): unsure at all n locations
  Clone ID: MRT4577_186210C.1
cccacgcgtccgagcaaagatggggggccgcagaacgatcgtgttgagcctaatccttggcttactggcagctgccaatgcggtgccctttgatttcttttaccttatcctcatgtggcctggagcatactgcgaggacagcgacaatggctgctgcgtgnctccaagtacctggcttaacccggcgngaggagtttcttcgtnncgagttctttcccaaaaccttttcgaaccttggtcccattttt

SEQ ID NO: 94538 - DNA, 456 bp, Zea mays
  Clone ID: MRT4577_186211C.1
gggcaacatctaatctccccttattattttttctcccttcaacaaataaatctgtgacaatgtacaactgttttaaaggcttcaaatcaatggaattgaccacccacccaaccctgacccgactaaccttttgttttttgtacatcacggaaacaacaggtttgtcacttcagcacaaaaaaaaatcaagggatgcgcatcagttcctacccatttttatcacctgttcctatgctttaaaggtggctcgcgttttgattggtttaaacttaacccccatgctttaaagaaaaaggagctttggtgatatacaaaacggatttaaagggcttccagggctacagtttatttggcttggcctgaacaggccatatcccatgaaaaagtactccattggtatcaacattgcatgaaggtgtttctctgttacaaccgacccacaagcttgtacctcca

SEQ ID NO: 94539 - DNA, 375 bp, Zea mays
  Clone ID: MRT4577_186212C.1
aaacccaagggagccttttggccggggggggcgaaaaacccagcagggcccaaaacaaaagaaaaaaacaaacggggggaatggggaaaggggacaaaaaacgggcgggctcaggggggtacactttccaacgggaaaaaccccccccaccctaaatatccagccccctaatgagcgcccaaaaagcccgagaagaaccaaacctggcggaaaaaaaaaaaacttggggaaaaagatggtggaaaacaattcaaggcttaaaaaaaaaccctaacccggggaaagaaaagggcttgaaagggcccaaagaccccggccaatagaaaggaggcaaattttaaaagggatctcaggggcctaaaaagcaatgggaaa

SEQ ID NO: 94540 - DNA, 389 bp, Zea mays
  Clone ID: MRT4577_186213C.1
gtatgaaccagtgacactcagtgccatgattccagctgctctggccggagggaaggtatcacgtagtgcacgaactgtgaatgcattgatcagtactctcttcctagtctgttatataacaaagccttgtcagcaaataggcaaacactatgctagaattaacaaataaaatccatctccaggctaatatggataaagttctatttttcatatatatacaggattacaggttaatcctagatagaagtggttttcgtaatatcttttctgttctgtaatcatgtttctgcagcaatagatagtgttgaatacccttaatcaggagtaccagtcaggtcagctgtgaaaaaagtgtcttcaacagaaacataaaccttgcgacagcaacg

SEQ ID NO: 94541 - DNA, 421 bp, Zea mays
  Clone ID: MRT4577_186214C.1
ggccgccaaaactttagctaaattatgcttcttggaccttttgctagtgttgcttctgaaaccgggctcccacaatgctgcactggctcggtatgaaacactgcttggtttccgccatacctatgcaccatcgaatgtgttcaatgtgtggaaacccgcaatgagggcaacccactacatggatcctaacaggccatgtgcgaaaaggcatcatcaccatgtatgacccttgaatgctgcaacaatcacatgacctatttcagtaaatacctttagttcattttgttgcacataacatcaagacacaacaactactacaacttgtgctagcaaaccttgctgcatactctcagcaacatcatggttttacattcaaccaactggctgaattgaactctggtgcttttttgccactaccatt

SEQ ID NO: 94542 - DNA, 1482 bp, Zea mays
  Clone ID: MRT4577_186215C.1
gcgaagtggaactgcaaccgccaccacgggccccaccgcggcaaatcgccaccgacccagagaatggagactggagccgtctcctcctgtcctcccgagacccgactcaactttttctcggcacgccactgccaattccccgccagcagcagaaatcacactccgcttcatcttccgctggatccctagtctacgccggcctaacgccttgggacctccgctgctgttctctcgccggtcatttttggttcaggggctgatcgcttgatcggatcggtgtcgcagccctatacatcatacatgacgacgcccggctcctgtcctgcgacaaccgccgccacccaccctcccatgtgcgccgctagcgccgcaggtggatcgcaaaaaatggtgcgtccgcgactagtgctcttcggggactccatcaccgagcagtccttccgccccggtggctggggtgccgcactggctgatacctactcgcgcaaggctgatgtagttgtcagaggctatggtggatacaacacaagatgggctcttttcttagtacatcacatctttccgctggatggtttagcaccccctcttgcaaccactattttctttggagcaaatgacgcagccctgttaggaagaactggcgagcgacaacatgttccagtttcagaatataaaaataatctcaaaatgattgttaatcatttgaaggattgttctaattccatggttattgtgcttattacgccacctccaattgatgaagaaggaagagaaagatttgcacggtcactttatggacagaatgcgaggaagctacctgaaaggacaaatgaaatggctggggtctatgctggttattgcgtcgaactagctagagaaatgtgtataccctgtgttaatatctggtcaaagatgcaggagacagaaggatggcagaaactttacctaagtgacggtctgcatctgacacaggaaggaaacgcagttgtccacaaggaggttgtcgaagcattgagaaatgctggtttcaaagctgaacagatgccgtacgactttcctcatcactccaaaatagatggcagttgtccagaaaaggccttccaatgaaatgatttcgagttgtgtgatgttttggagttttggatcctgcattgaagattacgataacgtccaatgacatgagcttgagctgttacattttgggagtttgaaatcttgcgtatattttggagtttgagatcctgcattgaagattgtaatttcctccgtgcaaaattaaggacctaggcttctccaagatgccggtgttgcttcttctacacttacattgttacattttctggattaagacatgttagcttccatttctcgttattgtggtggatggtttggatattgaacgaattgaatattcggatatcatggtgttctgaagataccggataaagaactggatgactggatacagaaacggatactgat

SEQ ID NO: 94543 - DNA, 406 bp, Zea mays
  Clone ID: MRT4577_186216C.1
gttctaatatctttttttttttactattatacactttttttccttttaagaatgcgtacgattattcatacatattgattcatgaattgagggtacttatggaaaggcggaaggggggacgaaaacgactatagccaagaaaaacatgagcagcacccttcgtggctcggcgaggtaatacttcacactaagggacgcgggcaaaaaaaacccagggaaaaaaaaagccctcgtactgtccagtaagtcaacagcgtcaactccaacaagtggaccaatgctgcaacaaaccccgttgggcattgcaacggggtcctacagctactgacgctgagctgcgcacacgataaagcctaagacaaacccaggggcccacgggaaaacacgaagaacagaaggactctgg

SEQ ID NO: 94544 - DNA, 337 bp, Zea mays
  Clone ID: MRT4577_186217C.1
cacaaacggacgcgcaaactctggcacgagcccagcgggagttaaactccccatgggggccaccgatcgaccttcaagccagccttgggctattacgaaggcgtcgcgcgcggttgtttgagaggaaacgtggaagatgagggagtgcatatccgcacacataagaccaggccgtatacaattccgcaacgcgtgctggaaaatttactggctcgaacacaggaattagggatatgccccagcgacttgcactacctacgggagacgcgcatagggcactttgaggacaatgatcagacggagatgtgccacgaatgaccatgcgtgtgcaatgatg

SEQ ID NO: 94545 - DNA, 644 bp, Zea mays
  Clone ID: MRT4577_186218C.1
gttgcgatccaagacggcaggcgagctccaggttcagttgttcggaggaagcccagcgccggcgatggcgagtgtaaaccccgcggtggcggaggcagaggcggaggcggtggggcggcgggacgagctgtcggagtcgctggctgagctcttcaccaacgtctccctcatggtccgcggcgagctccaggggactaacaatcagcttgctctgcttgagaagatgaatgatcgcgtatcacaggaatacagcaactacggtgacatcgccgctggtctgcgagtatttgtagagcagctgaatgagaaaaaccgaggcttcgaggattacgtgtcgcagattgatgcgatagatcaacaggtgactgagtttgaggcagtggtgtccatgctcgacaagcatgttgccctcttggaaaagaaagtaaaatcggcctatcacatttctactacccaatgatttccatccatatgccacaatgcagattcttttgccaacacttgagcttatccgggaaacatattattatatattctggctgaggaaacaacgctgtagctgtagctgttaggtgttcccaccgttgaaatgatgcaatcagattccaagttgtgctgtagtaactttcagacaaacaggcagc

SEQ ID NO: 94546 - DNA, 298 bp, Zea mays
  unsure (1)..(298): unsure at all n locations
  Clone ID: MRT4577_186219C.1
aggggggtaaacactatatagagagaataaaacacaacccaatagcacagggtcacaaggaacaaaccaccgcaatgaaacaataccaaaagggaaatgcactaacaagcaagaactactacacatgaaaccacccaaagcctatccataaagaagcataacatgaatgttgcaaagcaatgacccaccccccgctggacaaagggaaagaactcgcacctacgaagcngctgacacctgccaagaactgcggaccccttcggactaaaccccccagagcccttcggtaggaagcgcc

SEQ ID NO: 94547 - DNA, 183 bp, Zea mays
  unsure (1)..(183): unsure at all n locations
  Clone ID: MRT4577_18621C.1
acttccatatggaaatgcttctaattctaatagcaaacttacttcaacggacnattgggganatgttttgtggattttctctattcacaacttactaatcctacacaccctaacttttctattcctacttctatccattggcttttcacttttctaatataaccatattttactacattattt

SEQ ID NO: 94548 - DNA, 143 bp, Zea mays
  Clone ID: MRT4577_186220C.1
agttatggagttttaatgggaatgaaccggccaatggtcatggggattggattgaatgaacaacagactacaatggccatgaaccatcatcctatgggacatggcatgattgatgaaccaacaaccgatgtcaaataatgaac

SEQ ID NO: 94549 - DNA, 981 bp, Zea mays
  Clone ID: MRT4577_186221C.1
cgagctagagctagagctatagagatcactctccttctccgcgtgaggtagtgacgtgacgcccagccatggcaacaatggcactgcgcgccgtggcgacggcgctgctggtggcggcggcgtccgtgtgcggcgcgtcggcgtcgacgctggtgctgtacaaccggtgcggggagacggtgtggccgggcatccagccgagcgccgggaaggaggtgctggcgcgcggcgggctgcagctggcgccggggcggtcggcgtcggtgcggctccccgcggggtggtcggggcgcgtgtggggacggcaggggtgctcgttcgacgcgccggccacgctggcggagatcaccctgggcaccgcgccgtcccaggacttctacgacgtgagcctggtggacgggtacaacatccccatcgcgatgacgccggtgcacgggtcgggcgcccggtgcgcggcggccgggtgcgtgagcgacctgaaccgcgtgtgccccgcggggctcgccgtccgcggcgagggccgcgtggtggggtgccgcagcgcctgcgccgcctacggcgcgccgcagtactgctgcacggggcagttcgggagcccccagcagtgcaagcccacggcctactcccgcctcttcaagtcggcgtgccccaaggcttactcctacgcctacgacgacccgacgtccatcctcacctgctccgccggcgcctcctacgtcgtcaccttctgcccgcaccgccgctgaactttttatttttttaggtcttcggccgcgtgttgttagttatcctctgcctgcgtttgcgttttgatgttgtgcgtgcgttcgtttcatttgcctccgtcacgcgtcttcggaatctccagatcttcctccctaagtatagcaatgcgctcggctctactgctgctgcgttttgaaaacctgggatctgaattctgaaatcttgaacagtaaaaactagctacgggcattctcc

SEQ ID NO: 94550 - DNA, 1144 bp, Zea mays
  Clone ID: MRT4577_186222C.1
ggtgacactatagaagagctatgacgtcgcatgcacgcgtacgtaagctcggaattcggctcgagcggcgacaacccacgctccaagcgagctagagctagagctatagagatcactctccttctccgcgtgaggtagtgacgcccagccatggcaacaatggcactgcgcgccgtggcaacggcgctgctggtggtggcggcgtccgtgtgcggcgcgtcggcgtcgacgctggtgctgtacaaccggtgcggggagacggtgtggccgggcatccagccgagcgccgggaaggaggtgctggcgcgcggcgggctgcagctggcgccggggcggtcggcgtcggtgcggctccccgcggggtggtcggggcgcgtgtgggggcggcaggggtgctcgttcgacgcggcggggcgcgggcggtgcgccacgggcgactgcggcggcgcgctctactgcggcggcgccgggggcgcgccgccggccacgctggcggagatcaccctgggcaccgcgtcgtcccaggacttctacgacgtgagccttgtggacgggtacaacatccccatcgcgatgacgccggtgcacgggtcgggcgcccggtgcgcggcggccgggtgcgtgagcgacctgaaccgcgtgtgccccgcggggctcgccgtccgcggcgagggccgcgtggtggggtgccgcagcgcctgcgccgcctacggcgcgccgcagtactgctgcacggggcagttcgggagcccccagcagtgcaagcccacggcctactcccgcctcttcaagtcggcgtgccccaaggcttactcctacgcctacgacgacccgacgtccatcctcacctgctccgccggcgcctcctacgtcgtcaccttctgcccgcaccgccgctgaacttttatttttttaaggtcttcggccgcgtgttgttagttatcctctgcctgcgtttgcgttttgatgttctggcgtgcgttcgtttcacttgcctccgtcacgcgtcttcggaatctccagatcttcctccctaagtatagcaatgcactcggctctactgctgctgcgttttgaaaaaaaaaaaaaaaaaaacctgggatctgaaatcttgaacagtaaaaagtagctgcgggcattctcc

SEQ ID NO: 94551 - DNA, 2075 bp, Zea mays
  Clone ID: MRT4577_186223C.1
caccaatttctcagtacaccatgctaacggcctcgccgtcgtctcaggtgaagccgcaacaatggggtacatgcggggtcagcgtggcatcgacgccggcgcttcttccgccaccggccgccggacggcttgtcgccgtcgagaccaggaggaggacgaggacggttgcctccgccgcgcttggtcctgtggccaccgagcccgcagaaaggtctcccgtgccacagcctccgccactgtccagcgacgaggagacggtgctccggctcggcaactacgtcccggtcttcgtcatgctcccacttgaagtggtgaccaccgagaacgacctggaggacgcggggaagctgcgggcgcagctgcggcggctgcggggggccggcgtcgacggcgtgatggtggacgtgtggtggggcgccgtggagggcgccgggccggcgctgtacgagtggcgcgcgtaccgggacctgttccgggtcgtgcagggcgaggggctcaagctgcaggccatcatgtcgttccacgcgtgcggcggcaacgtcggcgacgacgccgtcagcatcccgctcccgcggtgggtgcgggaggtcggcgaggccgaccccgacgtgttctacacgagctccagcggggcgcggaaccaggagtacctctccattggcgtcgacgacgagccgctgttccatggcaggactgccatccagttgtatgccgatttcatgaagagcttcagggagaacatggcggacttcctggactccggcctgatcgtggacatcgaagtcgggcttggccctgcgggggagctgaggtacccgtcgtatccggagacgcaggggtgggtgttccccggcatcggacagttccagtgttacgacaagtacctggaggcggatttcaaggcggcggcggcggaggccgggcacccagactgggagctgcccgacgacgccggggagatcaacgacacgccggaggacactgggttcttcacggcggagcgagggacctacctcaccgagcaggggaggttcttcctgacatggtactcccgcaagctgatccagcacggagacagggtcctggatgaagccaacaaggccttcctggggtgcaaggtcaagctcgccgcaaaagtgtccgggatacactggtggtacaggcacccgagccacgccgcggagctgacctcggggtactacaacctcggcggccgggacgggtacgcgccgatcgcgcgcatgctggcgcggcacgacggagccgtcctcaacttcacctgcgcggagatgcggaactcggagcaggccgaggaggccctgagcgccccggagcagctcgtccagcaggtgctgagcgccgggtggagggagggggtcgaggtggcttgcgagaacgcgctgagccggtacgaccgccgcgggtacaaccagatgctgctcaacgcgcggcccaacggcgtgggtctctccggcgccgcgcggcgcagggtcgcggcggtgacgttcctccggctctcggacgagctcctggcgagcaacaacttccggatcttccggacattcgtccggaaaatgcacgccgacctggattactgccctgatgcggaccggtacggtcggcccctcaagcccctagagcggtccgcgccggagatgcccatggagcggctgctggaagccaccgcgccggcgccggcgttcccgtttgatccggagaccgacatgagcgtcggcggcgggctcgcagaggctgtcgactgggtgctcgacaagatcgcgtggctatttggataggatcagaatcagatcacactcaggcgatcagcatttccgttggacacgaaccattgatccgcaacaggaatggcatggccagtgatacatgcagttgcgctagcagcaccatgtcatgacaccgacattgtacctgtacacgcttctgcttcgtcctccttttaggggaaggctatttatgatatactgatgaaatttacagcatcttgggtaagatgttttagatgttgtttgaattttcacgtattcatgttaatgtacgtgtattaggggtggttt

SEQ ID NO: 94552 - DNA, 289 bp, Zea mays
  Clone ID: MRT4577_186224C.1
cggaccgtggggtgcgggaggtgtccctccgcgccatcgacgcgctgtgcctgtcgccgcccaagtccaccgggcgtctcctcgccgccgggttcctcgaatgcgtcctctccctcctccgcaacggcgacaacacgctgctgcagcactgcgcgctgaaggccgcgcaccgcctgtgccaggtgtcggaggaggtgaagaaggcgatgggcgacgccgggttcatgccggagctggtgagcgtcctcggcgcgtccagtaagtcccccgatgcgcgggatatggcggg

SEQ ID NO: 94553 - DNA, 508 bp, Zea mays
  Clone ID: MRT4577_186225C.1
tcgttcgtccgtgcgccggtagcacgtcaccggggaggccctgcgccgcgcggtgccggggagacccacgccgttgggccgcgcgttgagcagcatctggttgtacccgcggcggtcgtaccggctcagcgcgttcttgcacgccacctcgatcccctccctccacccggcgctcagcacgtggtggacgagctgctccggggcgctcagggcctccttggcctgctccgagttccgcatctccgcgcaggtgaagttgaggacggcgccgtcgtgccgcgccagcatgcgcgcgatcggggcgtacccgtgccggtcgccgaggttgtagtaccccgaggtcagctccgcggcgtggctcgggtgcctgttccaccagtgtatcccggacaccttcaccggcagaacgagccgttcgctttattaattccccgaggcaattcagcgggcacaagacaacactgggagcggccgggacgcacttttgcggcgagcttgaccttgcgcc

SEQ ID NO: 94554 - DNA, 278 bp, Zea mays
  Clone ID: MRT4577_186226C.1
ggatataagacttgacggttccatttcaatgaaacagatgaaattgtcaagtcttatatccaaaaccaaaactcaaacgctcgaaggcgtaaattttatatagctggcgtccacttcttttcacacatctagaaatgctagttttaaccgtcgactggcgagacttcctggacccctaccattttttgaagaatacatgcattcacagtttgtgaattttttagcctatatataattgttttccttatgcaaaaattttattttattatcattttttg

SEQ ID NO: 94555 - DNA, 635 bp, Zea mays
  Clone ID: MRT4577_186227C.1
accgctgatttggcagttgacatttcaggacgagacacaatttctcagtacatcatgctaacgggctcgccgacgtcctcaggtgaagccgcaacaatggggtacatgcggggtcagcgtggcatcgacgccggcgcttcttccgccaccggccgccggacggcttgtcgccgtcgagaccaggaggaggacgaggacggttgcctccgccgcgcttggtcctgtggccaccgagcccgcagaaaggtctcccgtgccacagcctccgccactgtccagcgacgaggagacggtgctccggctcggcaactacgtcccggtcttcgtcatgctcccagtaagctaaagctaaacgttccaccagagacacgcctgcaaaaaatcgatcaagttgcatcactgtccaatgtccatgatgaacacgacgtggcagcttgaagtggtgaccaccgagaacgacctggaggacgcgggggaagctgcgggagcagctgcggcggctgcggggggcccggcgtcgacggcgtgaaggtggacgtgtggtggggcgccggggagggcgccgggccggcgctgtacgaatggcgcgcgtaccgggaacctgtttccgggtcgggcagggcgaggggctcaag

SEQ ID NO: 94556 - DNA, 207 bp, Zea mays
  Clone ID: MRT4577_186228C.1
cctcggttttttttttttttttttttttttttttttttttttttttttttttttttttttgatgcacgggcggtttacaaacaaccacactgatcggccattcgcagcccgcgacagcggcacagaacctgctcaaaacccaactagaggagactggacacacgaaaccgacggggacacgccatctctctgacgggcgctagacat

SEQ ID NO: 94557 - DNA, 118 bp, Zea mays
  Clone ID: MRT4577_186229C.1
atctagggaggaattgtacatggattcaccctgtgcaatacagttatgccggtcttaataagatcaatactagtttgtagtcacaggcagtacgctggccatcgcatgagtcataacc

SEQ ID NO: 94558 - DNA, 719 bp, Zea mays
  unsure (1)..(719): unsure at all n locations
  Clone ID: MRT4577_18622C.1
cgtccccgcccacgcgtccgcggnacgggtgaaacttgcttccttcgacggccgcattagtcctcccgtacgtcccggcacgtcgatcacggcaaaagctagccagcgcacaggacctgcggaggagctcggttttcgatcagggtcaataatcaccacgccgacgctgatgacgccggcgtcccaggcggcaccgccgcgcgcgcggcggtccgtggtggcggagctggagggcgcgctgcttcggagcgcggacacgctcccgtacttcatgctcgtggcgttcgaggcgtccgggctgccgcgcttcgcgctgctgctggcgctgtgcccgctgctgcggctgctggagctggcgggccgtggcggcctggcgctgcgcgccgccgcgttcgtggccccgcgcccgtgacacgcgccgagctggaggccgtgtcccgcgccgtgctgcccaagttcatggccgacgacgtcgaccccgcggcctgggcggccttcgggagctgcgaggggaggcgcgtcgtcgtcacgcggatgccccgcgtcatggtcgagcgcttcgccaaggagcacctcggcgcgcacgcccgtggtcggctctgacctcgagtacagccggctcaggcgctccacggggctcctcaaaggcgcctgccatgagggccgtcgccagccgtgcccgcgcgctggtcgccggcgacgaccttgcggacctcgcg

SEQ ID NO: 94559 - DNA, 1045 bp, Zea mays
  Clone ID: MRT4577_186230C.1
ctcgaagtgggcacctcgaggccggccggggcacacgctcgcgattcaacaaagacgtacgtacatgcacaaaactagagcgagctgtgtgtgtgtgtgttcgtcatttcctcgatcatggcgaaggcgcaggcgcaggtggcggcgaggttcatgatggaggcgccgccgccgcaggtggtgtcggtcatgcggcggaggaaggcgccgaggagcctgagcaccatcgccgaggacgacagggagatgctggcgccgtgcgggtcaccgtcggaccacggccacgtacatacacataactagagcgagtagagataccgtctcttactgtgtgtgtgtgtgtgtgtttatcaactcctcgatgcatggcgaaggcgcaggcgcaggtggcggcgaggttcacgacggaggtggcgccgccgcaggtggtgtcggtcatgcgacgaaggaaggggccgaggagcctggacaccatcgccgaggacgacagggagcagcagctggcgtgcgggtcgccatcggaccacggcctcgcgacggcgtggtcgtcgctccagaggataccgacgccaccgcagccgccgcgggagcgcgcaggtgggtccgtgacgagggacctcagcaagaacttcttggactcccacggctgccagcaggccagcggctgggagggtttacacatgctaggccaccggcgagccgtgcatgcgctggagcttcacaaggtcggagcttgttgaagagggaagagagaaaatctagcttagctgcagtgagcttgttcgggagaaatatatttgtaccacttccacacgtgcgctcatgcatgatactttctccgtttttttatttaccacattttagtaaaaaatgaactagcggctgataaatattcaaaaacggagataatattattttggcttagctttatcacgcgtgatgtggagagtatatatgtttgctgtgaagttgtttttcatccagcttcaatttcgcttgaaataactgtaatagttaatcaaaataaacatacgatttctcctct

SEQ ID NO: 94560 - DNA, 306 bp, Zea mays
  Clone ID: MRT4577_186231C.1
gggcgtgccgctgaagctcgttaagaggcttgccaacacataccagtgcttttttggcatcataggccatcgagaaacagggtccccgtctccgtggtcctggtctcaacaaggcaggcaagttacgaacgcatgggtactcaccaggaatcccttgagtgcaaggtgaacgagactaacgcaaccgtcaagttccagctcaagaaggtcctttgcatgggtgtcggcgcctcaacctttttcctgttaggttagcgtttacatcttagctagaggaagagagggggctttcttttttcttttctt

SEQ ID NO: 94561 - DNA, 340 bp, Zea mays
  Clone ID: MRT4577_186232C.1
accaaaagcatgtttttttttaacatggttaacacatgctttaacagtgacaattgacggattgggccacgagggtggtttgcttgtgtaatagcggaacatggtgacaaccggcggcactggaatggggcatgggcaggcttttcttttaacaccctcccctgacatgccatcaaaagggtagggggccttataccaggcccccccatcagaaggggtagacgcatcctgaaactgctggtactacaataccaggtcatccaaatagaaaacggcgcccagggaactccctctcgaacatgccctggccccaaaaccagggcaaaaaagccccccccct

SEQ ID NO: 94562 - DNA, 253 bp, Zea mays
  unsure (1)..(253): unsure at all n locations
  Clone ID: MRT4577_186233C.1
ttttaatgntttctttatttattaattttttgtcattgtgcctttttggggtcaggttccattaccagggaacgggacatgactgagctaaaaagcaggggattccggaataacgagagacggcttgtctaaacctggagggaagtacgtgcacaaacatgtttccaacccaccgcgaagacaaatttttcactgaatgaaagaccccaggcacttgggcaagcccacgtattccagaaccaattgaggtgcg

SEQ ID NO: 94563 - DNA, 1121 bp, Zea mays
  Clone ID: MRT4577_186234C.1
gactcttgctacagggttcatattctccccgctgttgcatcgtttgatggctgcagcataagagtcatttccaatttccaagtactactagtagtagctgctaacacacgattacacgcagcactccgaaaaagcgagacagatacaatgtcttgacaccaactagctagtattcctgaatcccgaaaggcaaggacgagtggacgaccgagcaatccaacaggtgcctgatggcatgtcacggccgatggcccactcgcgcccgcccgcacggctgcagtacatcacaacagatgcgacgggcacgacacgtagtgcataaactcggcgtcgtggagcagcgccgccatggtctccggaggcaggcacacctcgatgtccacgctgccgtccccggctcgtcccgggaacgccgacatcttgccgtcgaacttgttggcgcgcccgctccgcacagcgaggggccggccccagccgaaatcgttgcccacgtacatcgggaaccggttcgagctccccatcgtgatcaccgagccgtcggggttgcccaacgggaagcaccggggtgcggcctgccacgcggccgccgcgcgccggatcgtgccgtcgccataggccgcaagggtcgcgttcagcttgcctgccgcccaccttagatcgctgcgagccagctcggagactgtcgccatcgtcgcagcgctctggatggcgttgccaaagtagacaggggagatggccggctgcagccggtgccggcagttcaccgccattcggaacgtcgtcgtcgcgtcgggcgccaggcgtttccgggcacgcgtgaccgagagccatatctgcgcgcacagtgactggaacgacgagatctccccgcgcacttggggattcttggggtcctgcgccatcttgccgtaaacctcggcgtcttggccaccgctcggacggcggttggcaatcgctttcagctcgcgaattgcgtcagcgctgaagtgaaagacgcgctcacggagaggcgcgtccacgtcgaaggtcacggacgggccgacgccgccggggaagcggaggacggcagtggactcgccgaagaagcttcggcggaagtccccggcgaacccgagggtacc

SEQ ID NO: 94564 - DNA, 339 bp, Zea mays
  Clone ID: MRT4577_186235C.1
attcggctcgaggatggacctcaccctctgattttggcgcactcttgcggctccacccttcactcaatcttaggctctcagctctaggctctagctagccgggccactccttcgtgtagccatcacggcttctcatgaccaccaatgggcactgcacgaggtccagaccccgaccgaacaggcacccgaggaagcgcccgtgcaggagaccccaccgccggccgtcgtgcccgaggagtctgcccacgccgaggccgaggccgaggccgaggctgaggctgatgctcctgctgatcccgtggagcttgccgaggacgatcagcacgcaggcgacgagcc

SEQ ID NO: 94565 - DNA, 389 bp, Zea mays
  Clone ID: MRT4577_186236C.1
ccgggttcgacccacgccgtccgtaaaaaaaaaaaaaaaaaaaaaaaaaaaaaaaaaaaaaaaaaaaaaaaaaaaaaaaaaaaaaaaaaaaaaaaaaaaaaaaaaaaaaaaaaaagaaaaaaaaaaaaaaaagggggcgggcgctttttaagggatcccaagccttacttcacccgtgcttcgcaaggtgaatacttttttttttgggccccctaatttaattcaactgggccgccttttaaaaaccttgtgattggaaaaaccttggctttaccaaatttaatcgttttgcaggaattccccttttcgcaaggtggggtaatagcaaagaggcccacccggatcgcctttccaaatggttgcgcaacctgaatgggaaagggaacccc

SEQ ID NO: 94566 - DNA, 410 bp, Zea mays
  Clone ID: MRT4577_186237C.1
cgccgatcccggcgccccgcgtcgaactgacaggctctccgccgaacgccctatctcctcgccccacatctcgcccatgggcccgggcgggaagaagcatcgcacaagaagcctgcggccgacgagaaggctgaaaagacgactcgctggaagaagccccaggcccagaagcggcttgccggattccaatccctccgccaggggggccgtttggataaagggaaacaaaaaggccaaaagagcgtggggaccttccaggacttactttttaagggggtgaaaccagggcccccccaccttcggataatcttcaagggcctggtcattaatgaattctttcttaaccgccatttttaaaaggttgtccgtcgaggccgccaacttgatccggttcaccaggaggccaacct

SEQ ID NO: 94567 - DNA, 256 bp, Zea mays
  Clone ID: MRT4577_186238C.1
cagaaggagctctctgtcgcagcccgaggcatgtacacgggccaattcgtctactgggggtggcggggcaaccctcttcaatgggaaacgtgcttgcccctccgcgggatcccctgaggggtggccgtcgtcttgcaacgtcgagcaccaacgtcgtgtgaaccgcggtggtcttcgccaggggcctctgggggactatcgccatttgtgatcaagccacataccctgacatacggcaacatcgagggattaaagc

SEQ ID NO: 94568 - DNA, 181 bp, Zea mays
  Clone ID: MRT4577_186239C.1
tctgagcaggaggccaagaaagaaagtcacttcagagctagagtcgatggagcagaaacaagcatgcaagatgtcgtccgagaagagctcgagcgtcaagtcgatggatcgactcggtcaccgggagcggccagaacgtcgccggcaagctctttgggagctgcggcaccaagtcgagggt

SEQ ID NO: 94569 - DNA, 508 bp, Zea mays
  unsure (1)..(508): unsure at all n locations
  Clone ID: MRT4577_18623C.1
ctcctcccctccgtcctctctctctctctctctctctctctctctccctgccgcgtcgccggggtaaagacctnctggcgccggctccttcccttccatcttcaagtacatactgacacacacacacacacaagcccattgcattcgccaaacattcgcccacgcgccattgtagcgcacgagctcccgaagccctcatcgccgtgccgttcgtctcgccggatcgatcgctccgcccctgctcccggctttggtgccgtatgcccgtccgtctccatagggcttgcattctctctgctttgatttgacggtacccagctgaagcacacaaattgcctccgtttgccggtcctgtgcgtgtgcgatcgagttttgttgatggtcatctagcaggatcgcaggagttgacggagccgcacgccctagctcggacgtgaaaaaaacgtggccacggtgctgaaaccaagatggttaatttcggtaagaaattgatggcagaccagttgga

SEQ ID NO: 94570 - DNA, 636 bp, Zea mays
  Clone ID: MRT4577_186240C.1
tacctcgaggccggccgggatccgttcgtatagataagctgctcctgcttcgatccgagaacacagtggatgctgacagagacagaagatctattgaaatagatgcgaggagatggtcaaaccgtcatgttggctttgctccatgttcacctgcctgaggaccccctccatctggcacccccgaggcatcgcctcctccacgcctaagaaaagaattccacatctggtgatccgctcgctgtgacgatccgacacagactgttatcatgctagtccccttccacggtgtccgcaaattctgccaaacctagcaatcgcgcatcagccccaggactggcacgatgcaagtcgtatgcgtgccgacggctcgaaggggagctggacaccctgaatcacatgtggaaccttgactgtctgtgatctaaggccggcgactaagatctcctcggatgctcagccgacgagtcggtgagctaacgcagcgactacacgattttatctagtgatcagctagatccgctagtagtcactgtgatcactcttcgaccatccatcagctcccatgatacaatcatgatgaacacgctaggaggaatggcatcttctgggttgtatccggcgactcctgtcactgca

SEQ ID NO: 94571 - DNA, 544 bp, Zea mays
  Clone ID: MRT4577_186241C.1
accatacattccaccatcagttcaccccatgcatttaatttgtctcctctgccacgcgtctccctggaaagaaatatacacacatctcctttccacttcacgtccctccttctgctcctgtcttcccttatcaagggctagatgtccgggcacaaatactatcattgcaaaaagggggaaaatctagctgcgtcctggactcggctatcacaggcgtcaccaaacatgattcgtcgattgccctctcatggccacaccacattgagcttcgtcgccgtccttcactcatcctgaaccagcatggaaagctgatgctgcgaccccctgacaatctagcagactacaatcaaggaatccctgaagctgagcacgagaaggtccctcatgttgcttactgatatggactgagacgacctcgagagtgaaatgacctctccccctgggaagaccctgacctccaccctagggctggtgtctggcaatattggagacctcacctactggaacaccgttgtccggatcagagactatgtgaccacctgtg

SEQ ID NO: 94572 - DNA, 219 bp, Zea mays
  Clone ID: MRT4577_186242C.1
gcgtccacgcgtgcgtccacgcatgcgtccactcgtgcgatttctcgttcgtccaccggcacgcttaaaacccatggacggagttcacgaggacatgtttaccaaactctctactgaggggtgcatgcgcgctaatgtctgcgcctcgttgtgctacccgagcgagggtggtaggaccgacctggttattgatggcgacaagcaccggcttggtgctgc

SEQ ID NO: 94573 - DNA, 319 bp, Zea mays
  Clone ID: MRT4577_186243C.1
ggggtaccctcgggttcggccggggagcgtttgactgattgctagtgtggcagcgcgcggcggaaggaggcacgaagaggttcatccgcctgccgatctagcgggcactgtcgccataggtcatctcttccggcctacggaggacgagctggcgctacactacctcaatgcctaagatggcggactggggcgcacgcagatctgattcaaagacgcgatggggacctctcgcgtgcgagcccagggagctgcacgcttaggtcgtgatgatgttcgacgatccacaaggtctcatgttcgcaccgatataccgtatgca

SEQ ID NO: 94574 - DNA, 284 bp, Zea mays
  Clone ID: MRT4577_186244C.1
ttcccgtccttctccatcccctcgccccggcacaagctaccctgtgtccaggactgtggtgccttgctgtctcgtagctacttcactgcatcactataaagctaatctccatgttccgccgcccatctatcgcgatatctagctatctatctctcacactgctggcggcgccaggctactacgatcgatgagccgccgttcaagcacattgtccattgtccgctctgcggaggatcggtcgtacgcgcacataatacggcgcactgccgcccagggtccctacc

SEQ ID NO: 94575 - DNA, 321 bp, Zea mays
  Clone ID: MRT4577_186245C.1
ctggccgattaattgaggaaaacttcagctggaactggtgggtgttgaattccatcaaattattattttaatggcaaaatttgccttttttacaaattttaaaagctccgtttccttaaaagggacttaagaatgaaaagaatgggtttcccgggcctttaaatttggaggggcgtttattcttgacctaaacttccagaaaagccttaacagtcgggagaaaaacccattgctttcttgggggcggtggtggctttaggtgcccaaagggggtcagccttcttatttgccctttgggaaactgggagagcattatttggt

SEQ ID NO: 94576 - DNA, 235 bp, Zea mays
  Clone ID: MRT4577_186246C.1
aaagacacttgggcaatgctgttcttactagcacacacaagtgaagtttctaatttacccgaaggcggccaatgttaccctgacagtatatgagttcaatcagcagaatgtgccaaatttgcaatcggatcctgagaatattgatggagagaagcagtttctgaaccagtctgcgagagaagcctacagtatactaggttttggcatagaagtcacactcataagacagacattt

SEQ ID NO: 94577 - DNA, 393 bp, Zea mays
  Clone ID: MRT4577_186247C.1
ccctcgacgactctgcgctctaccacgtttctatagccagccgtccatgccttccggccgccggttggtcccgacgaccgaggcccgtccttttccaccgcggttcccggagcgcgggaagaaacaccaccacccaccaccaccaccgtgtcctcctggatcacaactcactccactccggtgttccagaggaagtgcgcgtaggccgcggcgtggtgggcgttcccgggatcggccgcgatggcctcctggtaggtgtcctccgcgccggcgaggtcgttccgcgccttccataggaaagtagcgtaccggctcagcgcctccgagtccgccggctcagcgcgcactgctctctcgaagtagtgctccgcccggtcgtggctcgagccgaat

SEQ ID NO: 94578 - DNA, 292 bp, Zea mays
  unsure (1)..(292): unsure at all n locations
  Clone ID: MRT4577_186248C.1
tgtgtaggccagagagatctagctagagttnccctgcatcgcctccgccccccaccgcctccacctccgccccccaccgccccgccccacagcaggaaggatggaagccccggtctccccctacgcctcctcgccggaatccgtccccaggcgtgccccacgctcccctccgcagctccatcaatctccctctgaggaaggagatgaccaggagaaaccaagacatttgagatttctagcgtgtaatacagctgcagggcgcatcattgagaagggtggatacaccattaat

SEQ ID NO: 94579 - DNA, 497 bp, Zea mays
  unsure (1)..(497): unsure at all n locations
  Clone ID: MRT4577_186249C.1
ccccacgtccggtgcggcggtggcccaaccaaagggcagccggggtcgcttgaggcggtgagtcctcgtcctcgtccgatatcgcagcggaacaaggtcatgggcttccaggtggctgccgtggcaccgccgccgtgcgcgcgctcctcctccgccttatcgtcgccctcgacctcctcgcggccggtgcccgccttcctcggaggcggcggcggatgcgccgggctcgcgagatcccgggcacccgtaaactggggaaccggcgtgatggtgtggcgcccgcgcccggctcggacgccagcgaggtgcgcgctgagcgcgagtttggatgggatgggtggcggggacgcggagttcatgaagaggatcgaggagatcgcggcggcggctggggtgcagccggccggngcgttaactaatttggtggcccgngagcggggagcngagcgcgagcttctttggcngccgctgnccctgcggatgctgaagcggtaaag

SEQ ID NO: 94580 - DNA, 728 bp, Zea mays
  Clone ID: MRT4577_18624C.1
tgggaccctcgaggccggccgggccctgagtcgagggtcggccgaggcccaattgcaccagcacaccaccatgttcaccttcagcggaaacctactggcggggcaatatgacacgcagaaacagaggtcccctccaccgaaaccgacacccgtcacgtttcctgctctccacccgcccgagccgtcaacacaagcaccaccagcttcgtggtcccagccaggtgccaggatagcggaccattttctgcgactgaagaagccctccgatgtcactgaggagaccttggccttgctaaatgtcacgtttcagccagaaagtgacctggaaacattcctttcgtccctgtcaaacaacgcagagtcgttcttgcctcccagatcctggtttgacagccccggagaacagcagtcgtcctcaaatactggcactcctcccaaacttctgagcaatggtagaaaaccaccagagcagcgtgacttctttgtccgctcaagagaattgttcttcaataacgccgatgccttctctacccttacacgcaaagggtgtggaactcaaccaccacttcgactggctcatttccggaaattctgggaaggacttgataacctagcctactattgggacacatctttggacgaatacttgcccccagctcaaggagcaaacagtgatgaacgaacagcccccaaccccctgtcggggtccactgataccaatccccaag

SEQ ID NO: 94581 - DNA, 1975 bp, Zea mays
  Clone ID: MRT4577_186250C.1
tctagatcgcgacggccgccctttttttttttttttggtactttaccgggatacttcttattcgggtgttattttttccacatctagtacataattacatgatgcgagtcgctatacactagagtattccatagaacatcccatccctgatccatgccacctcgtcgccctcgacgactctgcgctctaccacgtttctatagccagccgtccatgccttccggccgccggttggtcccgacgaccgaggcccgtccttctccgccgcggttcccggagcgcgggaagaaacaccaccaccaccaccaccaccgtgtcctcctggatcacaactcactccactgcccacggcacgcacgcaatcttctaatcagactaagtaaaaagggggacgatatcatgtgtcagctccactccaccgcccggggccatggtgtgatgtcgtggtctaggcgtctcgccgcgtggcctccgcccccgtgcccgtgcatgctccggtgttccagaggaagtgcgcgtaggccgcggcgtggtgggcgttcccggggtcggccgcgatggcctcctggtaggcgtcctccgcgccggcgaggtcgttccgcgccttccataggaaagtagcgtaccggctcagcgcctccgagtccgccggctcagcgcgcactcgaagtagtgctccgccctgcgaagagacgagggtttattggtgaatagctgcggctgcgttggctcgaacagcgtgtgggcgacggaagggacctaccggtcgtggtcgttctgcacgaggtagaggaactgcgcgaagttggcgaggatgagcggattgttgggctcagcggcgacggcctgctcgtatctctgctccgtcagcgtgtgctcggcgtggtcctcggtctccagctccgcctccaccggcgcgacgaggcttctgagcacgtccggatcgctcagctcctcggtgcgcgggctggccttcagggcctccgcgagcatcatttcccaaatggcctgctcgtccgcgtccgcagcgtcttgggcgacctcagccacagggggtgccgacggctgctgcggcgacacacggcttagccgatataaggactcgtccgaccggccgtcgccggtggcacccgcgacaggcggggtcttgccgccaccgccgatgtcccccccgaccgaggccatccggtcgacggagaacgtcttcaccgaagccgcgtcgaaccgcggacgtgacggctcggggcgctgggcgttgacaagggcgacagcaggcgcagtaggcgggatggtggcggccgcagcggcgacgctgcggcccatcgattggacggtgaagttggcgaggaggagcatgagggagaccatgaacgccggcgtgcccgcgaagatatgctggaagagccagacgaaggagtcgtgcatctcgccctgcacacgcgccaggacgccctgcaggtcgtcgcagagcagcgcgtcgcgcatctgctgcagcgcgaagctctgcagctcgccgacgatgagcaccatggaggagaaggcgcggcccaccgactccccggcggagcccagcagcccctcgtcccagcgtgaaggacgcgctacagcctgcagctgcgcctgctgttgctgctttttccgcttcagcatccgcagcgccagcggcagcccgacgttgctcgcgctcagctccacgctcgcgggccagccgcaacccgccggaccggccggctgcaccccagccgccgcagcgagctcctcgatcctcttcatgaactccgcgtccccgccacccatcccatccaaactcgcgctcagcgcgcacctcgctggcgtccgagccgggcgcgggcgccgcaccatcacgccggttcccccagtttacgggtgcccgggatctcgcgagcccggcgcatccgccgccgcctccgaggaaggcgggcaccggccgcgaggaggtcgagggcgacgataa

SEQ ID NO: 94582 - DNA, 347 bp, Zea mays
  Clone ID: MRT4577_186251C.1
aagagtgcatcagtctagtttctattaacaccacaattgtattgcctgctccactatcaaaccaatgtacactaactaaatcagagccgttcccctcacacaaactactcgttctctggactgctttctgttcgccatacgctcagccgtgccatgcatgtgaatcgccccccgttcgtattacctttcacttatgccaagaaagtgagtgtctcttgcgtctgccccagccaccaggccggtggattacgactccagaatatgtatactcagggctgcaaccctcaccctacaaactcgacacggcgacgaagcaaccattcccctacacgaatgaaacccttcct

SEQ ID NO: 94583 - DNA, 255 bp, Zea mays
  unsure (1)..(255): unsure at all n locations
  Clone ID: MRT4577_186252C.1
gggtgtgggggtttttaacancaacatcttctgattgaatgggtccttctccaggatccacaacaggtctcaccgcctggttaatctgacaaggcgtctgtcttgtctcttttcgcctgccgggctttttctctccctttccacctgagcctgccggagggagaggcatcctgtgcgaccctttctgctccttttctcccagtgggctgttgaacaactccttgttcttgtccggcttttcttgggggtgcctgt

SEQ ID NO: 94584 - DNA, 338 bp, Zea mays
  Clone ID: MRT4577_186253C.1
agcgcagatttaatgtttatatatcatacaaacaagtgaaacccgctttactttacaaatgttacccctagattctgatttttgctcaagcgaaaaaaaaacacagcctggaaccgtttcacatagccccttagcgccttctggagggtcccgtatcggcatccatcacttttagggcagtacataaaaaaatgcttactgttcaccaaatgcacatgattgacactaatagcacctaattcatgggtctactgatggggggcccagacactccgcacgacacatcaaacttgactactcctggtggatctgttcatcatgcttgcaccatggattga

SEQ ID NO: 94585 - DNA, 1622 bp, Zea mays
  Clone ID: MRT4577_186254C.1
gggagcaccaccggcggaggggccgctgctgctgccgcggcggcggcggtcgttgacccgggtgcacccgccgctctggtcgggccgtccctccaagtcctatcagccctgtcagatcagaacaacaaaagaattgtccttgcattgcaaagtgggttgaagtcagagatactgtgggcactgaatgcccttacagtactctcatttaaggagaaggacgacctccgacgtgatgcaacacctctcgctaaagttcctgggctcctagatgctcttcttcaagttattgatgaatggagcgatatttcaatgcctaaggaccatacgaaaccacccagactaagaactttgggtgccaacacaacactctcgggctttggccaggagaacatggaaaaagtatactctgacactgccactacctctaatgaccaatccaaggcggaagattccagtgtcacaaagaagcgcgctgcaagcttttggtttgatgaggatgggttgtttaacaacgatgatgaagggagggcggaaaggcagcagtgtgctattgcagcctccaatataatccgcaatttctcttttatgccagaaaatgagattatcatggttcaacataggcattgcttggaaactatatttcattgcttagaaaaccagaatagagaagatgatgagctcataacaaacatgctggagacccttgtcaatttagcacctgtgctggacctgaggatcttcagctcatcgaagccttcgttcattaaaatgaccgagaaaggtgcaattcatgccataatgggtatgctttcttcttccgtaaagccatggcactgtgctgctgctgaattgattggccgtctgataataaatccagacaacgagccatttcttcttcctatcattccacaaatatacaaacgactcgttgacctattgagtgtaccagcatatgatgcacaggctgctgctgttagtgcactctacaatgtagccgaagtgaatatggattgcaggctcaagcttgccagtgagcgatgggctgtcgatagactcctaaagattgtgaaaacgccgcaccctgtgcctgaggtctgcaggaagacgtcgatgatactggagagcctcgtctctgagccgcagaacaggatgcatctcctcgtacacgagaacacttttgctgagatcctgacatcagaagggaaatactcggacacatttgctcggatcgtgtatgaactgacagcaaggccaagcaacaaagtgacctcaggacacgccatctggggaaacataaactgatgcgacgcgatggcctgtaatgtgttgttgggatctagactagatgagatttatttaatgtaggtgcttcgttgatcatgtattatgttatgtaatagacgctttgctgtatcgagatgcaggcttgcagcttggcaacctggccgaatttgggcagtttctttcatgcttcttttatcagtttgttggtggaaagtagcgtgtagcagctatgtatttgttggaatcagatgcctcaggctggtttagccgcgttcataatagattattaaaaccgctgatggtttgcttcgttgaaaatttaaaaaaaaaaagcggcc

SEQ ID NO: 94586 - DNA, 191 bp, Zea mays
  Clone ID: MRT4577_186255C.1
aggaccttcgtctcccgttcattatctcacatcttcccgagcgagttcttggtgtacgttttcctcttcggaccagctccaatgctcttggtgtatcttgccactctcaccaatcaagttttcatgtctgatctctacattcatatcccaactgccttcgatcccttctctgaatccaattcttgtcactc

SEQ ID NO: 94587 - DNA, 2931 bp, Zea mays
  Clone ID: MRT4577_186256C.1
gggtacctcgaggccggccgggaacctatatagacaatcccatttgggtgggcgtctacctgcgtacgatggaagaaagagcctttataccgctggaccattgccttttacttctatgacatttgaaattaccttgcaagatgaggaagatagtgttggcggtggccagggcggacaaaggcgcgagagagtatttagggtggtgatcaaatttgcggcccgtgctgatctccatcatctggctatgtttctagctggaaggcaagcagacgctcctcaagaagctcttcaagtgcttgacattgtactacgtgaattgcctactgcgaggtattctcctgttggtaggtcattttattctcccaacttagggagacgtcagcaacttggtgagggtttggaaagttggcgcggtttctaccaaagcataaggccgacacagatgggcctttcactgaatattgatatgtcctctactgcatttatcgagcctctccctgtgattgattttgttgctcagcttcttaatagagatatttcagttaggccattgtctgattctgatcgcgtgaagatcaaaaaagccttaagaggtgtgaaggttgaggtcactcacaggggaaacatgcgcagaaagtatcgcatttctggcctcacctcacaagcaacaagagagctatcattccctgttgatgatcgtggtactgtgaagactgtggtccaatacttcatggagacttatggttttagcatccagcacaccactttaccgtgcttgcaagtgggcaatcaacaaagaccaaattatctgcctatggaggtttgcaagatagttgaaggacagcgttactcaaagcgactcaatgagaaacaaatcactgctctactgaaagtgacctgccagcgccctcaagagcgtgagctggacattttacagactgtgcatcacaatgcgtactatgaagacccgtatgcacaggaatttggtataagaattgatgaacgccttgctgcagttgaagctcgtgttctgccaccaccaaggcttaaataccatgatagtggccgagagaaggatgttttgcccagagttggccaatggaacatgatgaataagaaaatggttaatggtggcagagtcagcaactgggcatgtattaacttctctcggaatgtgcaagatagtgccgctaggggtttctgtcatgaactggcaatcatgtgccaaatatcaggaatggatttttctcttgagcctgtgctgcctccagtgactgcaaggccagaacatgttgaaagagcgttgaaggcacgttatcaagatgcaatgaacatactgaggccacaggggagggaacttgatctgctgattgtaatactgcctgacattaatggttccttatatggggatctcaaaaggatctgtgagactgatctcggattggtctcccagtgttgtctgactaaacatgtttttaagatgagcaagcagtatcttgcaaatgttgcactcaaaataaatgttaaggttggtggaaggaatactgtacttgtagatgctttgacaaggagaatcccccttgtcagtgacagaccgaccataatatttggtgctgatgttacccatccacatcctggagaagattccagtccttccattgcagctgtggttgcttcgcaagactggcctgaggtcaccaaatatgctggactagtgagtgcccaagcccatcgccaggagctgatacaggatcttttcaaagtatggcaagatccacagagaaggacagtaactggtggcatgataaaggaacttctcatttctttcaagagagcaactggacagaagccccagaggatcatattctacagggatggtgtcagtgagggacagttctatcaagtattgttgtatgaacttgatgccatcagaaaggcctgtgcatccttggagcccaactaccagcctccagttacttttgtcgtggtgcagaaacgacatcacactaggctgtttgctaataaccacaacgatcagcgtacagttgatagaagcggaaacatactgcctggcaccgtggttgattcgaagatttgccatcctactgaatttgatttctacctgtgtagccatgctggcattcagggaacaagccgccctgctcattaccatgtcctgtgggacgagaacaagttcacagctgatgagctgcagactctgacaaacaacctatgctacacgtacgctaggtgcacccgctccgtgtcaattgtgcccccggcatactatgctcatctggcggccttccgagctcgcttctacatggagccagatacctctgacagtggctcaatggccagtggtgcccgtggccctccaccaggtgcggcacgcagcatgagaggagcggggagtgttgcggtcaggcccctacctgctctcaaggaaaacgtgaagcgtgtcatgttttactgctgagatgctgagctaccttcaccaagaaaatatcctgacttgttccatgtacccgcactgtttcggtgatactatctgacaccgaatttatgcattaagacttccagtggtctggggattttaagtaacgcctgtttttattcgtgagttgtaacgctgcggttcgaggagctttagtgctgtatgatgtgtaaactatttgttgtaacttgtaagttgtaaccaattgttgtaagttgtaaccagccactatgttatggtcctgtttgtttcagcttttaaaaaaaaaaaaaaaaaaaaaaaaaaaaaaaaaaaaaaaaaaaaaaaaaaaaaaaaaaaaaaaaaaaaaaaaaaagtacgcctccaaaaaacgtcataacttttctataatgaaccctaaattcaattaactgccacttcgttttacctcgtttttattaggcaaaaccctgttg

SEQ ID NO: 94588 - DNA, 524 bp, Zea mays
  Clone ID: MRT4577_186257C.1
gattctacttccatttcatcagcttcttccttgcttcattcccttccttaactcctcccttgaacatgtttgggttcttccatttctttgggccacaacgtaatgtcgtcgaagacgaagtcgatgagactttcacgcttgctgcagcttacgaagccgaggccaacaataggcgtagccaccgacgtctcatacttaggaccatgctggaggagagaggctcatcttcatgcattacttcacgtcgagccaacttagcttctgcgactttctgaaggaggtatgatggctttgccattattttacgcaacgtgttgacgccactgggttggccggtttgggtcactatctccaacagcttacccatacctatatctatattcaaactatttttgttcgtttggctttaatttgtatcggcttctactgtttctacaatgttttatctctatagattacaactgtagcagtccagacaatcgcctttaaagtgaaaaaaaaaaaaaaaaaaggcccctagggcc

SEQ ID NO: 94589 - DNA, 344 bp, Zea mays
  Clone ID: MRT4577_186258C.1
gtcgttctacatctcgagccggccctttttttttatgctgcccatctttttttagaggcggcaattccatccacgtacatatatacagtcccacaagctgtcagatacacctcaatacactccacctaacttcttacgctaaccttttcaatcagctatttaacgcatcccccaggacactccccaatacactcccctttacgcatacccaaagacactatatccatgcatcgacattattcctctcaataaaatcagagccaacaatctccgtccaaacctacacatctccataaaaaccttcataccctttaacaactgggccatacacgcctcctcatggt

SEQ ID NO: 94590 - DNA, 759 bp, Zea mays
  unsure (1)..(759): unsure at all n locations
  Clone ID: MRT4577_186259C.1
gggacagctaaagatgatcttaaatcgaaggcgtcacttattaactcactgaatgagaaagttcaaacattatacactgaaaagggtgaagtggaagaaaaactaagtgctctagtgagtcagtatacatacctgaaatctgcttctgaagagagggcttctcacgattctgaactattagttcagaaagatgatatgctcaatcagcttgaagaaaaactttctgctgcattaagtgactctagcaaagacagaactcgaattgccgagttgaacaatgaattggtcaccaccagaacaatactagataatgaagttgttgccaggaaaaaattgtcagaccttgttgagttcactgaagaggcactaacaggttccagaaatgaggtgtttaaactctctgaagagcttgacgcagtaaagagatcaaatcaggatttgatgactcagatttcaaaactaacagatgaggccagtgaagtgaggcaggctctggctaacaaaatagagcaggcagagtcagtttctgcaactctttcagatgagctggtgtctgtaagggaagtacttaaaaagtcagaaggagaactcgagatcacctcgaagcagttagtttttggtttcagaagcacatagtgaccttaataaagaattgctgggtgcatataagcagttagagtccacgcaaagtgagctagtganagagcgtanaatcagtgctactcttacatggagcttgaggctttggtgaaaacatca

SEQ ID NO: 94591 - DNA, 503 bp, Zea mays
  unsure (1)..(503): unsure at all n locations
  Clone ID: MRT4577_18625C.1
ggagaagaggagcagcacggcacggcggggggggcgaggaaggcnccngnccngncccagcccaacccagcagccggccaaggaggaggaganccaancggcgngcaggcgnccaccgnccanccancganccaannccaancngcaggccacggcgacgcggcngggacgnggaggagagggggggggggaacccgccgccagnnagccangacgncccccgngccgagggcngcggccgacagggcnanncgcaggcaggcccncacgccgacggacgccgcggcgnccaggaaccggcagcnccncagccccaggcagcggccaaaccggcggcncggcgccaaagcgcgnggnngcaacggccccncgnacacgcncaacnangccgacgaaaaggggaangcngangagcnngnggaggagaagggagggaaggggcngancgaccccaaggcncngangcangncanaggcaccaaganggaccacggngacgaccc

SEQ ID NO: 94592 - DNA, 1032 bp, Zea mays
  Clone ID: MRT4577_186260C.1
gtggagcaagacgaggaggcgacagactccggacaagtggtgtggcagaggatggagaggacacatgcgagggagcgctgtaggcacgtggtttccatcatcatcgcgatgaggattgtcggcatgttcacaccgtgccgttgcagaacgttggagcctctcagaactctggaagctgcctaccatcacgcaccctaagataggggcatatctgtgcatggtaccatcttcatcatgtagctgggatgagctggcaccatgaaagaattcaagtggttaaatcatgcatctgcagaaatattgtactctcaaatggtgggttgctgcgtcatgggagtttgggtgaaggcctgaaggatgtgatgcaaaacgtcgatgcaggtctgggatgtccgcctcattatggatcaaaattcatgacgttctaaaggtgtcggatgagtacctatatactccctcccagaaaacaaggcgcctcattacactattggaagctggacgacatggatgactctggcaagatgcggtgggagcacgacgacatggatgactccgaccatgagttcgacaggaagcctagcaacagtacgcagtagcaaggttgaccagaggggcagtggagactaacccaacaccccctcctccgaccgtcatagcgcttctttcctctggcttcatttcttacctatgtatggatggtcttcaccactggttacatctagcaagtcctcctagggtgacatgaaggagattgtcatgctgccaaagcacatcaaggacaatgcaaacaaggacagaggaagaccggacatgccatttccaggtggtgacatttctattctcacgcgcccacccaacatttttgcttttactaaatgactatgtgcgcgaatgctttgtggatgttgagagggattatctgtgcttgacaaaacagtatcccagacttgcaattactccagaattttctaaggttgggcattttgtacattgaacttttgttgctgatcgatattcaatgtggcttttggc

SEQ ID NO: 94593 - DNA, 208 bp, Zea mays
  Clone ID: MRT4577_186261C.1
acaatccaacatatgtcgattcatctcatttctacatcaccccattgacaatgaggtgcgggctgtaactacacatacgtacaaaactcaactcacgaccctggattaccgaagtcggctagcgtttccaatgctcagctcatggacacacttgatattcacaagtagctacactgctatggttattccactcttgatactggttcac

SEQ ID NO: 94594 - DNA, 3626 bp, Zea mays
  Clone ID: MRT4577_186262C.1
gaccctcgaggtcggccgggaattgaaagccctccacataatcctttgcccaaacacttaagacatttcgccttcaatgctcattatttcttcgcctgctcgctacttcgctagtcgctagccgctccccccaacaaacaaccctaatccgtgaccgtggactcgccgcaagctccatcgcgcgaatagactggggggattcaatagaggctacgcggcgattggtcgcgctcgagatctcagcaccctcgcgcctgaaatctttctattgttgtcgtggttcaggtgatgagatcttggggagcgcgactcgctcggtcctgagatgctggcgggctacggcggcggtggccgcagcgtccatctctcctcccacaaggacctcctcctcggccgctgcggccggagcttcctcttcggcaacacgtggtttctcctctccacctacccggcgcgcctcctgcacaccacggaccggcgcgctccctccgctttcgtcgccgccatcaaccgggtcccctgcgtgcggtcgcactgcacggggcagggcctgctgcagagaggcagcattgtcatggctgcctgcggctatgttcttaggcgagctgagctgggtgctgccaagcgccagcagccggataaggacccatctggcggaacacgtgcctcccgtattgcagccatggggtcactgggcagtgctgcgcggtcgccgcggcgcagctcggggcgctcggccggtggaagggctcggcgaggggccttcccctgttcaggctccttcgcaacatcgatggtggaatcgtcgacgcccctcggtgagcgcgtacccaccataggatgtatcgcgcgaacagatttgggattcattcgcgtccaagacgggatgcagggcatgaaagataatcttccaggtgtggaatacccttgaccgaaatgcaattgttctggacgatgtctggttggcatcttgcattgccctactagagcaaaccacagcacctttctagtttctgagtccagtggaaagtcgtgcaaagagaagagcaaaatatctacaccagacgtctcttttaggtacagagggatggagtcttgtaagaaggtagctgcaagcttgaagtcgtgtgagccatgggggaacatggcattctggacaaacgccgctgggccaggttggaagttgagctttgttgttgagccatggactaagggctttagcgcgtcgtgtgcggcgccatattctgctggagccacagagcatcaattatcgctcgatgagaaggtggataactccaccgttgcatctggttttgatgggtaaagttatctatcagctagattcgtggcaggaaaggttttttctattgtcggtatccagcacctaagtaggcctaagatttttttttctatttttgattagcaattgcctttttgagcaaccgttcgtatgaaattcttttattgagaacgagaattggtcggaatgagttaatctcgtcatactcagcttggtaaatgataggaattattgctgttaattccgaaggttccaagtcgcacttgagaaattgaagtgaggagctctattattctagttgctcactgctgcaaggttcgatccatgagaaggtaagtaaatcactcgttgccactaattcctatccacagtgattaattttcttatcataggagaagcaattagttttgttggattgtctgagccgtgatgtggatgcgtgaagttaatgctaagtcgtcagttacaaatacttttagttatttcgatggtcttaattttatggtcgctaccatggcttgcagtctcaggaacttttttgctgggaagccaattccttactgatctaagggacaacatttttgtttgcctgatataaggcaaagtgtgaaagggaaacgcgaaaagaaacgtgtcctggtcccaagtcacctgccatactgaacacgattgatcgcagaaagaaacacgttctggtctagactgacagttttggagctggagccggccatgcgctcgatcagagttccgctgcagccacgacctctctcccgaacgcgcacgagaagaccaggtggaacatatgcaagcaggttctagagcaataaccccatgaatccacatcgggggtctgcatctacacgggcgtgtactgtgcaccgctcccctccggccccgaccgccgtgtgctcgttgtagccggggtcaacctcaaccacgacgacgatgcggtctccttgccctaggctcgacctcctcgctgacctcgccctgctccacctcaactcgcgatgaggattgtcggcacgttcacaccgcgccgttgcagaacgttggagcctctcagaactctagaagctgcctaccaccacgcaccctaagataggggcatatctgtgttagtcgcctgcacacatactgaaatatgggcatatccaacatgtattctactcttagttatgttagataaggcttttactctgtcatttactgatctagtctgtttttagctccattagcttgttcacaagcttatgttagagaaggcgttatggcttttctcaagattataacatttctgaataaaagttatgcataggcatggtaccatcttcatcatgtagctgggatgagctggcaccatgaaagaattcaagtggttaaatcatgcatctgcagaaatattgtactctcaaatggtgggttgctgcgtcacgggagtttgggtgaaggcctgaaggatgtgatgcaaaacgtcgatgcaggtctgggatgtccgcctcattatggatcaaaattcatgacgttctaaaggtgtcggatgagtacctatatactccctcccagaaacaaggcgcctcattacactattggaagctggacgacatggatgactctggcaagatgcggtgggagcacgacgacatggatgactccgaccatgagttcgacaggaagcctagcaacagtacgcagtagcaaggttgacccagaggggcagtggagagtaacccaacaccccctcctccgaccgtcatagcgcttctttcctctggcttcatttcttacctatgtatggatggtcttcaccgctggttacatctagcaagtcctcccaggggtgatctcaattttctcctgatttgctctctcctttgtttttttattgattcatctatgcacatttaatgatctatggcgtgccttcaatgcaattggtggaggcagtgacatgaaggagattgtcatgctgccaaagcacatcaaggacaatgcaaacaaggacagaggaagaccggacatgccatttccaggtggtgacatttctattctcacgcgcccacccaacatttttgcttttactaaatgactatgtgcacgaatgctttgtggatgttgagagggattatctgtgcttgacaaaacagtatcccagacttgcaattactccagaattttctaaggttgggcattttgtacattgaacttttgttgctgatcgatattcaatgtggcttttggcattctctgtcactctagctaggtccttggatgagccacactattgacatgggtttaggtgagtgactcatcacggtgcctttat

SEQ ID NO: 94595 - DNA, 172 bp, Zea mays
  Clone ID: MRT4577_186263C.1
ctccaccaaaaccgactacgacggcgctcttctacatcggagctggcggctatccctggaccaggggtggatcacagacgcttggcgagctccacctgcggacactaatggctggtcagatctcattggtggtcaatcattggggcaaaggggagctggcgcctgcgttggc

SEQ ID NO: 94596 - DNA, 2122 bp, Zea mays
  Clone ID: MRT4577_186264C.1
actcaggcacgccccacgcgcgcatcccgcagccgcgcgatccgtccgcttcctcctccccgcgccccgcagcccccgccgccgatggcagccgccgcgcccgcgcaagggaagttgctttcccaaatcccgcagacaagatttaatcccgtgattcttcccatccatggcagccgcatccatggcagccgtgcccgcaaaccgcgcgtccccacgactcccccttccatggcgtcgcccccttccatccatggcagtcacgctccctctgcgcccttccatccatggccgcggctccctccgcgccgcgattcttcccatcctctccttccgcgcggtttgcggctgccaatcctctccctctgcgtcgtgttcttcccatcctttccctccgcgctggatctcgccccatgtccaccaacgccggcgtccgtgacggcgcacccggggcagcggtggacgcagcctttgccacgcgtgtgctccaggccgaggccctcctcgggtacctcgccaccagcccgtgtgccgggggcgacagggtggaccccgccgtcgccgcggtgcagctcggggcgctcggccggtggaagggctcggcgaggggccttcccgagtacacggtcgtccacaacatcgatggtgccgtcgtcgccgcccctgggagagccaaagccaagcagaggaggtcgcggtcgaccggatttgggaatcctgctcctgccaaacgggatgaacggaaggaagcagaatctttctggggttgatttggcttgaaggaagcgggatctttctggacaatggctgtctagcttcatccattctggtaacaaagaaaaaaacaagaaacatctggtatctgagtccagtagaaagttgtgcaaagagaagagcaaaatatctacaccagacgtggcttttaggtacagagggatggagtcttgtaagaaggtagctgcaagcttgaagtcgtgtgagccatgggggaacatggcattctggacaaacgccgctgggccaggttggaagttgagctttgttgttgagccatggactaagggctttagcgcgtcgtgtgcggcgccatattctgctggagccacagagcatcaattatcgctcgatgagaaggtggataactccaccgttgcatctggttttgatgggtatgtaccatattattaatgcctctattttctgtttatataaacagaccattaataattttcaggtaaagttatctatcatgttgtcaataatttctgtttatataaacagaccattaatgcatctgattctgatgcaggtaaagttatctatcagctagattcatggcaggaaaggttttttctattgtcggtatccagcacctaagtaggcctaggattttttcttctatctttaattagcaattgcctttttcagcaaccgttcttatgaatttcttttattgacaacatgaattagtctattttagttcatctccctctcgtcacaaatttaaatgaatataattgtttctgtgaagcccaaagttccaagtcaccatgaaaaaattgaaatgacgagatctattaatctaattgttgcaccttggaaagtctgaaccatcagagtttaattgtatcacccatttacacaagttcctaccatcagagttcaactgtatcacccatccataagcaattccttttgttgaaatttatgagaagacatatgcctctgttaagtctcaggaacttttttgctgggaagccaattccttactgatctaagggacaacatttttgtttgcctgatataaggcaaagtgtgaaagggaaacgcgaaaagaaacgtgtcctggtcccaagtcacctgccatactgaacacgattgatcgcagaaagaaacacgttctggtctagactgacagttttggagctggagccggccatgcgctcgatcagagttccgctgcagccacgacctctctcccgaacgcgcacgagaagaccaggtggaacatatgcaagcaggttctagagcaataaccccatgaatccacatcgggggtctgcatctacacgggcgtgtactccgcaccgctcccctccggccccgaccgccgtgtgctcgttgt

SEQ ID NO: 94597 - DNA, 2028 bp, Zea mays
  Clone ID: MRT4577_186265C.1
tcctcgatactggcaggaatcacattgtcctcgtcgtcgtcctatcttctcttgctcttctcctccggcctcctcggtcctcgctcacccgaaccagcaaccctaatccgtggccgcggacccgccgcaagctccatcgcgcgaatagattggggattcagtcgaggctacgcgggaactggtcgcgctcgagatcttagcctccgcacctgaaaccattggctccattgctattgctgtcgtggttcaggtgatgaaatcttggggagcccgcctcgctcggtcctaagatgctggcgagctacggaggtggtggccgcggcgtccatctctcctcccacaaggacatcctcctcggtcgcggcggccggagcttcctcttgggcaacacgtggtttctcctctccacctacccggcgcgcctcctgcacaccacggaccgccgcgcgcccgccgctttcttggccgcgatcaaccgggccccctgcatgcggccgcaccgcgctgggcagggcctgctgcagaggggtggtattgtcatggctgcttgcggctatgctcttgggcgagctgagctaggtactgccaagcgccagcagccggataaggatccatctgcagggacgcgctcctcgaatgttgcagccactggatcactgggcaatgcagcgcggccagacgtctcttttaggtacagaggggcggagtcttgtaagaaggtagctgcaagcttgaagtcgtgtgagccatgggggaacagggcattctggacaaacgccgctgggccaggttgggaagttgagctttgctgttgagccatggactaagggctttagcacgtcgtgtgcggcaccatattctgctggagccacagagcatcaattatcgatcgatgagaaggtggataactccaccgttgcatctgattctgatgggaagtcaccagtttctgaaaaattgaagtttctctctggttcatgttacttgcctcaccctgataaggaggctactggtggtgaggatgcacatttcattagcattgatgagcatgtgattggtgtagcagatggtgttggtggttgggcagatgttggtatcgatgctggactatatgccaaggagctaatgagaaattcaatgagtgcaatcaaagatgagccagaagggaccatcgatccaaccagagttttggaaaaggcttatatgagcaccaaagcaaggggatcatccactgcatgtatcatcactcttaaagatcagggtatccatgctgtaaatcttggggacagtggtttcgtagtagtccgagacggccgcactgttctcaggtcaccctcacagcagcatgatttcaacttcacttatcagcttgagagtggaggtggcagtgatcttcctagttccgcacaagtatttcacttcccggttgcccccggtgatgttattgttgctggcacggacggactttttgacaatctatacaataatgagataagtggtgttatcgttgaagcgctcagggttggacttgaacctcaagttgcggcacaaaaaattgctgccctggctcgacaaagagccacagacaaaaataggcagtcaccatttgcatcggccgcccaagaagctgggtaccggtactacggtgggaagctcgacgacataacggttgtggtgtcgtatgtgaaaagcgcttgattcgagcctttctttttattagatgtaatgtcaaaaatcttagtcccgaatttaatggcacatgtgttctcaaggtgtgaaatcccctgagatactagaagcactcctgctgggtttagtatggttgcgcttttagccctggaatacgttagcaaaccattacaccattttacttgtttgccactgtgagtaatcttctttttatatataattctctaaaaccagggcggtcgtttcgcccttggagttggagggggaggataatgacctgctggaaccaaattttgttgtaaatattgtcgattgccgaatgataacatgttggactcc

SEQ ID NO: 94598 - DNA, 731 bp, Zea mays
  Clone ID: MRT4577_186266C.1
ggattttctggccgccctgctctctgatccacggcgcccagaaaattccagccggctcccccttcttcttcctccagcagcagaccaacagtgcccctttcacctttggtcgtgggcccctctgctccttgcgcgcacggcacttctctagtccgagctcgcgcagccgtggagcacctccctgcatcttccccgccatggctcgcaactcggcgtcctccctgcttgtgtggtgcttgctgcgtgctcgacgaaatgccgcagcgagcagcggtcatgagatcccctccgtgttgcttgcatcggcccgatctgcgcagtcccgacccaaggcgtcgcgtgggtgtttggacagccccacgctacgtcgtcgatctgcgcggtttgactgtctccgcgtctcgcttcgccgaatctgcgcagcgccgacgtgccatcgtgggaacccgtgcccttgtcgacgtcacgccttgcgcatcgctcatcggcaaagagcccaaactaatggcatgcatgcgcggcacgagtcggccaggttgttcgccttgtatgattgcgatttattttacttacgtattcggtcgatgatgtgcctgcatgtttatatgtgtgtaaaatgtttcggttatgcgcattggtagaatcgcgtttgcgattggagaacaagaggttatttgaggtatgcgatttgtagttgtctaattatgttttggtcgatatggtgcatgttt

SEQ ID NO: 94599 - DNA, 215 bp, Zea mays
  Clone ID: MRT4577_186267C.1
ggacaatcaccgcacggcttccagacggagggctcgtacctcttgcgggcgcttcagcatgcagatgaagcgcgtcggcagcgactccgcgggcaccgtcagggccttctacctgtcgtcgcggaactccgagcacgacgagatcgagttcgagttcctgggcaaccggacggggcagccgtacagcgtgcagacgaacgtgttcaccggcggga

SEQ ID NO: 94600 - DNA, 316 bp, Zea mays
  Clone ID: MRT4577_186268C.1
caccaacatgtatacttacatctcaatggtcgctctaattggtggcattccacctgcataggtctttgaaaatccgaagctaatgcactatgtatatattgataccattgcaaaagttggattgacaaagtatgtcagcgacctattcttgattggactgatctaccatctgtataaccagattgctacaaacaccttacaacgagtgtctcctcttacacatgctgaccgcaatgcgattaaacgcgtttataccatctgtttctcaatcattgatactggcaacagaattagcacacaaactggaattggcacg

SEQ ID NO: 94601 - DNA, 965 bp, Zea mays
  Clone ID: MRT4577_186269C.1
accctcgaggccggccgggaacagtattcgtctccagtttacaaaggagccccacctcgagccggtcaggaccaaaacgtccattccgaagccgaggagagatctcatctcggcttctccgccgccgtcgccgccatgcctccctccccatcttccgccggtgcgggcgccgcctcgccttccggttccgcgtccgcttccggctccgacccgaccccgtcttggtgggagtccgtctcgcaggcacggtcccgcatcctggcgctctcctccatcctgcccgcggcggtctcccacgacgtggcggcgctggccgacgccgaccgcccggcgcgcgcgctcctccgctcgcccgctgcctattcggcgctctccgacgcgctccgggcgggcgggggcgccgacgacccggcctgccactggctctatgacacgctcctctccgccgacccggacctccgcctcgccgcgctcgcgttcctgcccctgctggcggcgctctacctccgccgcctcccacccgagctcccttcctcgctctccggcttcgaggccgtcctcctcgccgtttactcctccgaggccaagaatcgccaggggaagccggtcctcgtccaggtgcccgacctctccgtcccatccctgtaccacacgccggcggtccagcccccagctccaagtcccctcgccggtcgcagcccccgccgatcccccctacgggacgaatccgcaggcgactcccgtggtggggggtgcgcctgctggagccacaggccgcggtgaaatcgacgaagcgcgccggaattattggagttgcatttgaggcctactactccaagatttcgcagatgcctgctgcgtcgaaggtggatgcctgcaatgctgtggctgcgtgggcggggcagtactgcaaatgccgttttgagctggatgagaaggaactggaagaagaggaagtgactctt

SEQ ID NO: 94602 - DNA, 311 bp, Zea mays
  Clone ID: MRT4577_18626C.1
ttgctgacattcccagtgtatctggaacaacaaggccaaaatcaacctacattggtggagaatacagaagaagtgcagattcatcgagcacagacgttgcattggcattcgaggtcccaagtggttggctcaaagaaaaagattgcgtcactgtatcagttcttcaggcacttctgggtggtggtggcaagccttcttgtggaaggaaagttaaggagttacatttacctctcaaccgcttcgtagatgaaccggatcagatcaagtccgtctttgctttcaaggttgtttacaataatatcggcattttt

SEQ ID NO: 94603 - DNA, 434 bp, Zea mays
  Clone ID: MRT4577_186270C.1
gaaaaacccacccggggggcggtgacatgctaggattcctcccacacactccctcaaaaacccatttttgagaaaagcgcaagatgttcggcttgcagcactattggaaccagggccggaaccccacagcgcacgggggcctacaccacaccaccttcaagaccttctgcaaggccgacgaggggtactgcctcaccgtccgatacggcaacgtgctgctgccccccgccaacccgcccgactagcaccacaactggtacaaggacatgctcttcagcacccacatcaaggacagaggaggacaaccctgcgttcgcccttctcaacaaagccactgggctcgccatcaaatactccctgggccagtcccaccccgtaaagctgaagccgttcaaccaggagaaccagaacgagacgctgctgtggaccgagag

SEQ ID NO: 94604 - DNA, 257 bp, Zea mays
  Clone ID: MRT4577_186271C.1
cggggagccacacgtgactacccggtcgcctcttctcctccctcctgtcgggtccttaataaagagctttttcccccgaggtggtagagcgagcgataagaaggcaatggcggcggagagcttcctgttcacctcggagtccgtgaacgaggggcacccagacaagctgtgcgaccaggcgtcggacgcggtgctggccgcctgtctggcgcaggaccccgactgcacggtggtctgtgagacctgcaccatgacga

SEQ ID NO: 94605 - DNA, 329 bp, Zea mays
  Clone ID: MRT4577_186272C.1
atcggaccaagccataagtttactcttcgggagggagaacatttgtatttttggttccggaccaaccgccggttccatggcaaaccaaccttgcttgcagggccaattatattgtataaataaggctgtgggcccttttttatttggcttgatccaacaagcgggctaagtcggcgtcttggcttttccttttataacacataaaacatatatccccttccttgagtgaatgcttgtggccgtcttgtcaaatctggacctacaaggttccttcaaacctcgagggttggttttttaataagaccatgtttgattaaaccctattggtt

SEQ ID NO: 94606 - DNA, 322 bp, Zea mays
  Clone ID: MRT4577_186273C.1
ggttcggctaatgttgccatcgacatggtcagggatgaccatcacaaccaccactgacgatgatcattacgaagaacagtcaatagcattaccgatcacagaagcagtgacgaggttgtatgtctggcgccagcgacactaatggtggacaactgccgccatattccgtgacacacatgatggaccttagcactgagtgcataccgagccacacaagcgccatcaggaatgattgatgctccagttgcggaaatggcaaccaagcattcacacttgacactgtattagcacgtgggctaaagacctaccaagtgggcgctct

SEQ ID NO: 94607 - DNA, 444 bp, Zea mays
  Clone ID: MRT4577_186274C.1
caaaggggaacctatatgagggaatatttacggttggttatcggaatattctacaatacgaagccaaatattcctggctagaacattgaatatttacaccgtgtgctgaccacctacccattttgctcttcttggtccgaaagcttcgctctcctcttgtccgtgtccccttagtcttccgccattcccgctatcgcggagcgcgcgggggtcatgcttgctgcctcacctgctccggaggcgtcacaggtttccttctccttctcatccaagtcttcgatcactttcttgatttttgccacggtggcggtgctggagctgaggcctagtttcggacatgcggtagaagcaccatataagcctttccataattgaatgccaaatattgtctctgtgtgtgaagttcgaggcaaacgtgcgcggacaacaagaagtccaatgata

SEQ ID NO: 94608 - DNA, 551 bp, Zea mays
  Clone ID: MRT4577_186275C.1
gccggccggtccgggagtgacgaactcaaatgttgtgctctcgtagtaaaggtcgaccacaacacgcttatcgacagcatcttgagatgaagatatctgtactgctggggatgtactaccgacctgttctagtgctcggtgacctggccaggggaccagccagacgacttcgaaaaaccttcgctgtcgcgaatgacgtcccccctgagcaggaatatgaaactgccacgaacacctcacgaagcgttccagcaccggcgagatagtgtctatccatgcccacggacgagggcgcctactactatgggtactttatgttcctccactgaaagtgcggatgctggaaccactatagtcatgccaacatggtcacagtacagacgtatgcttccatgcgcctccgtacgaccttattactatgaaaacacttccactgatgaccaaacaagctcatgctgatgtgcatcatgaccgattcgatcgctcccttcacgatctagatgaaaccatctagatgctcatggcaaaatattttcattgatggcccctaa

SEQ ID NO: 94609 - DNA, 347 bp, Zea mays
  Clone ID: MRT4577_186276C.1
ttcccgtgctctacccactcttcctcccactcgtcctataaataataaagtccatttctaggaagccacaaacatcatacgaatagctttattatttctgtgacgccacaattctgatctcgatcttcctctcactatctatgttcaccctcttacaacttctacaatttcttccattcaaccaacttgcttttacaaacccatcatctttctaccaacaacccatcattgctggtgccctcttttagatttcttatcacttatagctcaatactaaagcttcttgtcttatatttactgcttcctatatattatccattccatttctaatcaacttttctctcaca

SEQ ID NO: 94610 - DNA, 1205 bp, Zea mays
  Clone ID: MRT4577_186277C.1
ttaattaccacggggcacggtaattaaaaaaactaaatcaaatcaacacacctttcgatttctggacaaaactaaaagaaaaaagaatgagaagggagagggaggggggagaagggggaagaaaaaaaattccggacgcgtgggccatcctctcctctcctctcctctcctctcgtgtctacagcttcccttgctggctagggtttgcagatgacgacggcgacgtgccccacctaggcgccggccaagggcggcaacgagcaggggggcactcgcattttcggcccctcccagaagtacttgtcccgcgacctcgccgcgcatacctcgctcaagcccagaaaagacggtcaatagacccaagaggagttacagaagaggaatctcagggaggaacttgaggaacgtgagcgcaagcactactcttccaaggataagtcctatgctaaaaaaaaaagagaccggcggaaaagctcaagccagctactcctagaaggttcaaagagagaggcagaggataagatagttccacaagaaattgatgcagatgactccgatgtggagcctaaaagtgacgatgagagagaagacaacacaacatcttccctgacattgtttaggcagaagtggagcaactgcgagaagaacttaggcgacatcaagattaattgaagcaacaagctgcgcaacatgaatattatgctacacagattcaacaacagcaaacactcatacaacaacaagcagaggcccaagggatacacgtcctggtgcccccccaccacctcccgttcattatccttggtcttcacctccacctacacttacatttccatctaccaaacatcagaccccttcagctaccttgccaacgcatgaactaccttgccaacgcatgaacgagaagacgggttagactttgtcgaaaccctcttcgctagtggaggtatcgaccatcactcgtcactgtaacccgatggtgatcggcgaccgtgagcttccatgttattgtgttctgatacttgagacttttattatgactatgtatgaaatattgtctcttattagtactggatgataagatgtgtcttattatgactatggatatgacttttgtgatgcaattgatgagactatggatttaaatattattatgtgattgtgtgtgagatgttttatgtaaaaaaaaaaaaaaaaaagcggcc

SEQ ID NO: 94611 - DNA, 1329 bp, Zea mays
  Clone ID: MRT4577_186278C.1
gccatcttttcccggtgcgcagccaccgaccccactgtggacgtgcccgacccaatgcaccgacccacacccgctgcgactgtcagcatcaaatatggcgggagcgaagggcgacgtccagagagtaagaacgaggcgacacagtatggacttgatatgactgagcaacaatatcttgagcattcgattccatggatagctgccaatgatgctgcttggcgtgcgttatgtcgttactgggcttcgactgaatttaaggcaaagtctgtgcgacacagttccaatcgtggaaccgagtcgtatcacaggtatggaggtgatgatcactttcgtttggcaaaacgaatggaagctagcactggtgcagtgcctagtgatgttcaaatataccttagggggcacagaggatcagatcctgcaaatccagatgtgttgtgcagccaaaaggcaacagatcgtgtgctgggtgtttggaaatgtttggtaggttctgtttatatggatttttgtatgtaagattacattgttcttttgtatgaggctgcatatggcgaggcaatgtctagttagcacggaccagactatgactggaggacctcacctattgatcctcaggctgtgtatgcaagtggtggaaaagctcatggaaggtacacaatgtttgctaacatcatcgactcgaaccaggtgagggttcagcgtggaggttcatcgaggtctactgctcgtagctcccgtcgctccactcaagattcagcagaagtggagcaactgcgagaagaacttaggcgacattaggattacttgaagcaacaagctgcgcaacatgaatattatgctacacagattcagcaacagcaaacactcatacaacaactagcacaggcccaagggatacacgtcccggtgccccccaccacctcccgttcattatccttggtcttcacctccacctatacctacatctccatctaccgaacatcagacccctccagctaccttgccgacgcatgaacaagaggacgggttagactttgtcgaaaccctcttcaatagtggaggtatcgaccatcactcttcactgtaacccgatggtgatcgacgaccgtgagcttccatgttattgcgttctgatacttgagacttttattatgactatgtatgagatattgtctcttattagtactggatgatgagatgtgtcttattatgactatggatgagacttttgtgatgtaattgatgagactatggatgagacttttgtgatgtaattgatgagactatggatttaaatattgttatgtgattgtgtgtgagatgctttat

SEQ ID NO: 94612 - DNA, 1215 bp, Zea mays
  Clone ID: MRT4577_186279C.1
ggcgccgaggacggcgcggatcgagccggtgcccctggacggcgggctgaaggcggccttccaccgctgcggcgaggtctgcagggagtacgccaagacattctaccttgcgacgcagctgatgacgcccgagaggaggatggcgatctgggcaatatacgtgtggtgcaggagaacggacgagctcgtggacggccccaacgcgtcccacatctcggcgctggcgctggaccggtgggagtcgcggctggaggacatcttcgccggccggccgtacgacatgctcgacgccgccctgtccgacaccgtcgccaggttccccgtcgacatccagccgttcagggacatgatcgaggggatgcgcatggacctgaagaagtcccggtacaggagcttcgacgagctgtacctctactgctactacgtggccggcaccgtggggctgatgagcgtcccggtgatgggcatctcgccggcgtccagggcggccaccgagacggtgtacaagggggcgctggcgctgggcctggcgaaccagctcaccaacatcctcagggacgtcggcgaggacgccaggaggggacggatctacctcccgcaggacgagctggagatggcggggctctccgacgccgacgtcctggacggccgcgtcaccgacgagtggaggggcttcatgaggggccagatcgcgagggccagagccttcttcaggcaggcggaggaaggcgccaccgagctcaaccaggagagccgatggccggtgtggtcttctctgctcctgtaccggcagatcctcgacgagatcgaggccaacgactacgacaacttcacccggagggcctacgttccgaagacgaagaagctgatggcgctgcccaaggcgtacctgagatcactggtggtgccctcctcctcttctcaggctgagagccggagacgctattccaccctaacatagaccggtctctctctcactgtcggtacatagcagcagcagcagtgaatgatcgatatgatgtacaaatttctggccaggccacatgcatgagtagtacgtacatggttggcaattggcatgtggtggtggtcgatcggtgttacatacttgttgtactcctctgtactatacaaaacatgccggagactcgcgcgtaagtgagaagcgataaatggagatagatgtttgtctcataaaggaagggcgccggtacc

SEQ ID NO: 94613 - DNA, 347 bp, Zea mays
  Clone ID: MRT4577_18627C.1
cgccttcgcacactcagatgcacaatataatacacacacacacactcacacgacacacgctgtatacactggatcctaggtgttctttttagcttagctaggaatgcaaatttcttgattcgttggatggctttttttttttcctaccacgcggcgcggcaggtgcccatctgtctcgcacgcctcttcatacactctctcccctcctgtactcgactactgctactgcatgtagtggatgtgaagtacaaagaatacaacggagtatactagtgtagtctggcatgcatatgtaaactgctatactctgctttacgaaatggaaaaaacgtagattgtttgaaaaa

SEQ ID NO: 94614 - DNA, 826 bp, Zea mays
  Clone ID: MRT4577_186280C.1
ccgtcgagttcgacatccagctggagaccgaggagtgcgtgcgcggccgccccggccccgcggcgcgatcggcgctgctggccgcggcgggggcgcgccccgtcgacctaggcgacgaccagcgggagctggaggccgagctgcgcaagatggcgccgcccaacggccgtaccgtcctcatcttccgcgcacgaggcggctgccccaagggccgcatggaggtctggggcgccaagaaggtgcgccggatcaagaagtgaaggggggaacaaggatcggatggttacttgttagtgcaatagtactagcgcactcttgttcctacctcgatcctcgtaagtagctactgctaggaaaaaaaatcctcagtaataataagtataagtatagggagacgaaataaacggaacacagaaccagttattatcacagatagcttatatagacaataatatactccttgtattatgaaccagtggcgaatttggacagaaatacatgctgtttacttgttcattctctaattttcatgggatcctggataattgatacagtagcaacatagacaatatcttagtcagtagctgcttgctcctttggctgtcttttgggtccttcatttttatccatattgtggtacaggtttagttgctacttacctgtcttatatgacatgttttttgctgttgattcaatgatattggggtgaagttttagctcaaaaaaaaaaaaaaaaaagaatgacagccaacgctctcatcgttgttgaggtgaagtattccagttgagattgttctttcagcttctcgacactcctattgtgagc

SEQ ID NO: 94615 - DNA, 287 bp, Zea mays
  Clone ID: MRT4577_186281C.1
ccgacgtaagctcggaattcggctcgagtgtgacgctattttgtctcagacgccaaccgccggcagccgtggcgggtctatttcagggtgctaggtctacaccaggcaatatgctgaggggagcaccaccacagggagagcacggcgcgggctacccttgtgagccagctcctctagaaagcgacagacgctctggtggggagacacagggccgaactaccctcacgggagcctgacgaccattgccggacgataccactgcgccctgctaggccagctacaaccac

SEQ ID NO: 94616 - DNA, 232 bp, Zea mays
  Clone ID: MRT4577_186282C.1
ctgaaaaaccaaaccgcgcccttttggatgtgtttccccccaaacaaaggggtggtgtccacacaagcttgggcaggccatcttaacggccataattattaaaaaaatcctcaccgggtacagtacataccctgagaaaggtgcaaaaccccaaattcatcttttgtcacggtaagagaagcatgacctaattgcccttggcacggagggagcaccccttggggaggccggc

SEQ ID NO: 94617 - DNA, 190 bp, Zea mays
  Clone ID: MRT4577_186283C.1
acaagctttttttttttttttttttttttttggttatttttttttttttttttacaaacatccttgttaccctataaatatattcctttccattgaaaagggacattaaggaaattgctaaaactgccacccatggtgaagggaaacactccgtttctcatcgccgctaaacgagtgaactagctatagg

SEQ ID NO: 94618 - DNA, 202 bp, Zea mays
  Clone ID: MRT4577_186284C.1
gcaagcacccgcgacgaagctcggaatacggctcgaggacggcaaaacacccccgttatgacaaagcagagaaggggaccaggggcggggaagcaaacaaacgccagaccacgatcccacggaaacacgcgggaggtgcgcggccgggaccgggaggacgagcagccggacgtgaccagggagcccacgaagcacgggccca

SEQ ID NO: 94619 - DNA, 446 bp, Zea mays
  unsure (1)..(446): unsure at all n locations
  Clone ID: MRT4577_186285C.1
aaagaagaaaaagagggacggcaagcaaagaacacggggaacagaannccaacgggaacgggggggcgagaaaaagcanaaaaaccacggggacgggttttttttttttttaaaggagccaaaaatactcacgggaatattattggccacacaaagcagacatatagctatggataaattaggctggggcattgcccagccaccaccatcgccagcaccccaggggaaggactgatcggaaggcacgcctaaatcttgttgaaggcaactatgtcgcaggtgtggacggactcggtcagtggctcagggcacagataggccccaatgagagtggggacagagacaaagggcggggacgagggacatcatgagtgggaggttcttggtacccgatgcaactgggacaaggcttgggagggcccgaagaacaggccttccatctggga

SEQ ID NO: 94620 - DNA, 829 bp, Zea mays
  Clone ID: MRT4577_186286C.1
ccggccgggcggcatctccatcgccgtcgcgccgccgtagatggcctgacatttttcacttcatttgtcatcccaattccacaaacctcgcgcgtggcggcggagggaaacaaaaaaaaaaggaaggatggcgttggagccggtggcgcgggcggtggcggaggaggtggcgcgctggggcgcgatgcgccagaccggggtcagcttgcgctacatgatggagttcggggtgcgccccacggagcggaccctcctgctcgccgcacagttcctgcacaaggagctccccatccgcatcgcgcgacgggcgctcgacctcgactcgctccccttcggcctctccaccaagcccgccatcctcaagggcagcacgtcgctttgcatgaccctgatccagagcctggtgtgatagggcttataaacacaaaaatgtcacccatgacagtagctcgaattgctagtgaagatgcacgtgctatttgcatgcgggagtatggatcatctcctaatgtcgacatatatggtgatccggggtttacattcccaacaatctttggctgaactgtaataacctagagcctgtaactgctgtgaacacccatatgttacaccacatctacatctcatgatttttgagctggtgaagaactcccttcgcgcagtacaggaacggtatatggattctgataagcttgcacctccggttcgaatcatagttgctgatggagcagaggacgtgactattaagattactgatgaaggtggtgggataccaaggagtggtctctcaagaaattttacgtatctctatagtacagcagaaaaccct

SEQ ID NO: 94621 - DNA, 1469 bp, Zea mays
  Clone ID: MRT4577_186287C.1
ctcgtcaacctccctcctcctcgtccccccctcctgcggcgcacttatatatatataataccaccacgtcgatgcgtcgcacgtcgatgcgccactcagctggcatcgccatcgacggcgtgccgccatagacggcctgacatccccccgcccccgccctattaatcccttcatcatcccaattcccacaaacctcgcgcgcggcggagggagaaggaaggatggcgtcggagccggtggcgcgggcggtggcggaggaggtggcgcgctggggcgcgatgcgccagaccggggtcagcctgcgctacatgatggagttcggggcgcgccccacggagcggaccctccttctcgccgcgcagttcctgcacaaggagctccccatccgcatcgcgcgacgggcgctcgacctcgactcgctccccttcggcctctccaccaagcccgccatcctcaaggtgaaagattggtatgtggagtcattccgtgaaatccggtcctttccagaggtgaggaaccagaaagatgagctcgccttcacccagatgatcaaaatgatcagggtacgacacaccaatgtggtgcctgcgattgcattgggtgtgcagcagctgaagaaggacttgggcggtccaaaggcgttcccccctggaatccatgagatccatcagtttcttgaccgcttctacatgtcaaggattgggatccggatgctgatagggcagcacgtcgctttgcatgaccctgatccagagcctggtgtgatagggcttataaacacaaaaatgtcacccatgacagttgctcgaattgctagtgaagatgcacgtgctatttgcatgcgagagtatggatcatctcctgatgtcgacatatatggtgatccaggttttacatttccatatgttacaccacatctacatctcatgattttcgagctggtgaagaactcccttcgcgcggtacaggaacggtatatggattctgataagcttgcacctccagttcgaatcatagttgctgatggagcagaggatgtaactattaagattagtgatgaaggtggtggaataccaaggagtgggctctcaagaatttttacgtatctctatagtacagcagaaaaccctcctgatctggatggacataatgaaggagtaactatggctggatatggttatgggatccctattagtcgcctttatgctcgatatttcggtggggacttgcagatcatctctatggaaggatatggaactgatgcttacctccacctttcacgcctgggagattcggaggaacccttgccgtaatttattcaaaagaaacattcctgtaattaggatattgcttctgtgctggtatgcaagtatagttctgaaggccagccacctgttcagctgttggtgtccctacttgttgtctttattgttcattcatcatctcaatggaatgtgatcgtaattcat

SEQ ID NO: 94622 - DNA, 2665 bp, Zea mays
  Clone ID: MRT4577_186288C.1
ctgttgcattcccccccttatcagggttgggagattcggaggaacccttgacttaatcgattcataaaaacccattcctgtagttaggactctattgctttttcaatctccgtgctggtatgcaaatattgttttgaaggccagtcacctattagttcagcctcgaggccggcggtagctggcatcgccatcgacggcgtgccgccatagacggcctgacatccccccgcccccccccgccctattaatcccttcatccattccacaaacctcgcgcgcggcagccaaaaaaagcgggatggcgtcggagccggaagctcgggcggcggcggaggaggtggcgcgctggggcgcgatgcgccagaccggggtcagcctgcgctacatgatggagttcggggcgcgccccacggagcggaccctccttctcgccgcgcagttcctgcactaggagctccccatccgcatcgcgcgacgggcgctcgacctcgactcgctccccttcggcctctccaccttgccggccaacctcaaggtgaaagattgaggatttttctttcctggttcttcacctctgggaaggaccaggatgtcacggaatgactccacataccaatctggtgcctgcggttgcattgggtgtgcagcagctgaagaaggacttgggtggtccaaaggcgttcccacctggaatccatgagatccatcagttccttgatcgcttctacatgtcaaggattgggatccggatgctgatagggcagcacgtcgctttgcatgaccctgatccagagcctggtgtgatagggcttataaacacaaaaatgtcacccatgacagtagctcgaattgctagtgaagatgcacgtgctatttgcatgcgggagtatggatcatctcctaatgtcgacatatatggtgatccggggtttacattcccatatgttacaccacatctacatctcatgatttttgagctggtgaagaactcccttcgcgcagtacaggaacggtatatggattctgataagcttgcacctccggttcgaatcatagttgctgatggagcagaggacgtgactattaaggctggcaattccggttagattagaaaagtttgtggtttcatatgaggtctttcgtaataaaatagctccccgtagtactatactcaggcggggacccctaataattgtgacgtacctatttagtgtggtactatgacttcctgtccttgagggaattctagaagtagtaactatgcctggccttcccccggggactcccagtgctcctctttcggcgcaccagttcggtgcctacttgccgattggctctccgaaagcagacgcagtgcacagtgtaactctacctaagattcacattaccttttcttattggaagtttgtaatctcaaacatggtgctgatttttttttaaaaaaaaatacaagcttgcagttccattaatttttatgtgtatgttaatttattcttcgtggtacttgtggtaggcaaacaaaacaaaagtaattctagagaactgaagttgtgagctgtctttaaatctgagtgatgttgacccagtcttatatgtgcctggaagacaaatagacattgatgtcgtgcgaagtagtttcatttttacagctgaccttgatcctgatgctggacttttcttgtatttgcatggttcgatggtggtactgatagccaaaggagtaaaagagatttaagggaagttcactctatttatttcttgctggcctgaggagacaagacccgtattaatagtcatccagcaatgtcagctgactttttttttcttctggttacagccaaatgcaactagcagaaatgtaaataaacgccctttatgatgctaacagatagccaatccaactaactggctaacgccttttgttagaattttctcattaattgtgatattcaaccgacaaacttgtatcttctgcacctatgttagcaaaaatcaatagcttcgattattcatgatctggtatgaagtatgaactgtttgactaaaccatacttttgcagattactgatgaaggtggtggaataccaaggagtggtctctcaagaatttttacgtatctctatagtacagcagaaaaccctcctgatcttgatgtacataatgaaggagtaactatggctggatatggttatgggattcctattagtcgtctttatgctcgatatttcggcggggacttgcagatcatctctatggaaggatatggaactgatgcatacctccacttatcacggctgggagattcggaggaacccttgacttaatcgattcataagaagccattcctcattcctgtagttaggactctattgctttctcaattaccgtgctggtatgcaaatattgttctgaaggccagtcacctattagttcagctgtccatgccctatttgttatctttgttgttcattcatcatctcgatggaatgtgatcataattcagaatagttttgcttctggtttgtactgtcattataattgttcaacctccaataatggtatctgtcgagcacccgaggcattgaatttgtgagtaatggaattcaccataattgttcaacctccaataaagtctgtaactccaattcttcaaagcatgtttttt

SEQ ID NO: 94623 - DNA, 394 bp, Zea mays
  Clone ID: MRT4577_186289C.1
gtgacccccgtgtattgtctatgctagtttctgttgacatacgaagtgtttgtaggtgggaaattttttcagattaaaaaaaaaaaaaaaaaacaaaaaaaaaaaaaaaaaaaaaaaaaaaaaaaaaaaaaaaaaaaaaaaaccaaaaaaaaaaaaacaaaaaaaaaaaaaaaaaaaaaaaaaaaaaaaacatataaataaaaaaaaaaaaactaaaaaaaaaaaaaggggcgccctcttaaaaatccccagtttaaatccccttccattcccatttaaagcctctttaaaacgctcccacaaatctcttttcttggccctccttttaaaaaactggaccttgaaaaacccttagcttaaccaaattaatacccttaaaagaaaaccccctttt

SEQ ID NO: 94624 - DNA, 314 bp, Zea mays
  unsure (1)..(314): unsure at all n locations
  Clone ID: MRT4577_18628C.1
ttttgcctccttatgctgcttggtctttctgcnngtgctgcgtcggcgaccattttcccgcgtgctcgcagctccttggcttcccttcttccccgtcttttttttgcggcgtcttcggtttgtgtgtggggtctgtncgggggccctncangntccnnccggcnntcgctgctggcgtcttgcctttatcacccttgttcctcccgcgntcatcggccctgttgcgcccgttncctttggtgccttctttggccccgggcctcggggcccgtcggctcccccaccttgtgctggcgggccttgctgcctgctct

SEQ ID NO: 94625 - DNA, 256 bp, Zea mays
  Clone ID: MRT4577_186290C.1
cccacgcgtccgatcattcccttcttgcataacgtgaccattcccaaggattgcaacagggaccagaagtgctacatctatctctctggacaggtgatggacaagcttgccaagatcgacccttactttgccaagctcggtgacgccatggtcacctggatcgacgcctgtgatgagctgaacccggatggacccgcggctgggaaagacacggacaagtagatgggagtccctgacgatgcattcacttacctgc

SEQ ID NO: 94626 - DNA, 434 bp, Zea mays
  unsure (1)..(434): unsure at all n locations
  Clone ID: MRT4577_186291C.1
actccgctgcacgcccagcccgttcgagcgcgcgtgcgagggncttgagagatctcatatggcgttgggtctgacaccaccacgggatccagcccggtgccccggcagttccgcccgaaacactgggttaaaatcttctgccgggccaacaatgaactgctgcctgggcggccgcgatggagatacctggctgggccgaggcgaccccgacgccaatgaccagcgctgctccaaggatctgcccgttgatactccggccagggacgaggaaagactgccggaggtcccgctcgttgacgagatccggaccatggtactccagcactatctccggcggcaccacttgcataaactattgcccttcaaaccagggccactcagtacagagcccttctggggacttgcagcagggacatcgacgacggcttcttgtg

SEQ ID NO: 94627 - DNA, 204 bp, Zea mays
  Clone ID: MRT4577_186292C.1
atgaaggccaactgggccaaacggagaatacagaaaccggggagaaaccacccccaacttttcccaatggggaaaaatggaaagcctggacaaacaacggaaaaaacaggccgaaagaaaaaagggtgaaccctggggaatcccacaaagcacccaaccccaaataattttcgggcactcacgggaatgtgtaaagggggggaa

SEQ ID NO: 94628 - DNA, 310 bp, Zea mays
  unsure (1)..(310): unsure at all n locations
  Clone ID: MRT4577_186293C.1
gtgatttatatccttataagttttattacaaatacgatagcatgacatgtggtcctagtggttcagatgctgtttcaggaatacttcaaactgattatacttcagaccatcactctactagcaacaacagaatcctcagaactggtggcggtggtggaggaggctgcttttctntttaaaacatttcaggcaccattgctagagttactttttccaacaagtccaatgtctggacggaggagtgctgtgctctctgttcacttgaactcattctggttttgaggaggtcatgctgctatttgacattttc

SEQ ID NO: 94629 - DNA, 165 bp, Zea mays
  Clone ID: MRT4577_186294C.1
tcaagacacagaagtctgcatagctgtctttgcatgggagcgagcagccaagagggaacaacacaatggcgcagggggggagacgccctacgctgctgagaggaccggataccaacaaggggggcaatatggggatatctctcatgaagcagggccgagtgctcg

SEQ ID NO: 94630 - DNA, 1331 bp, Zea mays
  unsure (1)..(1331): unsure at all n locations
  Clone ID: MRT4577_186295C.1
ccgtccatatctttactcttatgttatcttgtattattacttaatgtctcatcctcataaagtagaacagtatttcagcaagtcagagttcagttgcaagattttaaagagtagagcaggaaaacttagtatgacatttcatattttcattaactttgttttgcagactcgtgatgatgctaggcaattcatgaagtatcttcatcctgatcttggtgtcgaattgcctgaaagatcttatggaactgattgtcgcatatatgtccctgatcatccaaaaagcaggagatcatttttgatgaatttgttatagctcatatccttggatggtggggtaaggctataatgatacgaaaccaatcacttttgtgggtcttgtcaattggttttgagttaatggagctcacttttcgtcatatgttgccaaatttcaatgagtgctggtgggatagcattgtcctagacatattgatatgcaattggtttggtatttgggctggaatgaaaaccgtgcagtacttcgatgggaggacatacgaatgggttggtttgagccgccaacccaacattatcagtaaggtaaaaaggatgctgggacagttcacaccagcacagtgggacaaggacgagtggcaccctacgctgggtccttggagattcatccaggtgctgagcctttgcgttgttttcatggctgtcgagctgaacacattcttcctcaagttctgcctgtggatccctccgcggaaccccttgattgtctatcggctggtcctttggtggttaatcgcgataccaaccatccgcgagtacaatacctacttgcaagacagcaaaccatttaaaaaggtgggatccttctgctggctttccctggctatatgcattgtggagctcctaatctgcatcaagtttggacacggtctgtttccaaagtcaatgccttcgtggctgatcacattctggtcagcagtcgccttgcttctcgtgctctttgtgtggacgtggaaataccgaacaatgaaaaggaaaatgatataattgtgaccaaaaaaatgatttgtttgcctccattctttacccgatttagtgttatcgtgtacataaaaatttattcaaattgtgtacatgtgctagcagtcaagtcttggtgatctgaagaggattatcccttagaaatttctatgccctctttgactttgaattctccggcagcgaagaaagatactggatcccctttgcacctttaattcgactgtattgccgcgaactacttcgctggtcggctcttacatgtcgagaacccttgatgcactagaaaaaaaanaaaa

SEQ ID NO: 94631 - DNA, 1021 bp, Zea mays
  Clone ID: MRT4577_186296C.1
ttctgatacatgctgctttttttcgaggaagagtggtgaatttttgtcatccgaaggtcagtaggattattatgcattctcaagtgctgctattgatatttttgcagatagtaaattgccaaggctgttgtaatgggggcaaatggtcatcatgaacctcgcagaggatgtaatggcaccgtctgcaatggtagtataagaccactcgattactttggtgatgtagatccatggacggcttgggcatacaagcctcgaacgatctcgctcttgctgacgggaacatgccttttaatttgggcaagtggtgctctcgatccagaacggagctcatctgctgatcgtgtttcgtcagtcaagaggggtgtatttgcgatgattgctgtttttttggcttactcttttcttcacacgccttcgactgtacattagaccacatcctgccatttggaggcttgttcatgggatggcagttgtttaccttgtcgccctcactttcttgctttttcagactcgtgatgatgctaggcaattcatgaagtatcttcatcctgatcttggtgtcgaattacctgaaagatcttatggaactgattgccgcatatatgtacctgatcatccgaaaagcaggtttaacaatgtttatgagataatttttgatgagtttgttatcgctcatatcctcggatggtggggtaaggctataatgatacgaaaccaaccacttttgtgggtgttatcaattgggtttgaattaatggagctcacttttcgccatatgttgccaaatttcaacgagtgctggtgggacagcattgtcctagacatattgatctgcaattggtttggtatttggactggaatgagaactgtgcggtacttcgatgggaggacatacgaatgggttggtttgagccgccaacccaacattatcagtaaggtaaaaaggatgctgggacagttcacaccagcgcagtgggacaaggatgagtggcaccctacccggggtcctgggagattc

SEQ ID NO: 94632 - DNA, 590 bp, Zea mays
  unsure (1)..(590): unsure at all n locations
  Clone ID: MRT4577_186297C.1
gggggacccgtcagattcaaatgaaagataggagnatatcaaatatgcaaaactaccttcgagctcgngaaatcaacaatcgggaagcaatcagcaaagcttgcttgcgaattgggacattgtaattaacaactaaaagcaataactacgtgaaatcgaaggaagggagcagaaggcgtgggaggagggggtgctgagtactgactcgatctggcggatctggtcgaagaagccgacgtcgtagacggcggcggcgtcggcgaagtgcaggacgccggcgagccggtgcctctcgacgtgcgcgagcgcggcgttccgctgcgcgtgcgcctcagcgccggcgccggcggcggtgaggttgccctcgggcctgaaggcgaggtgcctgtacatgacgccggtgccgcggagcacctcagcggtggcgggcgcgtcggcggcgggctcgacgacggtccagacgacgggcgggcgcacgaggcgcagcgtgtgggccaggcgcagcagctcgccccggcgacggcgccgggccccgggcgccgaccgcgtggtggtgaccacgatgaggaggcggcgctggccgccctcgc

SEQ ID NO: 94633 - DNA, 590 bp, Zea mays
  unsure (1)..(590): unsure at all n locations
  Clone ID: MRT4577_186298C.1
gtaccctncgcggtctggccgggggcatccaaattccaaaccgcgcgaacttctgccgctcaaaattccaaatcgtcctgacttcccgcgcttcccataatcctatcccgcccgcgcggcccctctcgggattcaaacgccagccgtttgtcctctcaaacccgatcggatctgaccgccctcccaggccgtaacaggatcccgtcggtcatggccgtgataaacgggcgctcgaagcgtgttcgggtgacggcggtgccgcgccctctggagctgcggtcgttcccggccgccggagaggggccgcgcccgctggtcctgctgtcgttcccggccgccggagaggggctgccgccgcgtggcgcgtttcacgactgtgtacggtcgttcctggctggatccgcggtgccggcggacggcgcgtggcaggtagcctttggagtcgggaacggggtggtcgtggtgatggaggtggtggaagaggacgtcgctaaaactgggatcgagcggatctactgcgatcactgtaccgtcgccggtgagtgactcgtattgtttgctgacccttccatagtcatatcagccgcagt

SEQ ID NO: 94634 - DNA, 493 bp, Zea mays
  Clone ID: MRT4577_186299C.1
gggcacaacttgtattaagatatgtttgattcttaaacgccaaacaagagcagtttcttatgatttgggaacacgcaaacctattttggcggtgttgttaggcaagatagctctttcatgcgcggaatgaaatgcgcacaatcctaccgttatatttattattcaggggattgagcttaaacatcaagcacattgtttgtgacggccctcaaactaattaagaaataagattacatagccgctgggaaaaaaatgattgttatacggaatactgtcttatttaacggcaggtaatggcttacaaaaagccgaagatacgctgtttttttcggaggtttaacccaggctgccgaaaatagtttatttactacgactgtcctttttgttcacaaataatgaaaggtctttttgcagatcaatcttaccctgccgaccaagggaccctgcggaaaggtattagcttatttaagaagtctactgccttggcgtctaa

SEQ ID NO: 94635 - DNA, 550 bp, Zea mays
  Clone ID: MRT4577_18629C.1
cgagtaccatttttcttggtcgtcatcaattcctacgtccttccatatccatagataaatctagttatcttctttactttggcaatgcagccactaaactcatttatcttcccaataacctccagcatgagatccaagtagtggtagcacaaggtgtccaaataaggtaggaaacttgtccatttgcatcaaacctactagggttgagagttaggtgggctcaaatattatctttttttattacagctaaacataacgaatttgaacttaaaatgttatatataatcgaattaagatggaaagaatatgaatgattttttcagatttttttgtaaagtttgttagttcatgtgcaccatatgtgcaacaaaggctcatgtgcatatgatatgttcccaaataaatttatctatccaagttaaaattttgtcacgttttttaaagcatcaaattcaccgctagtaataaaatcgatgaatttctatcaaagtcgtcaccagatagttgttgtgcgtgcgacgaatttgagacttcaccttgagcttacaaa

SEQ ID NO: 94636 - DNA, 289 bp, Zea mays
  Clone ID: MRT4577_1862C.1
gacctttgggctggtttatgtgcttgatctttcgtatggtattgagttcttccatctctccttttaaacttcctcttttcttggaaccgggttaacagtttgtcgtgtcgatagctgtgattctggctggggaagaagtcctgtctttgcgttgtatactgggagaggagtcttttgtcttagttctgatagatgtccttccgttgctggttctcatggcaggtggtcatcgtgctcgtgacgagtcgtcatgctcgtcttgagctggtagtgtaggatgaggagttta

SEQ ID NO: 94637 - DNA, 425 bp, Zea mays
  Clone ID: MRT4577_186300C.1
actgactccacccacccgcccgctgccttttccggatctcgtcggactcggatgcgccggaccaccccgcgccgccgccgcgcagcagcagcagagatgagccagcagctccctgcgaacctagtggagatcatggagcagagaatgaagttgatcgagcagaggagcgcgtacctccaagagcaaatcaaccagacagccagccgcctcgccggaagagtactcgagggctaacaaggagttccgcaagctggagagcaccatggagttgatcaaagacctgagatcgaaacaggaggaaatcgagggtctcaaatctttggtagcaaatgatcatgaagagaaagacatgcgtgagatggcagaagaggagcttcttgtggctgtcgaggaagagaaacgattgcagcatgaactgtttagat

SEQ ID NO: 94638 - DNA, 762 bp, Zea mays
  Clone ID: MRT4577_186301C.1
gaacttgttttaccccatctcatcccactgactccacccacccgcccgctgcctccgccggatctcgtcggactcggatccgcccgaccaccccgcgccgccgccgcgcagcagcagcaggttgatgtccagctgcgaaatgaggacctgagaattgatacctacagatcaggtggctctggaggtcagtctgtcaatacaaccgatagtgctgttaggataactcatattccaaccggaacagtggttgcaatccaagatgagagatcacagcacatgaacaaggccaaagctctgaaagttctccgagcgcgactgtatgagttggagaggcgtagactacacatggacaggtcaaagcttcgatcagaacagattggaagcggtgacaggtctgagcgaatcagaacatacaacttcccacagggccgtgtcaccgaccatcgcgttggagtcacacaccactccatagcagatgtcatggagggggagagcctggacatgttcgttgatgcgctcctgcttcaagaagagatggacgccattgcttcatttggcgcatagctagattaaaccttgcaacattgattcacgtcatggacaaaatagagatcagcgaaaaacaataccgagcagtccactagtgaattgactgtgcattgtgtcctgttttggcgtgtgctagtacataatgctgaatttttaatgtaggcatgtgttataattgttgccgataaacgtgtcgctcatccaattctttcc

SEQ ID NO: 94639 - DNA, 365 bp, Zea mays
  Clone ID: MRT4577_186302C.1
aaaaaaaaacaccaacaatccttcccaaaaaaggggttgggccgtaaaaaaaagggggtgatctaaagggggcgggggcgcggggccaataaggcaaatggccggcaatcacaatcacaacaccccacgctgggggccactcaggctgaatacaagagacacatagccgggaggggcctttgtccccaacgggaggccaggggggccaaaccatgcaaagtaccgaccgtaacgtagcgggggaaatcctggaccttcctttccccgggggcccccgttttcctgaaacctgcggggggggggcatgtaacctgagggccccttgccgggaaagtttttgcccacgcgtccccccacgcgtccgg

SEQ ID NO: 94640 - DNA, 1614 bp, Zea mays
  Clone ID: MRT4577_186303C.1
gggtacctcgaggccggccgggctggtcggacgggtgcatctaaatccgaacccccccgctcttggtcagagggggagtaaagcaaacaacggcggacatggtgcgcccaggaaaagcgcttgcggcgccccagctcctcctcctcgtgttcctctgcctcctagccggtggagcccgcgcatccccgcccacagacgcgctacgccgcgtctccccgcgcgcgggggccggtggcctctgccagcagctgctcctgccgcagggttacccgtgcaccgagcacaccgttcaaacggatgatggctttcttttgtctcttcagcatattccacatggcagaaatggaattgcagataatactggacctccagtttttcttcagcacggtcttttccagggtggagatacatggttcataaactccaatgaacaatcacttggatatatccttgctgacaatggttttgatgtttgggtcggaaatgttcgtggcacacgttggagtaaaggccactctactctctctgttcatgataagcttttctgggattggagttggcaagaccttgctgaatacgacgttttggcaatgttaagctatgtatatacagttgcacagtccaaaattttgtatgtgggacattcacagggaactatcatgggtttggctgcgtttacaatgcctgaaacagtaaagatgataagctctgctgcgcttctttgtcccatttcttaccttgatcacgtcagtgctagttttgttcttagagcagttgccatgcatcttgatgagatgcttgttattatgggcatccatcagttgaacttccggagcgatatgggtgtacagatattagattcgctgtgcgatgatgaacatttggactgcaacgatctgttatcttcaataacaggtcaaaactgttgtttcaattcatctcggattgactattatttggagtatgaaccccatccgtcatcatcaaaaaatttgcggcatcttttccagatgatcaggaaaggcagcttcgcaaagtacgactatggatggtggggaaacctaaggcgctacggccagctgcgtcctccctcattcgatctaagcagcataccggaatcactgccgatatggatggggtatgggggccttgatgccctggctgacgtaacagacgttgagcgcaccatcaaagagctgagatccacgccagagctcttgtacattggtggttatggccacattgatttcatcatgagcgtcaaggcaaaggaagatgtttatgttgacttaatgaggtttctcagggcccagcagggaatgcacagtagctattaggacgcacgtcacgtacgccttcaaataaatgcttatgctatgatgacagtacgaccatgtaaatacggacacagcatagcatgtaaatacaaacagtctattgcattgcatgtaaagtggtgtgtggattgttctccatttgatgtactgctttctgagtacagtacacatgtacatcagtacatgtaacatgtgtatatgacaaaaatgtagcacatgcaacttggcttatttcgtgccgattgtgtgcttgcatttggggaggaaatcgagttgc

SEQ ID NO: 94641 - DNA, 1847 bp, Zea mays
  Clone ID: MRT4577_186304C.1
ccgggtggaccggctgctggatcaggcaccgcgcgttttggatacctcgaggccggccgggggaacttgttttaccacatctcatcccactgactccaccgacccgcccgctgcttccgccggatctcgtcggactcggatccgcccgaccaccccgcgccgccgccgcgcagcagcagcaggccgaacccgaaggcaacgaggactagtagattcatacttccgccgccccgccgccgcgatgcagtatcacctacgccgatgcggcggaggcgccctcgccgctctctggcggctccgccacaacgcttcctctgccgtagcgtcgcctcctgtggcctggaggcgaccctgccttcctccacggttctactccaccgccgagatgagccagcagctccctgcgaacctagtggagatcatggagcagagaatgaagttgatcgagcagaggagcgcgtacctccaagagcaaatcaaccagacagccagccgcctcgccggaagagtactcgagggctaacaaggagttccgcaagctggagagcaccatggagttgatcaaagacctgagatcgaaacaggaggaaatcgagggtctcaaatctttggtagcaaatgatcatgaagagaaagacatgcgtgagatggcagaagaggagcttcttgtggctgtcgaggaggagaaacgattgcagcatgaactgtttagatcgctgcttccaaaggatgaagcagatgaaaaggattgcatattggaggtgcgggcaggaactggaggagaagaggcttctttgtttgcaatggatatatttagaatgtacgagaaatatgcccagaagaatgggtggaaatttgatgtcattgacataatggagtctgctgtgaaaggatacaaggaagctagtggaactatatcaggtcctggggcgttcggcaaactaaagtttgagagtggcatccatagagttcagcgagtgccagcgactgagaaatctggacgaatgcacactagtgctgtatcagttgctgttcttccgcaagctgatgaggttgatgtccagctgcgaaatgaggacctgagaattgatacctacagatcaggtggctctggaggtcagtctgtcaatacaaccgatagtgctgttaggataactcatattccaaccggaacagtggttgcaatccaagatgagagatcacagcacatgaacaaggccaaagctctgaaagttctccgagcgcgactgtatgagttggagaggcgtagactacacatggacaggtcaaagcttcgatcagaacagattggaagcggtgacaggtctgagcgaatcagaacatacaacttcccacagggccgtgtcaccgaccatcgcgttggagtcacacaccactccatagcagatgtcatggagggggagagcctggacatgttcgttgatgcgctcctgcttcaagaagagatggacgccattgcttcatttggcgcatagctagattaaaccttgcaacattgattcacgtcatggacaaaatagagatcagcgaaaaacaataccgagcagtccactagtgaattgcctgtgcattgtgtcctgttttggcgtgtgctagttttacataatgctgaatttttaatgtaggcatgtgttataattgttgccgataaacgtgtcgctcatccaattctttccaaactacagttttgctggcaatgttttgttgttcgttctttccaaactacagttgtgctggcatggttttgttattcataaacttggtgcgcctgaattgtctatggacaaacatgtttataagtgatccttaaaaaaaaaaaaaaaaaa

SEQ ID NO: 94642 - DNA, 621 bp, Zea mays
  Clone ID: MRT4577_186305C.1
gcggcagatcacccataatatgcacgagtcatatcagaaacacaccaagcgaagctacctagcatcgacttaacaacattggctaccaacatattatccctccttgcgctacatgccctttgtgtgagcgcaacaaatgcgtgcattatctcacagtgcacactcgctctcgctgctattagaccacagctcctcccacaatgtacttcaacgggctgagacacctagctgcgcaagcctacatgctacaacaagcgcttgcggatagcgtgttacaacaaccaactaaccaattgcaacaacaatacttggcacatctaaccatacaaaccatagaaacgcaacagcaacaacagttactaccagcactgagccaacttatgtggagaaccctgtagactacttgcaacagcagctgcttgcatccaacccactagctctggcaaacgtatctgcataccaacaacaacaacaattgcagcagtttctgacagcgctcagacaactagccatggggaaccctgacgtctacctacaacagcaacatctgctttcatctagccctctcgctgtgggtaatgcacctacatacctgcaacaacaatagctgcaacagactgt

SEQ ID NO: 94643 - DNA, 633 bp, Zea mays
  unsure (1)..(633): unsure at all n locations
  Clone ID: MRT4577_186306C.1
cgggaggctatagcactgccgctcgagaagatagcaccgcccgctgcaatgaaccgcgcttcttggctgctccttgttctggtgcagctctcctgcttgcactgctactcagccacccaccatggcggcggccggaagcacggacgcccactactacccgcgcccgccaacgtcgtcgtcggctccgttgtcgtcgtccactccggcagctccgaggctaccaccaccgccgtttcttcaggcaccctggtcggggtccgctgccacgacgggaacggccggacggtgttccggaaggacggcgtcgtgacggaccgcagcggcaggttccgcgtgcacctcccgcaggcgtcgccgccgtgcgtcgccaccgccagctccgctcgcgggctccacctcgtcgcccaccacaacaagcacgaccacggcggcggcactcgcgtcttctccgccggcgccttctccgtccgcccggagctctgcagcaacaagggcctgttcttcccgccggtcccgctcgtgccggagccacccaacgtcggcggcgtgcccatnccgcccaacccggtcacgcccgccccgccgtccctcgtgccgccgctcctgcctaccccgtctccggcgtccgtcctg

SEQ ID NO: 94644 - DNA, 1131 bp, Zea mays
  Clone ID: MRT4577_186307C.1
ccggccgcgctagctggatgggactaacggcgcgcctcctataggccggccggtatagcactgccgcatgagaagatagcaccgcccgctgcaatgaaccgcgcttcttggttgctccttgttctggtgcagctctcttgcttgcactgctactcagccacccaccatggcggcggccggaagcacggacgcccactactacccgcgcccgccaacgtcgtcgtcggctccgttgtcgtcgtccactccggcagctccgaggctaccaccaccgccgtttcttcaggcaccctggtcggggtccgctgccacgacgggaacggccggacggtgttccggaaggacggcgtcgtgacggaccgcagcggcaggttccgcgtgcacctcgcgcacgggccaagcagctcaagcagcagcagcagccaccagctccggtccgtcacgtcctgctcggtggcggtgcacctcccgcaggcgtcgccgccgtgcgtcgccaccgccagctccgctcgcgggctccacctcgtcgcccaccacaacaagcacgaccacggcggcggcactcgcgtcttctccgccggcgccttctccgtccgcccggagctctgcagcaacaagggcctgttcttcccgccggtcccgctcgtgccggagccacccaacgtcggcggcgtgcccatcccgcccaacccggtcacgccagccccgccgtccctcgtgccgccgctcctgcctaccccgtctccgccgtccgtcctgccaccgcttgtcccacagccaccgccgtcgtcggtaataccgccgttgttgccgttggttaagccgccgccgccgccaccgccgccccagcttcttccacccctggtgccggttcttcctccgggggtgcctggcgtaccgccggcctccgcttcaacgaatcgccgccccgtgaacgtgaatcatccctgagaaaaaaacttggagctgtactgtgttgtcttttacatttacacgcacgtacgtacgaactgccgtcagctgtaattttcttgttcgtcaatctgagctgtaattttctactctaccaaaaatgaaactattcactatataaagcactaaaaaaaaaaaaaaaaaactcgagggaggggc

SEQ ID NO: 94645 - DNA, 555 bp, Zea mays
  Clone ID: MRT4577_186308C.1
gccggccgggctgccatagcactgccgcatgagaaaaagcaccgcccgctgcaatgaaccgcgcttcttggttgctccttgttctggtgcagctctcttgcttgcactgctactcagccacccaccatggcggcggccggaagcacggacgcccactactacacgcgcccgccaacatcgtcgtccactccggcagctccgaggctaccaccaccgccgtttcttcaggcaccctggtcggggtccgctgccacgacgggaacggccggacggtgttccggaaggacggcgtcgtgacggaccgcagcggcaggttccgcgtgcacctcgcgcacgggccaagcagcggcagcagcagcagccaccagctccggtccgtcacgtcctgctcggtggcggtgcacctcccgcaggcgtcgccgccgtgcgtcgccaccgccagctccgctcgcgggctccacctcgtcgcccaccacaacaagcacgaccacgggggcggcactcgcgtcttctccgccggagcctttctcgtccgcccggagctctgcagcaaca

SEQ ID NO: 94646 - DNA, 396 bp, Zea mays
  Clone ID: MRT4577_186309C.1
cggacgcgtgggcggacgcaccaagtacatggtcattcagggcgagcccactgctgccatccggcgcgaagaacggatctggatgcatcactgtgaaaagcacacggcaagcgatggtgggaggcatctaccacgagcccatgacccccggtcagtgcaacatgtggggctgtgaggctgactgactacctcgcacagcaaggtctgagagtggattcattaaacctctctcgctcactggcacatggatggagcatccatcaacagctataccgacatcatgattatataattggtaaccttctatagctacccacgcattatactccattacacgctcttggattgcgcggggctatgtgaatcatctctcatccttcgtctgccatgtgtgcc

SEQ ID NO: 94647 - DNA, 270 bp, Zea mays
  unsure (1)..(270): unsure at all n locations
  Clone ID: MRT4577_18630C.1
cctcgagtccggccgggatctgttgtgggtcgctccgcacgcacgtgacgtacacttgtccagccaccaccaccacttgttctttcccttcccttccttcgcctccgcttcctcctcctcctcctcctgcccctcccccacccccagcgcggcgggacgccntccccactttcccctgcggcggatccgcatggcgcctctgcggcccgcgccgctcgggctcccgtggggggggggcggccccgtcccaccgtccgttgggccgagcgc

SEQ ID NO: 94648 - DNA, 288 bp, Zea mays
  unsure (1)..(288): unsure at all n locations
  Clone ID: MRT4577_186310C.1
agagctctctaagatctgtgactaccattgaatggtagaacaaggagacaattgcatcaatttgttcagataaattatagattttattggtcaacaataacacaagtagccagcagtgtgctcaaaatacccgtgacagttgaaagtgcaaacaattcctttaatagtgcatcaacttgctctttggctgggaccttatgatgagcatccaaaaatgtcaaaagcttcgagtaaaaagcntcgagaattgccatggatggagagggatcagagcttgtgtattccaca

SEQ ID NO: 94649 - DNA, 1892 bp, Zea mays
  Clone ID: MRT4577_186311C.1
cgcccagctagcacagcactcataagttgtatagctagagatagatcgagcgagcagctagctagctatctatcttagcggcatatatcgcgaaacatagctagctggagtgagttttgtaatcatggacgccgccaacaaagtaggcaagcagcttaagttcgacgtctcgtcgaaggcggaccggcaacgcttcaatacgactttcatccaggagattcgccgtgagctcggtgacacaagcgtgatgcaggaggcgttccagctcccgcctcagacggacaccccgagctttcaggacctcgtgctgatcgccggcgagagcaccgccaccctgcggctgcgtaccgacaacctctacgtcgtcggcttccgcaaccaagccggccggtggttcgagttccggcacgagaacggcggacttcctccgatcataccaggggcgacgatgctgcacttcagcgggagctacgtgggcaccaacagcctagctccgctaaatggtccacgagatgtcaatatcggtcgccacacgatcgagagtgctgtgcacagcctggcccagtcgacgggagaagaggatcaaaggctgaaagactggttgcgcacgctgatcgtgagcttcatcgagtcgatcaggttcaactcggtggccagcgcggtggccgaagcgctgcgcaacgaccaagtaaatcagctcgaggagcaccacatccaccaaatccgcaactggagtgccatctccacggcgctactcgccgccgccaacgacgtcgtccaagaccccgacaccaacctcttcagccagttcgccaacgagtgcaggatacgcaacgcctaccaagcggccatcacgctcggcctggtgctcgtcacggccaggaccaatcgccgccatccccgcgccgccgacaccgccgccctcgggctcacccttgtggaagtcgtgtcggtgcggatcctctacatcgacggggaaagacccggcgacctctacgggacggtcagagtcgtcgactccttcggcggcgtgcacgtgtacgaccagcccagagccagcgcgcagtcggtctaccccggggacaacgccaagctcgtgtggccgtctcgtgtcgtgtcggccgccgacgacttcgtcatcgacgtccacctcatggaccgggacacagatccatcgccggacgatgaggtggccaaggggatggtggcgtggaactcccgcgacgccctcagcagccaccgcaacgtcgtgacgagccagctcatcacgggcgagtacggctcggcacaggtcttctacgcggtgttgaccaacgccgtggtggccaccgtcgccgtcctgctcatcaacggcgacgacgagagcgtccccgacgtgtacggctccatcacagccaggaccgacatgtccggcgccagcaactcgctccagtaccagctgttcaaaagggggcagaaccaagatgtgggtgtgccggccaatacctacataccccttaacaggaaggtggtcgcggcggcgctgggctcgccgttcaaggtggacgccgacctgtgggacagagacagggacccctcccctgacgaccagatcgcgctaggctccgtctccttcaacccacgcttcgtcggcacggacaaggccaggatcaccggcaagtacggcgagattgaggtgcaggtcacctggtcaccctccgtcatccaaccctagctaggtcatccatcttattacaataataatgaataaaccaagatcgagcgaatccaacgattcctgcatagataagatcgatcgatcgatctcgaagtgtttagtttttgtatgccaataaaccgcatgcatgcttgcggggatcaataaataaataaatgttctactccaaaaagag

SEQ ID NO: 94650 - DNA, 278 bp, Zea mays
  Clone ID: MRT4577_186312C.1
accccctcccatggaaagtcccgcgttacgctgtccgtttgcgcgctcgcgctcgtgtgcatcctcccgctctttgcgccgcggcccgccctgtgctcccgtgccgcgccgaaggacggtgtctccttcaccggtgcatgcaacaccatacatcaactcctgatagattacgcgctccccgcaggaatgactcatcgcagctcgaagacctacacgctgagaccaatcagcccggccagcagtaggcatcgcctcggaggaagcttgcttacccacaa

SEQ ID NO: 94651 - DNA, 342 bp, Zea mays
  unsure (1)..(342): unsure at all n locations
  Clone ID: MRT4577_186313C.1
gtatctcccagacgcacacgggtgcgtctctttcctctgcgctcatgctgggaattccttttccttcatctgcggctccttgcgctagcgcgcgccgtctccagatcctgctcgcgtgcgtgctccttccatgagtcgccgtctgcgagcttcaacctgtcatcggtccgatcgtcgttcccgaccgtcgccctccaccagttcgcgtgctgcacgcacgccggacccgcctncccctgctcgctcgtgtgtctgctctctgctccctgtgcgcatggcctgccgcgagctcgccgagctctgccctcttccatggcgttcaacctgctgcgccgcgacccc

SEQ ID NO: 94652 - DNA, 599 bp, Zea mays
  Clone ID: MRT4577_186314C.1
ttttttttttttttctttttttttttttttttttttttttttttttttttttttttttttttttttttttttttttttaacgggaaaacccctaattttatttattggatgagtgacaaggcccaacgggattggaacaatggtttataaaccaggcggggggaaaaaaagcaaaaaaaaccccccagggcagaaaaaaacaaaaaatttccggctccaaacaacaccccccttttttaagggcggcccccaaaaaaggggccccccaattccaaaggggggaaaaaaaactaattgcggggcttcatcaaccccctgaattgtttcaaccacttgcgaaactccctaagggaccgagaaaaaatattggggggaccaacctaaaaaaagccaaaacgggcggggaaaccggacaaccattaaaaggtgcccaccaaaaaccaagggaaggaacctggaaagtttgcccccaaggctattgataccctaaaaggatccagggggggatggaagaaaccaaaccgttaccacctattaaaggcaccccccaggggaaaaggggttccctgggtaccaaaatccccgaatccggtctcagg

SEQ ID NO: 94653 - DNA, 338 bp, Zea mays
  Clone ID: MRT4577_186315C.1
gcctttcgtccggttacgactttcaacggtaacgaggggccatatggaaaacaagggggtggtgggcaggtgatgggttgggctactttccgacgtgaacggagctgtttacaatggcaccgggaagcatctttgcgactggaacatgcgagacagactgcggagataacgatgggctttctgaatcactggggggtattatgcttgacatgcactcatcaagtaaaccgtggtctacatcggtttcggctagcacaatgttagcattgatactcgctgtgtggattgaatgattttatagaatgcccacagtgtaccaactagatgcgcccacgtat

SEQ ID NO: 94654 - DNA, 444 bp, Zea mays
  Clone ID: MRT4577_186316C.1
gggcaagctttaacggccttccattttttttaaaacgaacaaaaaaacgggggggcgtcccaaaggggcatagcccaaaaaccctagccgggttcacatttgaatcaacgatcttaggggaccaaaaagagggggttttggcattcccaaacacattgggctttaaaaggcatggggactaacggggggctaaacctaggaaacaaggcgggggcgaatgccttttttccagggggggggttcaggtggcatcggcatcgacggggggagccttggaccagcccccctttttggggggggggggcctggggattttgggcataaccccccccctcgcgagggggggcccaccaaacagcttgggcagctccttctctttgccccccgggagctggatgtgaccccgcaccatgcggggctttttggtatccctccgtggggtcc

SEQ ID NO: 94655 - DNA, 598 bp, Zea mays
  unsure (1)..(598): unsure at all n locations
  Clone ID: MRT4577_186317C.1
gcgttcttggncgcgtgggttcttcctctccgggggcggactcaacatccaaanagcagcagcggtggtctagttcaaagttcaagtgcgtcgaagatcgttctggagaaaacttgagcaaatgcacgaccgagaacagcagcctttccatcgaatcgtcaagcgattcgtcttcctcctgtgcttagacnggcttctcctccctcgatggcaacaaatcagtccaacaggagcttccttacaccagcgaggagctctttgcgcagaggccactgaagagctcgccgagtctgagggaacctgacatgaacgccaagtctggccatcctaatgtgggtttcagagacatagtgaaggactgcatcaaccgggactccgtaggcctgacagtaaaaacttcggtgcaggaggcaaggagaaatgggcagcacaaggactcaccgaggccactgctgctgtccaaatcaatggatgggacctgtatcattgggatcgataggaccacaaatgttcctgcaaatgtcaatggatctagaaggtgtttgcaggagcagtcacgcttttcttgtgatgaccgaaggctcctgcgaccaactga

SEQ ID NO: 94656 - DNA, 293 bp, Zea mays
  Clone ID: MRT4577_186319C.1
ctcagtcactgggagaagaacctctcataccctcggtgctccagtccccagctcactcagccacatacaccatgtgtgaagaggagaccaccgcgctcgtgtgtgacaatggctctggcctgtgcaaggcaggcttcgcaggagatgatgccccccgggctctcttcccctccattgtgggccgccctcgccaccagggtgtgatggtggaaatgggccagaaagacagctatgtgggggatgaggctcagagcaagcgagggatcctaactctcaaataccccattgaacac

SEQ ID NO: 94657 - DNA, 293 bp, Zea mays
  Clone ID: MRT4577_18631C.1
gttgggttgtttacaccaggggaacaaagggtggttatttggcaacaaattacacacatttgtggctttccacaaccacacgaccaatatgtgcaatataccgctttttttttccaccacccatttttttatcaccatttctgaggcctgggcatccaacccccctggactcgggatcccaaaatagattcaatcggttgcctgagcatgacctgttggcacccattatttttcaccaccatccaccaagctgtgtacaaaggtgtgaataatgcaaccatcggccccgcctg

SEQ ID NO: 94658 - DNA, 255 bp, Zea mays
  Clone ID: MRT4577_186320C.1
ctctagtcctccacctcaattgggcaccaacatgttagtaccgctctggtgcgtctaccaacatcttatcttagatcgatctcccgcactgatgatcagcgctacgataatcctaaaccagccgcagacgcaatcacggctcgggttggattcgtggggcaccacgtggcaatcgaaaccccacaggccacaactaactgaatgaacgggggaagataatgttggatccgagtgggggacttagctgcggctcgg

SEQ ID NO: 94659 - DNA, 402 bp, Zea mays
  Clone ID: MRT4577_186321C.1
cttatatatagggaggatttatacaagagatggggttttgccaaattatttatgaagaaagaacaaggggacaccccggagccggggtgaatttaaaagtagaccgaaaggggccaaacacccacttgggtgggctgcattattaaccatacacacaaggccatttattaaaacggggtgcgggcacatgagctcgcagctatatatccatgcgcacaaaaatgctagaaaaccccatataaacccaagcgcttgtcacaggcatgaagacacttggagaaactgacagggttggcatactgggagcccacaaacatggggctcaggagaatcccattagggggaacccgccagagctttgcaaacaagaagccccgggggggaaggccccagccccgaatg

SEQ ID NO: 94660 - DNA, 144 bp, Zea mays
  Clone ID: MRT4577_186322C.1
ctcgacatcatcggcgttggcggacgcgtgttgaccggagattgcgccgagctggttgaggaagagcgcagcggcgcggtgtcgcatggagcccggccacggtttgcctgtagctcgcgctctcagccgccgcactgacgctcg

SEQ ID NO: 94661 - DNA, 621 bp, Zea mays
  Clone ID: MRT4577_186323C.1
ccgtccggttttattgaagggatcaacagtatagtatttgttttatgaacattcacattaatcacattatgccaagctgtctagaacagtgataggacatcatagaccctgagccttttaagcttcaatcatatgcttacacatatgtttctgtgggcatgagttaagctgttaacacatttcaatgtttctgcatgtccgattagtagttacccacctgcaatcattggaagggggatgctcaatgtgaactgtctttttgttacaaattcgctatttcttttggagtgacctcaaataaacactaaggtatcttgttttcatttcattgacgtaggtatttgacttgtttgacacgaaacacaatggaattctcgagtttgaggaatttgctcgagccctttctgtgttccatccgagtgcaccaatcgatgacaaaattgattgtgagccttctttcttaactttattcattcattcatttattcttgattacgctacataagtgaccgaatatcgagttatgggtttaatttgtgataatactaattcaagataagacgatgagtcagtgcttaatacatatcatgaaaacacttctggacatgataggcagctggg

SEQ ID NO: 94662 - DNA, 499 bp, Zea mays
  Clone ID: MRT4577_186324C.1
cggctcgaggaaactgccgcgtccacactttgatgaggtggatgatgagccatataaactctttacaaggcggaacaggacagaggtttctattggaaagatggtgaatattgaatatcttccagagatccataaagctccataagaggatggagaggttgctcaaaaagcaacagagagatgctcttcttcttgagagctactaggcattagatggacttaccaccgtccgttctatacgggatagaacgcccgcgacttatacatttgatgactatgatcgctcagtcattgaagccatcaaaattacaaagaactgagagaactctgctgatcctgctgctactactgccaatataagggcgctacctccaggatcggaggctccaagcattgggaaggtaacttatggaccctcaccagcatccaatgactcatctgatggaaagtcttcagagtccgatgactaccgagacagccatggtgaacaggaacttga

SEQ ID NO: 94663 - DNA, 229 bp, Zea mays
  unsure (1)..(229): unsure at all n locations
  Clone ID: MRT4577_186325C.1
caacgacagaagacagcggaanccgaggaagacagcgacgaacagagaaacaaaggggacancagggaacaaagcaaagcaaaagcacggaaaggggcgaaacaagccggagcaggcccacaggaaaagaagggccaggcaaacaacacaagcggccaaaaaggaaaaagaggagcaagaccaaacagcgaaaaaagaagaaccggaagcaccccaccacaagcacccc

SEQ ID NO: 94664 - DNA, 376 bp, Zea mays
  Clone ID: MRT4577_186326C.1
tggcttggaacctttgggctgatttatgtgcttggttacgctccttaacgtaggggctcatgcggacgttactgctggacgtatcggcgacgttgggacctgtagacatgggaatagtaatcgtaatgattggattaattatggaaacggactcggggcgactaagaaggttgaagttgatactgagacgcatacgtgcatggacaacactgaatctgacaatacggatgcatacacggagaacgtgtggctatacgcgcgatcggaatattaatggatgtagtggatagtgctactctgggtgtacatcttgtcgtctgagagagagactgattctcttaagtctgatacgtagaattacactgtctacgggatt

SEQ ID NO: 94665 - DNA, 302 bp, Zea mays
  Clone ID: MRT4577_186327C.1
aacacaaacgcattcatgggagaagtagccaagtattgaagccaagaagcacacgaaccccacctggattaagtggcgcgggatggatctactgaatacaaccatgtacaggaggccaagctgcttcagaggcgatggtgcccgactaggccgcagcaggcttgaggagaatacgggtactgcaaacaaggctccagggagttcaccataccaaaactggaattgaaagcaggtgcaatatgcatacacactgaacctgaggagtatgcggaaacgtatgcactggaatcacaatctaaaaa

SEQ ID NO: 94666 - DNA, 425 bp, Zea mays
  Clone ID: MRT4577_186328C.1
cgtccggacacgcctcccgaccgaacctccaaaccaaccccaccatcttcattcctcgcggaccaagaagaggaagaagaggggatatgagacggagacggagaccgaaccgatggtcgcaaggatggacgcgggcatgcaggcggtgcacgcggtcggcctgctgagcgcgctggtgttgctgctcgtgctgcgccggctcctcgccgtgctccagccgctggccctgctcctgctgctgcccttacggtggcgcgcgcgggcggccggggccgtggccgccgacgtggcgaccgatgccgccacggcctccatgccgagggccagcgggaggaaggggaaggcgtcggcggtctcgcacggtggctctccggttgcccgtcgggtcccccatgatgcccgcgctgtggcatgcgtacaaactc

SEQ ID NO: 94667 - DNA, 991 bp, Zea mays
  Clone ID: MRT4577_186329C.1
ggtaccctcggagccggccccgcctacgccccctcccgccgccgcacgatgagcacttctcccgccgccgccgacgtttcgcctttgccgcctactgctgccgccgacgaggccgcgcgggcgacagagacggtggtggtcgatgagagggtcgcctcacacgtggacccgttcctcgtcgaggcgctcgacaaccctcgccaccgtctcatgggtgggacttgatgaagagtacaaccgatggtctctgctctggtggcccatgttgagcaggccactgtagctgaagccacatcctagctttatatttgacaccaggatggatctacttcatataggccatcaagcctctgctaatgctgctggtcgagggtgcagaaacaaccgtggccgtgaccgtggccatggttgaggcatagggcatggtggctaccaaggtccattatcattttcatttgatggacgtccacaagcttagcaccactgacatgatctgtcaagtctgaggctaggtaggacgtattgcctccattggtggtattgctacgatgagagctacacctccaacacgaagactgcagctgtggccacctaccaggctatggtatcgatatcaactagtacatctacatgacgtcaacagatcatattacaagtaatctggacaagctagcagttcagaacaaggggacaaattggacctcacagccagcagggcaggtatgagcattgacaacattggtcatgctgttattgatacccatgttaaaaccttgtatctcaacaatgtcttgtccccatgctcatcaacaaaatggccctgctttcacatagtagaggttagcctatctttgcttgcgcgtgcttcaatgccactaaaattttgggatgaagcatttgctgctgcataccttataaattgtacagtcatcaagttgcttgattatttattttcttttgagaaattatctcaataatatcttgactgttc

SEQ ID NO: 94668 - DNA, 262 bp, Zea mays
  Clone ID: MRT4577_18632C.1
ctgcctacgcgcacctttcggccacggcgctgttgcagaaggcggcgcagacgggcgccagcgtcaccagcgcgggctacacccacatggcggcgcccgcgacaagcgccaccttcagcctcagtctgccatacctgcagaatacccagccacaccagcatcaggacggcgggatcatggccgggctctctaggacaggctcccacagccagtgctgcgaccaacgcgcggtccagaagcggacgcgaccgactgaccagtg

SEQ ID NO: 94669 - DNA, 290 bp, Zea mays
  unsure (1)..(290): unsure at all n locations
  Clone ID: MRT4577_186330C.1
gcccgacgggcgcacctgcatccatgtcgtctcaaactcctgtcatggactcgctagagaatggtgctactgacaaatgtagactagcgttggctcatggaacacctgtgggtctcccatctgatgatgacatgggcaacagggaacctggccacaatgcactngctgctagtgcggattttcgccccaggtgctactcttggtgatcaagctcttgcctcatggacgatttatgaacggagatgggaccgactacatcatagaatcttccgaaaatggtacccttggcc

SEQ ID NO: 94670 - DNA, 333 bp, Zea mays
  unsure (1)..(333): unsure at all n locations
  Clone ID: MRT4577_186331C.1
ttttttttttttttttttattttcttattttttnctcttttnnannaannnananaaagggaagggtttgctacaaaaacatatttttccaacccaaaactaaaagaaccacccaattgctaaccaacacaccaattatacacccaaaaaaaacagcgccactgggattacaccttaaaaatacagtgaaacaacattctgccttaaccacagcaaaaccaaaacaagttaaataattgctctacccaaccttaacacggaatggataaaccctaggacatacaccctgcctaacgcccacacccaaatttatcaaccataccaccacgcccc

SEQ ID NO: 94671 - DNA, 617 bp, Zea mays
  Clone ID: MRT4577_186332C.1
ccccctcggagtaacaactccactcccgcggaaaaaaaacccatatccctccggcataaacccaaaaagctgcaagcagtgtgaccaaaagcaggcctgacggcgatcctcggctctctagccaggcagcaggagatggagcacgacgtgcaccaccagcaccagcaggccatggagctgccgccggggttccgattccaccccaccgacgaggagctcatcacgcactacctcgccaggaaggccgccgacgcccgcttcgccccgcgcgccgtcggcgaggccgacctcaacaagtgcgagccatgggacctgccatcccgggcgacgatgggcgagaaggagtggtacttcttctgcgtcaagtaccgcaagtacccgacggggctgaggacgaaccgggccaccgagtccggatactggaaggcgacgggcaaggacagggagatcttcaggagcaaggccctcgtcggcatgaagaagacgctcgtcttctacacggggagggcgcccaggggaggcaagaccggctgggtcatgcacgagtaccgcctccacggcaagcacgccagcagcagccgcctcatgccgtcgtcggtcagagctggcgcgtcaaa

SEQ ID NO: 94672 - DNA, 501 bp, Zea mays
  unsure (1)..(501): unsure at all n locations
  Clone ID: MRT4577_186333C.1
ccacaccagcaggggggcggcccgaccgagagcnccgggcacaggagcaccgcgncgcagcccaagcgccggaangccaccnccgacgacnncagggccgccgncaccgacaggacccacgcggacggcacgagcggcgggacgcggcgggggcggagggaggcgaagcagaagggggccaacaacgggnncggccgcancgggcgcaacaaccagcggngcnggcacgggcgcggcgacgccacgccccacgacgacaacgccaacaacgacaccggcggngacaagcaggcgaaccaccngcacaagnacgacaccacgcacggcagcaacgacgccgacggcaagcccgacggcgacaacgccaacaccgacgacggcaaggacaacaaggacgaggccgaccgcaaccccagcaaccggccgnggggcgagcacggcaacgaccacgaaaacgagggcaccggcgacaacgacgaccgagagggcgcggggaagcac

SEQ ID NO: 94673 - DNA, 1566 bp, Zea mays
  Clone ID: MRT4577_186334C.1
aagtcatgacacaaattataattgtagtatatataatataatgcagaaccattgcagaatatcctcgctccacgtagccatttctagcttttacagacacacactatagtttttagtatgtatgatttgagattgcctaaggatttctgcgttcctcatagatcttcacacaagtatcacacaggcacgctatatataactctaaacccaaatcaattaatttagtactacgcaaaacaaactttcttcacaacaatttttgctcccatttaaaaaaaagcacactagaatcccccgtttccaatccggtggctaatctaatccagtttttaacgatcgcggaaaaggtcgagatcagctcagaagccccagaaggaggcctcgtgatccatgcagtgccgcgtcgacgagatctcggcggggacgccgccgctcagccgctccctctcgccggccagcttgccgtaccacccgccggccccctgcaggagcccgtcgccggcgtactgcgcctgctgctgcatcatcatgctcgccaggaacggcgaggcggaggccgccagggcgatgtggtccgcggctgcggcggcggaagggaggaggaatggtgggttcaggaactggccctccagcggcgcgttggagaagcaggtcacgtgtggtgccggtgctgcacctgcaggtggcgtcacctcgatggacgccgccgccgccgctgctgaaagcgacatgttggcgccgctgccgccggacacgtccatcagcggaggcaacgcggcgcacgcggcgaagtcgtcctctgtggacatggacgacggccccactcccactcccgtgccctccgtccccatgcacgcaaccgacgatgacctcttgctgccgggcacggatggcggctcgatgctcttcttgaacaccctgcacagcacccactcgtcctgctgcgacgacgcgccacagctgaccgacgacgggacgaggctgctactgctggaggcggcggcgtgcttgccttggaggcggtactcgtgcatgacccagccggtcttgcctcccctcggggccctccccgtgtagaagacgagcgtcttcttcatgccgacgagggccttgcccctgaagatctccctgtccttccccgtcgccttccagtagccggactccgtggcccggttcgccttcagccccgtcgggtacttgcggtccttgacgcagaagaagtaccactccttgtcgcccatcgtcgcccgagatggcaggtcccacggctcgcacttgttgaggtcggcctcgccgacggcgcgcggggcgaagcgcgggtcggcggccttcctggcgaggtagtgcgtgatgagctcctcgtcggtggggtggaagcggaaccccggcggcagctccatggcctcctcctcgtcctcctgctgctgctggtggtgatggtagcacgtcgtgctccatctcctgcctggatagtgagccgaggatcgccgtcaggcctgcttttggtcacactgcttgcagctttttgggtttatgccggagggatatgggtttcggacgcgtggg

SEQ ID NO: 94674 - DNA, 848 bp, Zea mays
  Clone ID: MRT4577_186335C.1
gtctgtcttttactgtaactcgcacgcagccgggcgctctcctccccgtccgtctattctctatacaaaagcgggactccgtgtcgcccctgcccacctggccgctccatctcgcgtccaacaatcaattcggcgtcgctctcgtctcatcagtcatcactccgcgactgcgagcgagcgagcgaggcccttccgcgccacgcgcaatggacgctgctctgctcgtgaccgtcctcgtccccgcggtggcggcgctcctcgtcctcgggtccggggccgcgtccgcctcgccgccgcgcgccttcttcgtgttcggggactccctcgtggacaacggcaacaacaactacctcatgaccacggcgcgggccgacgcgccgccctacgggatcgacttccccacgcacctgcccacggggcggttctccaacgggctcaacatccccgacatcatcagcgagcacctcggctcccagcccgcgctgccctacctcagccccgacctccgcggcgaccagctgctcgtcggcgccaacttcgcgtccgccggcgtcggcatcctcaacgacaccggcatacagttcgtgaacatcatcgggatcgggcagcagctgcacaacttccaggactaccagcagaggctggccgcgttcgtcggcgacgacgcggcgaggcaggtcgtgagcaatgcgctcgtcctcatcacgctcggcggcaacgacttcgtcaacaactactacctggtgcccttctccttccgcttccgccagttcgtcatccaagactacgtcccgtacctcatctccgagtacagcaaaatcctcacgcggctgtacgagctcggggcc

SEQ ID NO: 94675 - DNA, 782 bp, Zea mays
  Clone ID: MRT4577_186336C.1
ggccgctcatctcgcgtccaaaatcaattcggcgtcgctctcgtctcatcagtcatcactccgcgactgcgagcgagcgaggcccttccgcggcacgcgcaatggacgctgctctgctcgtgaccgtcctcgtccccgcggtggcggcgctcctcgtcctcgtcctcgggtccgcgtccgcgtccgcctcgccgccgcgcgccttcttcgtgttcggggactccctcgtggacaacggcaacaacaactacctcatgaccacggcgcgggccgacgcgccgccctacgggatcgacttccccacgcacctgcccacggggcggttctccaacgggctcaacatccccgacatcatcagcgagcacctcggctcccagcccgcgctgccctacctcagccccgacctccgcggcgaccagctgctcgtcggcgccaacttcgcgtccgccggcgtcggcatcctcaacgacaccggcatacagttcgtaagcaacaacagagacagataagaggcagacgcgtcgttgcctgccggagccggacgacagggatacagcagtacgtcctgtagtgtagctgcatatacagcagaactaaccttcgttattacgtacgtacggcgtggccaggtgaacatcatcgggatcgggcagcagctgcacaacttccaggactaccagcagaggctggccgcgttcgtcggcgacgacgcggcgaggcaggtcgtgagcaatgcgctcgtcctcatcacgctcggcggtaacgacttcgtcaacaactac

SEQ ID NO: 94676 - DNA, 120 bp, Zea mays
  Clone ID: MRT4577_186337C.1
tctggccctacctaccttatagggatggtgagatagcacagcagaaatattctgagctcacgaaaggaatgccgtcacttagatctgagaggtactatacccctttcaaagaagatccca

SEQ ID NO: 94677 - DNA, 360 bp, Zea mays
  Clone ID: MRT4577_186338C.1
cccacgcgtcctaacacctgcaatgggagagataccatgtttgttttgccgcctctgtctgctgactagtacattcaaagggcttatgaactcttatgtctcatcttgaggattcaactttctaagtatcccccatcaactctcttatcttctgtgtacggcacctcctgtttattcaagttattcatgaatggttatctcggcctttgggtatgttcatacaatagccacctttgaaatggctgcaggttttcacgcattgatccagtacactgatgcagatactgcctcagctgctagagaagcctgagattgatagagcatcctaagttacttgcttgcataacacgtttcatcctg

SEQ ID NO: 94678 - DNA, 232 bp, Zea mays
  Clone ID: MRT4577_186339C.1
tcgggggacagccaaagaagacaggcgggcccagtgaggctagcactggcgcttctacccactatactagaggatcgtgagcaagcggtgatctttaaccctgaataggagactcatgcgctcctgctcttgcacgaagtcggttttccaagaggagtgcttggcttcgaggaggattcctctgctcacggggcggtcgtggccggggaaagtaaggttgcatctggcccac

SEQ ID NO: 94679 - DNA, 247 bp, Zea mays
  Clone ID: MRT4577_18633C.1
attattatttttttacatatatttttttttttgggttttttttaattctaatttcttggtgacccctcttcaaaaaaatgcctcaggcgggcctatggggggacacaaaaaatatgtttggggaagaagggggacacacctacaaacacaagaacaccccccctcaagacaaaaccccctagcggggcagagacaatctaggtcgcaccaaaaataatgctgcggttaaaaactgtatttaacgacc

SEQ ID NO: 94680 - DNA, 829 bp, Zea mays
  Clone ID: MRT4577_186340C.1
gttgaaatcttctcgatcgaaggattccaaatgggttcggtttcgggtcaaacccgaattgctacgatgaacctctccctctcctcatcagagaagagctctaataatcgctcctcctcgcttctcaatcctaagaacgcagtttcagatagttacggggtctcttccaaatgcagcacattcctcaggggccagttccaaagaatacaactctcttatactcgccacactcgacctttgccaaaacgtgcaggccacgttgtgtctccgagctgcgtcatgccgttgacggaagagaatgtggagagagtgctcgacgaagtacgccccgcgttgatggcagacggaggaaacgtggcgctgcatgagatcgacggactcgtggtggttcttaagctacaaggagcttgtggttcgtgtcccagctcgtcgatgacgttaaagatgggaatcgagagtcgtctccgcgacaagattccggagatcatgtccgtcgagcagtttcttgaagcggagactggagggttggagctcaacgaggaaaacatcgaaaaggttctcgctgagctacggccttacctatcgggaacaggaggtggagggcttgagcttgttgagatcgatggttatatagttaagattcggctcactggaccagctgctggagtcatgacggttcgtgtcgcgttgactcagaaactgagggaaaacattccttcaataggtgcagtccagcttctagagtgaccactttttgtattgttcatctacgagagcctatatttcgattatatgtacatcattttcaaatctaacatccataccattc

SEQ ID NO: 94681 - DNA, 344 bp, Zea mays
  Clone ID: MRT4577_186341C.1
ataattgtcccgggggatgaacatgcaaactatgaacaattcaagcgaggcaggagcacctgatacattagtcgccagcgtatccactggcatggtgaagaaaggggcatgcatacgcaaggcaggtatgcacaggaagaagtaggtgcgcgcgacctcaaggcggggctgatgaatgcggttccacttgtcggacgctacatgctgaaagtcctatacgcgcacggcgtgggcactgtgtcccatgactaccttgaggtcgttctggagctcttcgacaacttattattttggtcacgccaacactctgctatagacagcaaaaaaacgcgcataattctgac

SEQ ID NO: 94682 - DNA, 406 bp, Zea mays
  Clone ID: MRT4577_186342C.1
ggcaggttaagggaagctttacaaataaagatcgttccaaccaacacttgggcttatttttaataaaacaagcagcagttcctggtgtaccgacgccgacacaaatccacccacacaaacccggacacacccaccattcggggtctggggcaggtcaataggttccatccgcattcaggcagggttttgggagcccaagctcctgaacgcgggggggcaagccccgtttttttttagggggaaagcttgcccaaaacgcttttgaatttggcctttttcgggtcccttttaagctaaagcgccgccgtcaccaacccggacttaggcgtccacgggtaaggcaggagcttgatcttccgcggcccctcgaatctttccagcctcgctgttttcggggccttcaata

SEQ ID NO: 94683 - DNA, 174 bp, Zea mays
  Clone ID: MRT4577_186343C.1
acctttccgagccaggatgacgtctgacatattcaagtgtttcggccgcatactatagaggattcatccaattcatattgggccaggataccttattcggaaaaggcccaagggaaaaaggcgaggaacatttttttggtactgatgccccaaaacggctcactggattattta

SEQ ID NO: 94684 - DNA, 721 bp, Zea mays
  Clone ID: MRT4577_186344C.1
aattcggcacgagggtgagccgactctctcgagcgccttgcactaacactctgcgccgcctgcggcctgcccccaggccctaactcacgcaccatcgcgaagtcctcgacctcaagctcactaccttctagaatacgaggatcaccagcgccgccgcatcgggccgctggcccatggacaagctccgcgtccaccgctgtaccggcgacgcggtcgagtggtccccctcccctatcgtcgcgctcgccgcctctccttgcgcctctcaggtcgccgccgcgcgtgaagacggctcactcgagctctggctcgtctccccgggctccgtcggctggcacaaccagctcactatacaggggaacgacgagtcgagggtcacatcactggtgtgggggcggagaggaggtgaagcgaccggccggctgctctcgtccagcgttgatggggtcggtttgtgaatgggatctattctacctgcagcaaaagattgttctagatactgttggaattccaatctggcaaatggcaattgagccttcagttgatgctaaaaatactgaaaataatagctcagagtttgctgtcaatggccatccaaaccaaaatgactccagcgattctgacttaagtaacattgatgatggtgataactctgaggatgaagatggttctaccaacacaatatcttcatatcatgtgaatgatttccagcgactggctc

SEQ ID NO: 94685 - DNA, 148 bp, Zea mays
  Clone ID: MRT4577_186345C.1
tagaatccaaaggcggccgccaaagccggtgccgatctgccggtgaatatcatcggggcggcagaatccccccaaggtcatgaaatgtatggccgtcaatgaccccaacaagcctaatatgactgctaccactttcttcttgttcatg

SEQ ID NO: 94686 - DNA, 385 bp, Zea mays
  unsure (1)..(385): unsure at all n locations
  Clone ID: MRT4577_186346C.1
cggngtggccgtacgtggtccacggccactacgcggacgcggcggaggcggcggcgcacctggccagcgcgctcaacgtgcccatggtcatgacgggccactccctggggcggaacaagctggagcagctgctcaagctgggccgcatgccgcgcgccgagatccagggcacctaccggatcgcgcgccggatcgaggccgaggagaccggcctcgacgccgccgatatggtcgtcaccagcaccaagcaggagatcgaggagcagtggggcctctacgacggcttcgacctcatggtggagcgcaagctccgggtgcgccgccgcaggggcctcagctgcctcggacgctacatgccgcggatggtcgtcatcccgccggggat

SEQ ID NO: 94687 - DNA, 452 bp, Zea mays
  Clone ID: MRT4577_186347C.1
ttttttttttttttttttttttttttttttttttttttttttataattatgggtatccaatcctacattcgattgaaaaggatacaggataacctaccatatgtccgggtccgttttcacagcttggctagcttcttcgccgcccgtcacctctacgcaggattcagtgtcgttgcaacatccgcaaattgggtaacgacacaccgagacgaacatgcaaaattctttgaaattagtagatgttccataccaggggactgggctttttaaagcaaataaactccgaccaaaacaaaacaaaaagatacagacgggttcgatggcggagcagcgagactggattcactcttacacccctctgtaatattgggggccacaagcaggtccttttggcctgatccgcttgctgtagcgccgacgctagtaattggccttggcccagggttctcgcc

SEQ ID NO: 94688 - DNA, 478 bp, Zea mays
  Clone ID: MRT4577_186348C.1
attcggctcgagctcatttgaaaggcacgtgttgaggcgcacagaatcaaagctggaatgggggagatttataacagggacgcaggtggaaaacaatgaagacaagaatgatgaacagggtacaattgaatgtccactgccatatttactggtgtatgaaggggaatccctgcatggtgaaaacactgatctcgactaatatgtactataaaaacgtgtttctaagagagaactactattgttagatccggtggcataaaccaacatgttctgatgatctgcacggaaaacattaagtttaaagatatatagtgtgatttcgtctagggagttccaatactcttaaaagacaagccaatggttttacttccctaaatgaaaaatcagggctatttggtttcaaaggcctttctggaaaatctgtacgattgttcagattcatcttatatgaattatcaccaatgtcaaaattattgaa

SEQ ID NO: 94689 - DNA, 180 bp, Zea mays
  Clone ID: MRT4577_186349C.1
ccctccttttttttttttttaatcaaactagagcagataatcaaagatccaataacaaaccggaggctgcaataccggtgtgacaagttgcccatagttatttttttaaccgaaacaaagtttcaaagtcaaaagatcaccaaataccacatgtcattgggtttaataacaacttctttt

SEQ ID NO: 94690 - DNA, 771 bp, Zea mays
  Clone ID: MRT4577_18634C.1
ctaactcacttctgttctagccgcacaaaacaccggccgccagggccattttctcctggccgccagctccagtccgactcccctctctctgtttgttctgttttttttttcctttttgattctagcatgtggccacctcctctctctgtattccttttttttttttaatttcttgcttcagccgcacaagaaacaagggccgccagggagcatctgctcctggccgaccgcgccccagtgtttcgttcgggtctcgatcagtttgcatttcttgttcacgtctgttctcgtctctatgtttggccggcactgtgcactgatcagccgaaactttatgagcacgggactccgcagaccttgccgccagcgagctcatcccttcgggcgggtgagctgctgtcggctgggatctgatggtggtccgagcacgacgggtcaaaaaaaatcggtctcatgaccgtgtttaacctttaactcggatctagtcctcatgtactcgaatcccttacggtgatgaattaatgtatgagatggatctaatgtattattcgggatcgagttatgagttgataaaaataacgttgatctgagtcgttgtgatatttctgttattttctgtgattaatttctgtatctttgactgaaaactagtgcatggattatgttgttgcaaaaaaaaaaaaaattaaaatctttccataatactaacttaaatattaaataaaaaagtaaaaaaaaaaaatatatttataggggcggccccccactttt

SEQ ID NO: 94691 - DNA, 508 bp, Zea mays
  Clone ID: MRT4577_186350C.1
aagggacctggttttatactggggccgaaaaaatggtctatataaacacgttggagcagctacaactacaacttcctcccgggggggagaaagttttttttaacaagaaaccggaaaataaattaattgacagggcctttttctggttgtaatgaaatgggaaccatccaccaaaacgttgtcaagccagatagttggagatctgggggttactcctggcgcgctccaggtcctcccgggcgatcaagctctcttttttttttttgatatcagctggcttaacagggaacttgagctggtggaaaagctcagtttttaaaagggggggggtggggaccttccgcgtttttttttttcgaactatgggcgcgtgaacctgatactgccgatcctggaacactcttttagggggggtcgggttttcttctaccggctctttcttttggatgggctttacctttatgcggggggggggggccctcaaaactttgttggaaacaaattcatc

SEQ ID NO: 94692 - DNA, 348 bp, Zea mays
  Clone ID: MRT4577_186351C.1
ctacaacacgtgccaggtagactctgtcaagtagaggatgcttttctagtccttttttttttttcctttgtatgtataactagggttctgtactcctgtactacactagtacagaatggttccctattcgaggcgagtggtggtggtggtgttttcacctctctttttgccccggggggccatcgttaatcctcctgttgctgtcctctttgtttgtttgtttgtttgtgtgtgtgttgtctggggctggctctgtcaagtgtcaggaaccggaacagtgtgtgtgtgtgtccaagccactgagacagaaatgcagatctcacagtgacagtaatgcacgcttggaca

SEQ ID NO: 94693 - DNA, 220 bp, Zea mays
  Clone ID: MRT4577_186352C.1
aaccacatctattggaggtgccataaaaaatttttttgcccaggaaaagccccacccactcttgtgttgataaaaaatttacacgcaattaccaggggataacccccggaacccggtggggcggaaacaacattccccaagtgcttactgcaggggacccgcaaatgcaagattaacaatcccaggggccattcacaaggccaagggcctttccaggatc

SEQ ID NO: 94694 - DNA, 576 bp, Zea mays
  unsure (1)..(576): unsure at all n locations
  Clone ID: MRT4577_186353C.1
cggacgcgtgggcggacgctttttttaaccaatncttnctggaacctatcttgattggatcaaggatttctgcatacaatggcaatctcaatggaggcacttttggaagccagacacatcataatcaaggcatgaccaatgccaatggtttaattaaccaagcctgtaaatcgagcatgcctaaacgtccaattatcaacgagttgacttcagatgacgaggataaaccatacgatgataaacaagatggcaagaagaatgccaactttaggaagcatccaaagaaaagcagagaaccctttgtgcagtacccagatgaagaataagaagaagatcttaaaagacctaatcataaacaattagggagggagctcagcatatctggtacatcacgtttacagcctcagacatttaagtttcagagtttaactgctacatatggaggaccaaatgaagctctgcatacatattcaacgactatgaagactgatgcaaacagaattacactggaagaaagcaatgaggcatacacaactactgttaaagccacccacaggatcttatgtggaattgtca

SEQ ID NO: 94695 - DNA, 359 bp, Zea mays
  unsure (1)..(359): unsure at all n locations
  Clone ID: MRT4577_186354C.1
gtccgcactgctccccacagatggctgggggtggatgcctcacgacggcgnccccctgcacttggncctcgctcgccccaaggcgaagccgtcgcctccaccgctgctccagccacgaacgtcgcaggtggtccagccctcccctttgccactgctcgccacgatgtcgctgctcgggggggggggccccctacccttgtccccgcccgcggccccgctgcttctccagctctactgcccctgtcggccacgaccantgcctcgctggcggtgaccgcatccgnccccgttgtctttggccccgggggcttgcctccttgcttcccgttgtttgcgcgtcttcctctttcggggggggg

SEQ ID NO: 94696 - DNA, 680 bp, Zea mays
  Clone ID: MRT4577_186355C.1
cattgggtacctcgaggccggccgggatacacttcacgccagccagccatcgtcaacactggtgaagctctgcactctgcttaaatccaaaattctcggctcgcagggagaggcagcatagcagaagcaagctccatccatcctctttcccctcttcgcttcgtttcctcgggggattcctcctccctactaccgtccccgtccccgaccctttccggcgggaaagctcgcccgagatggaaaacgcgaaatcggaggccgctgttaaggacgagggcatgctcaagttcggcgatatgcagccgaagaggttgcaccgcttcatagttttcaagatggacgacaagtacaaggagatcgttggggaccaggtaggtgatcgtgataccagctacgaggacttcacaaacagcctccccgaaaatgactgccaatacacgatctatgatttcgactttgtctctgcaaaagatgaccacgaagagtaggatcttctatatcctagggtccccatcctccgacaaggggaaaaacaaaatgctttatgcaagttcaaactaaaaattcaagaagaggactcaatggcattcaggtgtaactgtagggtactgatgcaggtgaaatcaggccttgatgagatcaaggatcggggtcgctaggcatcatcatgatcatgcatc

SEQ ID NO: 94697 - DNA, 1989 bp, Zea mays
  Clone ID: MRT4577_186356C.1
tcaccagtttggaggaggctgatgaggagcaaagaagtggtgtgccaggtgagatgcgaagtgttcttcaccagactgatccaggggaggagcacttccagaaggatcctggggcggagggtgagaggatgattgacccggatccccatagtagggaggcggggcaaactgctcgtgatcatcgaagtaggtttcttcttcttcgtcttctgctgacataaagggcacctcgtaggcctgctggtgccactcattgatctccgggggaggaggatggagaggcacgtcaggcgagcgaggggcaaagggcatacccatggtggaagcttgacgacgaagattgtcgtcagtctcccgctgatgccttgtcagctcatgtacatccacagaaatgttccggcacatggagaaaaataccgcaatcccgtgggccaagcgggcacccatccctcggccacgaccacgaccacgtggcgtgggagatccgcggccaggggagggacgcgaggcaccggcagcaacagcagcaggaccagcagacggaccagcagaggtatgtgcacgggagctggaaggggctttccttaagcgccctgctggattgttgggatcaatccagaaaggggtatatgattgatgtcttgtacttttatcatatcgaaactgcgtcacaacttcaatcatcttcatgataaaaggtgcatgaagacatcccttcagtggaaagcaggcaacatgaatgatttcctgccagatcatatcaaagacgttgatactctctgagctgctaggcttcatgaatgagagcaaaaccttgctctctccaagaatattcatctgattacccccttttggaatgagggtcatcctgctgagggagttgatgtatctgtaatacttgtgtacgttggtggactcccagtatttcccagacttagagagatgaaggtctctggcttcatctctagtaggttggcggaaatcatggatctttatcttatccccagaaatatcattgtcagtgaatccaagaatgtgagcaaaccgacggtagctcaccttgtaccagcttccctcaatgtagaagttaagataaggatagttgtatggactgtcctcatccgccagcttgacccacagagttgagtaaaactgggcaatgacttcatcattccaatcatattggaatgtcattatatccttcattttcttcctttcacaggccctcaatgcctgtgtcatctctgggtccccaattgcctcacatccttcccagttgatatagcgttgatgaagtatgggttgatgtttcttggggaggatcacagtgttgtaaaaatccacatgatgaagcgtccaaaaacggttcccatcaatcctggcatcacgaatgcgtaatgcaggattctggaaacggatgtcctgcagaagagcaaaacctccactggcagtgaaatcagtcactggctcattgccagcgcgacgggcctccgcccggtggaggaccaaacctcgaataacaggggcgtgggcagagggaaggtcaatctcatcatcctttccaccatcatcatcacttgtcggttcccatgcatgtggatttgccgcgggtcgggaccgaccgtagggattccgggccgtccgaccgcgagctccatgagacccggaggcctcaccaccttgcattacgtttccagatcctcgcccgcgcttggatctggaacgcgggagagtttcttcatgaatttcttgttcactggaagagtcggattcaacaactgatggattcctccgacgcgccatcctcgatctgaagattgaaccacagaaattccaacgaaagtgagagaggtgatggaggaagccgagaggaacaaatcttccaacaagctcccaaggatttgatggcacaaatggactttggtttgtggtgaaagtgagaggtagaaagagaaaagatgtaggcaacaacggctgaagaagtgaatc

SEQ ID NO: 94698 - DNA, 1248 bp, Zea mays
  Clone ID: MRT4577_186357C.1
atggcccagcagcgcatggtgcttgaggtgatccacctcgaccacgccaacgtgtccaagatggagttgaaggagaggcttgccaagatgtacaaggtgaaggaccgcaacaccatatttgtcttcaagttccgtgccggttccactggctctggcctcatctacgacaacctcgactccaagaagttcgagcccaaatattgcctcatctgggtatgttgtcgtctagcccttccttttgttgcgttgtttcacattgatatgcccgcgattctgaggcccgccccgattccttctccggtttcgacattcagcgtgcgcccaacagcgacgaggatcaccgttcgtaagatgggcgaggtggcaccgctgatcccagccacccggaggaggacgatgtctcgcaaggccgcggtggcagtggaggcggaccgacccgctgaagatgtatctgaggagaagacattgaagattacgatagctttgaatcaggaagctgaggcggtggcaatcgcatcaaaggaggagaaggggctgcaagacgaaccgaaaggtgagaaggaagacaagaagactcttgtagaacggtacatcgtgaaggaaacccagattactattactacaatgaattgtagcatttccagatctgaagctgacataggtgttaagagaaaaaaaccaaatgaaagcctctatgagaagaagcctgaagaaccaactctcgtcctgacatcattggactatagcatcgacgacttatttattctttacaggactattgcaaggtgtttaactcaactttttgcaaaggacatcactctggatgagaaacaggaacttgatgaagcacttcaaagagagatctcaaaagaaagatcttcaaagcttgagaaaaggagtagaggacctcctgctgttgcagggcatatgtcactcacgacctcttattgcaaaacaaaagctccaaaaaatgttgcagttgctagctcattagctgctcaactttatgggttggatattcttgcagtaagcattcagctggagaaaagtgttgttcttttcaagccaaaatttctcacggctggagaaggtaatgcttctagcagacatggcacatttgtcacggctggtgtagtgactaccactactcagaaatcactatgtgggccacctggaaccatgatcttttataggattggagagaaagaaataaataagcaacggaaaaaggctatgaatgatttttag

SEQ ID NO: 94699 - DNA, 651 bp, Zea mays
  unsure (1)..(651): unsure at all n locations
  Clone ID: MRT4577_186358C.1
ccggccggctagcccagcccaggatagtagtggtgccatggcctcctgcatagccccatccacggaggtcgcatccctgcgcttgggccacgctcggcctcatccccagtcgagtcgatgtctctgattctgcagttgacgcacaacaacccacgccggccaccaccctccaggcctcgcgatcttctcccatggtgctcggcctcgcgctccttgtgtcgacatccgcctacttccctaggccctcgttgttgtaccactccctgtccctgggtcgagttggtgcttgccaatcgaggtgggcaggatggaaccgccgccgggggaactccgattcgccgttccccaagcctctttcgtggtccgggtggcaacctgggcgttgtgaagcctctcatcggcgccgcattgactgcgcttgctgtccacccatcgcgacccggaagtctccgttcgtgtaaagcccaaaattggtaaaaaaaacaataataataataatgtaatagataaataaatttaagaatcgtcctttaatgattttttgaaaccttcttgtatttctaatgcccttgaatgtttaacttcaaaaagaanagaggaaggaaattgtattaaagttatttactattgctagaattaaataggaagatt

SEQ ID NO: 94700 - DNA, 506 bp, Zea mays
  Clone ID: MRT4577_186359C.1
gggaaaaaaaaccacttttattcaaaaattggtcggcccccccaaaaattgggttcccaccaacgaaataatccaattttattcaaaaatttttcgggcctgccagcccaaaaagggcttaaagatttttttccaaaaaacgcccgattttttccaccagggggttttcgaaccccatttttttcccaaaaaggggggggtccttttgggggagcccccgggcctgtttcttggccccggccgggactgccaattttaaaccaagggggggtttttccaagttgccctggtacaggccccaaaaggggacaaaacttccttgggcgttgaaaaaccacccggggggaattttaaacgctggccccaagaaagccaaattaagtttttggactgggaaaacgggcaacccaaaaattccccacccacttgaggaagctttcgttggaggaagcccccccggttgctataaaccctttgggaaggtttggaatgccaaaacttttggg

SEQ ID NO: 94701 - DNA, 748 bp, Zea mays
  Clone ID: MRT4577_18635C.1
ttgggtacctcgaggccggccgggagcccttctccatcgccgtcccgctccactcgtccgcaccctctgcgcggcgccggtcgagaactcgtgatgccccgcgaccgcgacgagccagccgccgtgcgcgtctacaccgtctgcgacgagtccaggtacctgatcgtgcgcaacgtgccgtcactcggatgcggtgacgacctcgccagtctcttcgggacgtacggccccgtggaggagtgcacgcccatggatgcagaggactctgagccctacactgacgtcttcttcgtcaagttctcacaggtcaacaacgccaggtgaggcgattcgtttcataccaccgcctccatccaatggcattttccactcacgtgttgtggacggtgtgctgaactgctgatatagcagtctagtctagttcagattttcttggactgtaataacatcacagggcaatgaaaccgccccgtgtcttctgtggcctaccaaccctaactgctgcagttcacaagaatggctggatgatataacctgttgtagcctgcttctccataatacttaggcttcatctttcttcaactttggacaatgtttagtttatgcttattgctatcaggcttcaatcaagagaacataatacttgggcttttattgaaccataaaaatcaattgggccataaaatccatggattcagtcggccatcatacaatttgatccactaaatgttgattcattttacatctt

SEQ ID NO: 94702 - DNA, 318 bp, Zea mays
  unsure (1)..(318): unsure at all n locations
  Clone ID: MRT4577_186360C.1
ggagccgacacacacacaaccagatcctccccaaatccactccgtcggcaccttccgcttcaaagatgcanaatcttttgtgaaaacccctgacttggcaagactatcaccctcggaggtgggagtcgtctgacaccattgacaacgtttagggccaagatcccagaacaaggagggcattccccccaaaccagcaagcggctcatcttttgcttggcaaacagccttgaggaccggccgcacgctttgctgactacaacaatcaggaaggagagcacccctccacctttgtgcttccgtctcaaggggagggcatgc

SEQ ID NO: 94703 - DNA, 183 bp, Zea mays
  unsure (1)..(183): unsure at all n locations
  Clone ID: MRT4577_186361C.1
cgtgaccagccccatgacacatagcttgaatcagcaccttaagccaacccccanntaggaagcccanaacacaacgattgatccattatctaagaaagattggaatgacctgatagcacctgctatgctccctataagaaatattggaaagacgctcgtcaccaggacccaaggaaccacaat

SEQ ID NO: 94704 - DNA, 475 bp, Zea mays
  unsure (1)..(475): unsure at all n locations
  Clone ID: MRT4577_186362C.1
ggcnnncggctcagctagtcagcatgcgccggggganacggtgcnntggtcaccggcgccagcggnncttcatcggctcgacccctcgtccgcctccnntcctcggccgcggcttacaacgntccactngccggcgtgcctcaacccccgnatgacccggggcggnagaacggnnagcannnctgctcnngccatggccccgctgtgcgccgtggcggctgnngcgagggcccgcncnntccgcactctnntccgtggggcgatcccctccttgnatcggccgccgtccgctgacccgacngtccgcgcgtgggctttgctcgcggcgtctctccacgctcgcgtncgcccctgcgaccgtnncgaccccgtgcgagcgaccccctcagtatagccaactgtatagctggccggcgatgtgcgaaggtgactgctgnannacgtgctgtcgcccgccgccaaggtagggtccggt

SEQ ID NO: 94705 - DNA, 1450 bp, Zea mays
  unsure (1)..(1450): unsure at all n locations
  Clone ID: MRT4577_186363C.1
ccccgcgtccgccacgcgtccggtggccggggaggaggcggcagcgtcagcggcggcgtcgccctccgcgtcggcctcgccgacgcgcgccgcggggcaggggcaggcggaccagtgcgagcgccggctgtgggtcaaggaccggtcgcgcgcgtggtgggaccggtgcaacagcgccgactacccggaggaggagttccggcgcgcgttccggatggggcgcgggaccttcgacatgatctgcgacgcgctgggctcctcggtggccaaggaggacaccatgctccgcgccgccatccccgtccgccagcgcgtcgccgtctgcgtctggcgcctcgccacgggggagccgctccgcctcgtttccaagcgcttcggcctcggcatctccacctgccacaagctcgtcctggaggtgtgcgccgccatcaagtccgtgctcatgccgcgcttcctgcagtggcccgacgccgacgccgcggcgcgcttcaaggagggcttcgagcgcgcctcgggcgtgccgggcgtcatcggcgccatgtacaccacccacatccccatcatcgcgcccaagatctcggtggcggcctacttcaaccgccgccacacggagcgcaaccagaagacgtcctactccatcactctccagggcgtcgtcggccccgacggcgccttcaccgacgtctgcatcggctggcccggctccatgcccgacgaccaggtcctggagaagtccatgctccaccagcgcgccgcggcggggatgatgcacgactcgtggctggtggctggcgccagctacccgctcatggactgggtgctggtgccgtacacgcaccccaacctgacgtggacgcagcacgcgttcaacgagaaggtggccgagctccggcgcgtcgcggtggaggcgttcgcgcgcctcaaggcgcgctgggcgtgcctgcagaagcgcaccgaggtcaagctgcaggacctccccgtcgtgctgggcgcctgctgcgtgctccacaacatctgcgagattcggggcgaggaggtggacccagccatccgctgcgaactggtggacgacgagaccacgccggagaaccccgtgcgctccgagacggccagtcgcgccagggacaacatcgcgcacaacctgctccaccgtggcttgggcggcaacacattcttctgatctcatccgtcaccttcttcttttttatgctttgctagtacagtagtacagaattgggctggaacaagaaagaaataggcattcttttcttttaattacactagaagatgattttggtaggattcttatagaatctatctatctatctatcaccgagcgtttttaaccttttcacgctcgattttcaaaanaaaaaatattttatatttattttaaaattttttttaaataattttataaaaaatataatttnttatatatttttanatt

SEQ ID NO: 94706 - DNA, 685 bp, Zea mays
  Clone ID: MRT4577_186364C.1
cataacttattacacaatagggaaaggtgaagcctttccagaagaaatacacctaagtattaaaatcttcaagacctccacacaaaacaactatcaagagctaaaggtagcaataacccttcctgcaacaacatagggaatagactaaagaaaaagactatcaagggtatgctagatttgggatttttttgtaaagcttatcaattatcaaagaccccctttggcagagaaacttactaccagttgatccctaagccaagttttaattcacaagttaggtatttacctgaatctagatttgcctaatctagttcaagcacttggcctatagtagctgaattttatccataatcatatttcacttgctaactacgatgatggtcaccgggatgagtctccataaccgaggagcaatgacgattcgaaccgattatacccagctggggatctctaaccacacgacatatgtagcacttaacccttgcatatgtgagccgttcccatggagtcctccactacatgaacaagttcgcgccacccgagagtacattaccctaccaggcgtgttactatgccaggagggtacatgctactcccgccatctctccaatcccagtgtgcgattgtctcttcatgtatgtggctagttgcaaagtcttaaccacaacaggctagtcaaatgtaa

SEQ ID NO: 94707 - DNA, 567 bp, Zea mays
  Clone ID: MRT4577_186365C.1
caggcttcagccttacttgtgcgcagccgcagccgcagccgctgcttttccttcctcttcatcccgtacccttgccgatccatccatcggcgatgactctgggaagctccggcgccggatcgagcgtcgtggacaaaatcatctcatacaagaggtgatgattgaagactaatgaattgcttctgcattctaaaaaggataaggtacccagccttcatcgatttcatgtgcgcaggctgcatccatgtctgcatcagcagactccgtcgcacctgaagattgcctacccagacagctaccagagatattgggagacttagctgacagaactggtgatggtgatagctctgcttccatcactgctgattctagcggtctacaacatgaattgtgtgggagctttggatggttacagttcttttttgggaggaaggacaaaggcttagaaggcggcgaacccagcgagcggtgtggcaaggctcacaagcgcgagagcaggctacactgcagtggttgcaatcctattcttttcctgaccaagtaaaacatagcatcaattcattttta

SEQ ID NO: 94708 - DNA, 354 bp, Zea mays
  Clone ID: MRT4577_186366C.1
tgaacatgaagcagcctttaatactggggggggaccggtcgccacatgaccagcaatgaccaccaggcggaagtgcgccatgagcacaactacctgccccactactagcatttctcctaagtgaagcagctgacgttctgggacacgacgctacactcgggcctacacccgctgttcccggacatcaagaccatgctcatcaagagggagctgagctttcctcacttgccgagcatagacgacctctacagcgacagcatcccgcttaccgcgcagaccacgatgggcaccatccgtagcatgttgccgtgcttggtcaatctggtggaggacaccaccaagtacgttctccgt

SEQ ID NO: 94709 - DNA, 3000 bp, Zea mays
  unsure (1)..(3000): unsure at all n locations
  Clone ID: MRT4577_186367C.1
gcgccagctgctcccgtcgctcgtatatattactgcgaagtaaccctagctgccaccagcctcagcctcccctctcggctcccccacacggcactccagcccccagcctgccactcaaacagtacaccaccgccacaagcccgggccgaataagtctacagggcagcagggctaccgctgccgccgcacttcgccggcaaagaacgccctccagatcaacccctgcgatggagtccacggtgaacccgaaggcgtacccgctggctgatgtgcagctaacgatgggtatcctcgatatcatccagcactccactaactacaagcagctcaagaagggagcgaacgaagcgatgaataccttgaatagggggatatcagagtttgttgtgatggcggcggatacagagcctcttgagatcctactccacctccccttgttaggtgaggataagacaaaatcatctcatacaagaggtgatgattgaagactactgaattgcttctgcattctaaaaaggataagatacccagccttcatcgatttcatgtgcgcaggctgcatccatgtctgcatcagcagactccgtcgcacctgaagattgcctagccagacagctaccagagatattgggagacttagctgacagaactggtgatggtgatagctctgcttccatcactgctgattctaggtacagcctccgcctctttgtaccttgttgctgtagtctatttattaagtattccctttgctaagatttaccacaaatccaaagctgatttagaagtgtctcagcctttcttacttttactagattttgtgcatgttttcttcttttgtttcgttcatgtttttctagcggtctgcaacatggattgtgtgggagctttggatggttacagttcttttttgggaggaaggacaacggtagcaggtttagtaggccttcttatctgacaatagaaatatagttaataaataaatttgagataaatgcgcttaaaaggaaggctcagaaggcggcgaacccagcgagcggtgtggcaaggctcacaagcgcgagagcaggctacactgcagtggttgcaatcctgctattgtcctcatcggtgtgttcttttcctgaccaagtaaaacataacagcaattcatttttaccatgaaggaaattctttgcaggtaacattgtattttactgtaactttttctttgatgtttcccttcttgatagtgtaaattgttctgtatccgattagaaatagagaacagtgaatgactacaaattagataggataaccagccttacaaaaatcctaaataatacccatccgttccaataacataagagccctaattattttacttttagcgtaagtcaaactgtctagaaagttatacaaatatctactgctcccgttttaaattataaatcgttctacttggtgctatgcttataatttaaaatagaaagtacacaacactagatgacagaactatgataatctatgccatggtggatttaataaaaactattttaattttataattatcgacgtaatttctatagacttaaagtcaatgccctatagacttagttaatgttaataagagaaagatagaagacttacatttataaaataaatggagtattactacaaatatattgagttattacaataaatacagatcaattatacttaagacaacatcaacctctcaatttagagcaaactatattataatatgaagaatacagatcattgttgcaatgggatgtattcttccattttgtttattacatacaattttttaaaaaatacatgctatctcctcaaaatgctgcccatcagcttcgtttggtcatcccatcaatttgctaggaacagtagcagtgtagctttactttgtcagcagctaccagtgagagaggtccttgtgggttgaccatggacgttgaatccttgatggatggtcagatcatgtatttttgttctcataaaatattcatgcatcattataattttaatacaaaagcataatcgtacaaacaatgtataagcttagagactagatcaacatatttgtaaacctcaatccaaacatctagcacatatgtaggggagctaatactaccaaatagggattatgaaacttgtcaaactttttttcaagtgtgcaaaatgctcaagcaagcaacacaaatccataccaagttcatggttcatatttgtgtcaagtactagcctggaatttaaatataattcatgaggcaggctgagtcccgtcaacggaacgctagcttcactaagcatcggcagccatgttcggctccaccaaacgagactatggaagccaaggctattagaaggcagtgaaacatattcacttagtgagcggcttatcatataaaacggagctctcgaagaacaccagcagaataatgaacatacaccacagggggagcgacttcatggttttttaatgaaatacttacccatctctaggagcgcaagccatgattccaacgacactgtgtgcacatgtgaaggccctgcaaccgcttgctaggccacaccaatcctgcttacttattgaagatacatatggtgccacctaaataaaagttgtttcttgttatgtctgtccttgacatatcaacagattagtgttgggttgcattcatggggtgtttaaatctctgagaaggcaagaagtcattgttatcgacattgtggtcgttaggcacagaagtactcaaaagtgagagctacttgttgccaccaaatggagggcgatataggttgatagttaaattcagcgctctatatagaaggagcagattttgtttagaattagtttttgcggcacgtcatttcatttcataactgattctatgtgtacaagttagaatgccaactgatcttagttctcattgaataatttgctggcatctttcaattttnataaaaaaaaaaattaaaaaaaaattaaataatttt

SEQ ID NO: 94710 - DNA, 299 bp, Zea mays
  Clone ID: MRT4577_186368C.1
attcggctcgagggacgtgacacatgttatttttctctcatttgcttgtgcacgccaccctgtggatctgaaatgcgccggcaaccataacgttgactgcctacgctgtgggcgcgccgcgtcctcaggcctgctccgctgcactgctagcagagtagagcctgtactgatgagtatgtatggcggcataagcaccaatgttggccggtgctctctcatactctctgacagcctaggctacctgctcaagcagaactaccatacagagtgcagagccggaccatatgacagaccccaga

SEQ ID NO: 94711 - DNA, 555 bp, Zea mays
  Clone ID: MRT4577_186369C.1
tgatcggcccgtcttcctcctctgcctcctacactattcctcttctgccgctctccatgccctaggcctagaggctccatccatgagatgtggtctcagtattcaggtacacgacgacggcggccggtggcgctcccattcatggccggcgaggagaagctgcagcttccgtcgcgccccgaggtttgacttgaattttggcttctgtacgtatagtgttggttcgcctctccataggtaacatggagtctgctcatttgtaacggcatagagataggaacgagcaattcagcttaactttgagaaagtggcggacaaaagagaactggactattgttgctgagcgctagctctggccgcatgatcatctatgtatatagttttcaacaataaatgtatcctgattggtatagcacaattggaaatcctactttcttctgatctcttaatttcaagatgaactggagaggggaatttgtactaagtttggaatctgtcacagtaagtgtgtatttgcggtattgatgtacagttattaagaaagatacattttcc

SEQ ID NO: 94712 - DNA, 359 bp, Zea mays
  Clone ID: MRT4577_18636C.1
gggggggcaaggttgaaaccctgaactaaccggtgggcctcccttacaccatgggggggctgtattttcttgggtaccacacacacttttacaggcttgattgggggttccattccatccaacctcccggccatgaaacaaacttaacacgccagttaggttattcacaacaggcttcaggggggttgtttcaccgggctttcttcaaataaaccaaagaacttggttgaaaaaccgccttttcaatggacacgggatcctcccaaagaaaaatttttaacaaaggaaaaccggggccccccaggggaaaggtcaaaggggccttttatacttccgggcttttgtcgtccaccttgccg

SEQ ID NO: 94713 - DNA, 640 bp, Zea mays
  Clone ID: MRT4577_186370C.1
ttgggaccctcgaggccggccgggcctgccgtcgtcgtcgctcccgctcccaggtcgtgttccgcttctttgccgccgtcgccgcgaagtgctccagagaacttccgtccacatgatcgaagacacgtgcgatgccatccggctgcaagctccggacccaccgcatgaaccagcgtcgggctgacaaggcatacaagaacagccgtttcgggcactgagtagctagaaacccttcgctgggacctcccatgccaagggcataggcctgaagaatattggcatagaggtcaggcaccccaactccgctatccgtacgtgtgctcgcgttcagctagctgagaatgccaagaagattgctgccttcgggccaaatgacgtctgtttgaactacattgaggagaatgatgaggccttgattgctggatttgatcgtaaggaacaccctgcgagagatattcctggatgtccggatgcaggctgtcacggtttccggtgagtgtctgcttggccttttcaaggagaataaagagaaaccgatgccttagattgctcttgctacgaaaatcaggaagcgtgtagctaaaacgtcgacgtcgtcatgcgactaggaataaggctagcttggtatgtttgcagtgca

SEQ ID NO: 94714 - DNA, 211 bp, Zea mays
  Clone ID: MRT4577_186371C.1
aagaaaaagtccctttatttaaatcactgaattatgttggatggaaaaatagagagaaaatgtttgtatgcctgccacattgcgggggaaatttaatgccccgtgaattatagcaggacccccccaactgggaacgcgagccagggcccataactcttcccaagtgttgtttcgcttgggcctgcccggcctgggggggggcgggcccctg

SEQ ID NO: 94715 - DNA, 1175 bp, Zea mays
  Clone ID: MRT4577_186372C.1
gcatcatctgaggcggcagtgcgtacccgagggactgggattacgccaggctcagggccgtcgccgacaaggtcggggccctgctgctctgcgacatggcgcacatcagcgggctcgtcgccgcgcaggaagctgcaaatccttttgaatattgtgatgtggttaccacaaccacgcacaagtccctcagagggccaagggctggcatgatcttctacaggaaaggccctaagccccccaagaagggccagcctgagggtgctgtttatgattacgaagacaagatcaactttgcagtgttcccatctctccaaggtggccctcacaaccaccagattgctgcacttgctgttgctctacagcaaactatgtcgcctggcttcaaggcctatgcaaagcaagtgaaggccaatgctgttgcaattggaaactatctcatgagcaagggctacaagatggtgactgatggaactgagaaccaccttgttctctgggatctccgcccccttggcttgactggaaacaaggtcgaaaagctatgtgatctttgccacatcacattgaacaagaatgctgtcttcggtgacagcagtgcattgtctccgggtggtgtccgcattggcgcgccagcaatgacctcgaggggtctactggagaaggatttcgagcagattggggagttcctccaccaggcagtgaccatctgcctgaacatccagaaggagtacggcaagctcctcaaggacttcaacaagggcctggtgaacaacaaggacatcgagaacctcaaggtccaggtggagaagtttgccgactccttcgacatgcctgggttcacgcttgagagcatgaaatacaaggagtagatatgcctctcccatgcgccgcaaggtcctcctgtaccgatgtctttccttgtggtggcgcagggtgccatggcactgcactgccaccacacttacgatgatgatgatgggttatggattttgtctacaatgtcagcaggataggctcacaattgccccctgccatccggtttggtcgccttcctgagtttatcgggttttcatttggtagttgttcgcagggaaccatatgagaattgcaatgtcaatcaggtgtttgccaataataattgggtggtttctgccaaaaaaaaaaaaaaaaaagcggcc

SEQ ID NO: 94716 - DNA, 403 bp, Zea mays
  Clone ID: MRT4577_186373C.1
atttcattgaggaagaagacagaacaatggggcatcagagaaacccaaaaggcacacacccaagatacaactctcacgggtaacaactaacaacatcagcaagcttgatgcagcaagcaaccagacgacagaaaagctagtctaatgtaatggctaatgccctgggggtgcctttgctccagcaagcagcagcacaccaaaggatggaatatagatgccccggcaagtaactcctggagtcattttggtccagctgggagcagcacaccagagtatggactatgaactctatttgcagcacttttgatatataaggatttaccccattgaagatacagttgttgcaacggttctaaattttccatgccacaagaataatgaaataataagccctttcttgacc

SEQ ID NO: 94717 - DNA, 349 bp, Zea mays
  Clone ID: MRT4577_186374C.1
gattccagaccaaaacgcatacctttcatgtgccattgaccgacaaaaggtcaccgacatctcatacgcttgccctagtatcatagccttattgttttagcagccactactctaccacctcgccaagtatacgttatatgtacccatccaatccaacatttatgtcccaggggcaagccacgtggaacaaacacgcttgggctgtgcttgcctgcatgcttataccaatgcaagcctgacgcagagcattgacttgaggccagggatgtgatgggcccagtgcaagaccccgttcttgtatccagagattgcgtcggacctggactcatgctcgatactggcaggaggt

SEQ ID NO: 94718 - DNA, 490 bp, Zea mays
  Clone ID: MRT4577_186375C.1
accactaaggaaacttgccttcctttcttgtttgcccttcctttctgcaactattatcccacaaattgttctcatatcttccagtccatctatgccttgtaacaccacgatattgagatgctctttgcccaaaagtgtcaatagatttgcgaggaactggttctctagcatgagatttcgccatgacccgtttcctactatcctcattcacttgaacagaggaaattgcacccaccccattttgcacactggggctcatagtgagggacaaagattggaaattgcacccattagcctcatttgaaggttttccatcagaagaatactgggtttgcgccaaccaggacttgtacatgccattggtggggataagagcatgtgagttatcattatatgcatggaaagaatggagcaaggaagaaggttttgtgagactttccccagtttcaatctttgaattgttggtgcaaaagcttgttgccacattaac

SEQ ID NO: 94719 - DNA, 430 bp, Zea mays
  Clone ID: MRT4577_186376C.1
cccacgcgtccgaccaagcatgagcctacgcattgatcgcatacgtcatgggatctgcacataaaactatagttcccagatcgtcaatatagcagggaaagaacacttcatcttttaccgcggtaattttgctgttatatgcataatcagtttccaagcagattaaagagaaaagattaaagtttcgtcagtttgccttaaggtggttcaaatggtctgtgatacgaaacgtatgttgctatctcgtaaggcgcatgtgggatagttacattgccgaatgctactatctacgagattttctcgtgtaaatatcagctagttttttgctgacatagtcagacacactgcacaagctggattttcatgagatggtgatgtacctgcagcatctcggaattaggacattagcacacgatgatctagagatagt

SEQ ID NO: 94720 - DNA, 287 bp, Zea mays
  Clone ID: MRT4577_186377C.1
agactgtgaagctacagatttgggatactgctggccaggagcggtttcggtcggtgacacggagttattaccgaggggcagctggagccctgctggtgtatgacatcaccagccgggagacatacaactcgctagctgcttggctgaccgatgcccggacgctggccagccccaacatcgtggtcatcctctgtggcaacaagaaggacctggatcccgagcgtgaggtcactttcctagaggcttcccgctattgctcaggagaatgagctgatgttcctggagac

SEQ ID NO: 94721 - DNA, 249 bp, Zea mays
  Clone ID: MRT4577_186378C.1
acgtcttactataacctttctccctccttcacctttctccttttcttgccactgcaaaggagctttttctacaatagcatggcgattgcataccctgtcctgtacgtcaccctcttgtcttcaaattacctcaagaaagtgtcgctcttctcccggactcgcatctactccctggcttccatctccggattctacctcctcatcccttcccacagcacccaaacataccacatcaactgcttcaacccc

SEQ ID NO: 94722 - DNA, 359 bp, Zea mays
  Clone ID: MRT4577_186379C.1
aattcggcacgaggggcggcggctggagggaggcagaacctaaagctctggtaccatgttggattggatagaatgttgctgtacaaaccctaaccctaacagctacagtgataaggacccctagtgggctgagggctaggcccatgtacacagatagctaacacatacttttttttgtgggtgtgacaacgaactatactttagctgcgctgacccatttccaaacttctaagagtactgaccaaatcttctgcaggcaagttcagggacaatattttactttcgtacaaaaaaatgaatgtgtgctactgttacagcaactgacaatgatactattttaattggcgacctgataaaca

SEQ ID NO: 94723 - DNA, 413 bp, Zea mays
  Clone ID: MRT4577_18637C.1
ggtaattgattacaagctgacttatcccagtgggacagccacggctatggggataaatagtttgcacacaggtactggagctgagcttgcagacaagcaagtcaggtgtcttgggaagtacttgagcattagttttatatggaactgctttaaatggttcttcagcggtgttggagattcttgtggtttcgataatttcccttctttgggacttgcagcatttaagaatacctggggactggtatccagctgaccttggaagcaatgacttcaaaggactctatggatacaaggtttttatatctgtatctgtgatacttggggatggtctttataacctcatcaagatcatttatgctactatcaaggaaataatgaatgcacgggctaagcaaggaagactgccactagcc

SEQ ID NO: 94724 - DNA, 336 bp, Zea mays
  unsure (1)..(336): unsure at all n locations
  Clone ID: MRT4577_186380C.1
gggggacaagaactggggggttggttttatttaatattggtacatgttttttacgggacgggggcttgtcttattataaaaacaaaataaagggggggggggcgtgatgcatagccctttattttttcaaacaaaggggggtagtttgggctggccctcccgccattttattgtgtgtgcattaatggattggnactgggggtgagggggcggcaaggaaggtttaggggttatccttgtcagcgaaaatgttggggggggggagggttttggggatgggaaggttgggccaaaacttgggccccgtgttgtggtgaaggaagggggggaaggggt

SEQ ID NO: 94725 - DNA, 164 bp, Zea mays
  Clone ID: MRT4577_186381C.1
gtttattgcctctatggtattgtttgattatattgtgttatattacatggtgtcacatagtttttcctgttaaaatatctgaaagtttcactgctagatattaaaaacttttgtattctctagtcacctaatgaaatacagatatctctgggagttgagataat

SEQ ID NO: 94726 - DNA, 652 bp, Zea mays
  Clone ID: MRT4577_186382C.1
gtttctgatttcttgatctatctcgtcctctggtggtgttgggctgacagccttccttttctggcttcgcgcctcccgcagggagactgtctcctgattgtggtccaatggttgcagagctgcagccccagtcgctgaaggtttcttcggcgccataacgaagatttatgatcgccgaaagtgttcaaaaaattcagagtgggagtgagttcaccggaggtgggcgccaatgttggggacttgttctcaaatgctatgaatttaagaacaaggcaacacaaaatgttaaatgttagtatccttcattcttcgaagcattatttccctaaggatataatgactttcgaacgaaggttacgaaggacataccttcatgagttcattacataatgacgaaggataaaatataaagaatataaaagacaacataaacaattatatattaatcatcgggcataaacaaagatattattgaattacaagtgtacctccgattgaaaggaaatgaaagtacaagcgtgacgcaaaaagcgaatgtccagtgagcgtgaacagtacggggagtactgttcacctatttataggcacgggacgcagcccgtacaaaattacattaatgccctttacacttgataataacatatagtactct

SEQ ID NO: 94727 - DNA, 1242 bp, Zea mays
  Clone ID: MRT4577_186383C.1
gcgcgccgccatggagttcatcgactccttctgtaccagggccggcgcgtccaggaacgggagcggcctccagtacttcggcaggtctaggaagaagcatgtccaggtcaagatgctgtacaggcccaatggaaccctagggccagcggaggctcccaagcctaggagacgcaagcagtcggatgaagaggtcccgcacaatttgcaccgcctcatgaatagctcgccgaggatctctcacgctggactgcccaagaggcctcgcacgaccgctgctggggatgccaaaaatggagctgtagcacccggtggaggtaacggcgctggtgtttgtaacggttcttcagttcaggtgccgacggaggctggcggttggttgggtaatggatgctctgaggcgaaatctcatgagagaaccgttccattgctcaaccacgaggtctctggtgaagactcatccaggcacgccgcgaagagtagcggcggcattgctgacaacggagtcggggttgggaactcgagtgctggtcagaaagtgaaggtcaagaggaaggagctgctcctgaatcaaaataccggtaaagaaagagaagaaccagaagaggccacacaaacagagccctttgtacgttctatcacgctcgatgaatcgaaaccaaactcaaaaggaaaaggaaggtcaaacccaaatgggaatggaacagaaaggcttgcaggccctgcagatacgaagggccgtggcgaaggcgtgacgccaccgaagataacttccgtatggaagatcaagaagctgaagacatctcactgctcttccgacagcaaggtgctgcacaaggtctgcgtgccgcctcctacggcggctgagacctctgcttcggtgaaagctgattagcgaggcaccatagcgtatagttcggcggatgcatgtcttagctacgcttgttgtgaggtttttgtatgttcaagttgctactcggacgaggagggaaagcggaggtaaatctctcttggtagatctcacgtttgctttgatttttcatacgaatgtgcttgttttatggtatatagattattgggtatttctactgtactgtttctgcccctgcttccatttgatgtcactagtggtagggagtgtggcataatcatgtagatgtacctgctatgcatacatcgttttaataaatggcaccattgctctcaaaaaaaaaaaaaaaaaaaaaccgcggccgccgactagtg

SEQ ID NO: 94728 - DNA, 402 bp, Zea mays
  Clone ID: MRT4577_186384C.1
ctcatttttatacagccgacgcagtaggctcgctgtcttcttctccatcgcgcaagggggatgccacgggagcggcagcacgccaacgcaaggagcttccctagcttgtcgacagcgcagggagcaggtagcatgcatggcgctcggcacccttgtagcacggacaacgcacttccttactccatgtttatgtccatggcgagcaggagtcattccgtcccatggccgacggcttgcatatccatcagccatcatggccgaactccattggagcaggcgcttactaccgtggcgcactgcttcatggcgcttgctacctgctggagagcaggaggtgacccattcaccaccgtacatgattggagcgcacaggggcagaagcttcaggtgccatggacgccc

SEQ ID NO: 94729 - DNA, 439 bp, Zea mays
  unsure (1)..(439): unsure at all n locations
  Clone ID: MRT4577_186385C.1
aaatctttaagatgcctaaatagttcaaaagaagatatatagctttgtagcattatagctacggtaatgtacttgaactgtataacgtggagatattgtatgtgaccatgtcatgtttggtaccaaatatagccacaatgaaatgtctttttaaaatggttgttttattttgatgcttatattattgaatcaagaagggtagacctcgtgcagtggtgagagctgtctcactgagtcaccatgtcgcgggctcgaagcagcctctccacatctgcaagggaaggcttgcctcggtttatcctttttccagaacctactcatgtggggagcctctgggtctgtcctttcttttatattattgaatcagaatcttgntatgtttgacaaatattcttcttgttcagatgatgtgggctgctgattttgatgaagaagcagt

SEQ ID NO: 94730 - DNA, 301 bp, Zea mays
  Clone ID: MRT4577_186386C.1
ccccaaagggttttgttgataaaaaccggaaatttttcaacagtttcagtcccaccccaaaagggggaaaaaaaaattgtttcccgggccagacccaacttttgtttaaaaaaaaaaaccaggccttttattttggttgtttcccccccaattttttccaatctttttgcccgtctttgggccccccatggtttgggggggaaattggcatttgccaaaacctttttcaacaacttacctttaaaacattttcttgggggaaaaggagcccgcctttgtttaaacaccctttcaggggggg

SEQ ID NO: 94731 - DNA, 531 bp, Zea mays
  unsure (1)..(531): unsure at all n locations
  Clone ID: MRT4577_186387C.1
ttttttttttttttttnnnnnnnnnnnnnnnnnnnnnnnnnnnnnnnnnnnnnnnnnnnnnnnnnnnnnnnnnnnnnnnnnnnnnnnnnnnnnnnnnnnnnnnnnnnnnnnnnnnnnnnnnnnnnnnnnnnnnnnnnnnnnnnnnnnnnnnnnnnnnnnnnnnnngtttccttccaagattatataatctagcttatagattatataagcacctaatgacttgcttatggactaccataatctaggtatctacattatataatccacctaataatttgcgttgattgttggtctgttaacatatgtaagctggattatataatctacaaagtaaacaaacagggcctaaatatctcaataacacatgtttatgcacttttgtctcatgtgtgatattgcttctgaatcaggctcaatatatgcatcaatcgtcctcagcctgtgctgtcatctgtggcactatatgagccaggccaagtctcacaggcaaccaatcgtgcccatcatagctcacgaaatgctagttgaatt

SEQ ID NO: 94732 - DNA, 228 bp, Zea mays
  Clone ID: MRT4577_186388C.1
gtctctccatcggtgctcaatgtagcactttatacgcccgccgtgctccaccatgatgatacgatcgaggccggctggatcttggttgcgctcgtggtcgttgatctctcccccgcgcctcttacagcagaccagtattcgtgccggttgccaactacctctctctccgcaagaacggggactacttcgaggccagagtcacaatccccgtaggggacggcaggccct

SEQ ID NO: 94733 - DNA, 218 bp, Zea mays
  Clone ID: MRT4577_186389C.1
gcgcccacgcgttcggtaagatgtgatcccaatcagaaccccactttggtgtgaacataatggtgcgcaggatacatcacaacgatgcatgttacccattggttatacttttctctctctaacgattggaaaattatcaagtcagttaacatggtgattcaattttgagaatggctggttatagcttttcatgtactccttcaattcctaaggaaaag

SEQ ID NO: 94734 - DNA, 327 bp, Zea mays
  Clone ID: MRT4577_18638C.1
agcagtggtaacaacgcagagtactttttttttttttttttcttttttttttttgcaaaaatcgtactatcttttttcttcacagcagttcatctcgtaagagagaggagagcagggtagacgaagatgataatgatggtgctctaaaggagacgggccggagaaaagatggcaacaaaaataaaaggccaaagggcaaggagaggcaaagcaggaggaattaacaaaagagagcgccacgaaactaccacgctgctaaaactaaagaaatggagagagaaacaaaaggcgggaggacccgcgtactctgcgttgttaccactgctt

SEQ ID NO: 94735 - DNA, 163 bp, Zea mays
  Clone ID: MRT4577_186390C.1
acttggattatggggagcggtgaccaaacccacagggattggcactcatattacttgacattgatcaaaaactaaggcaacaatattcctcattcaaactaaaagcacaaaggtgatcttatggacataaagtgtcgccatgagtatacaaatgcaaaggttt

SEQ ID NO: 94736 - DNA, 497 bp, Zea mays
  Clone ID: MRT4577_186391C.1
atccatagattcctcgccttctcattcgtgcagacgagaaagcacaccctccctccttcatgtcctaatccacatctactcacgaaggacactcggccgacagcgcgccaggacgtcaagacccgcgtccgcagatcgacgaccagaggtgtatgacaagaagccccaactactcgagcctctcaaaagccccacaggcccccggacacatgccgtgtcgcctgctccaaatctccgcagggagcaccaatcagcagcaccagtgtggctctgtccggccaggtgacgctcttcgccgccgggtcacatcagatcgctcgggacctacctacgacaatagcaagtacacagccactccgtcctggatctacaacaacgcgtgaggcctacctgcgcaggtctgtcccagtgatccaacactgtgtgctgatcaggcctagggcggctgctttctgcccaagaagatgcagctcaccagttgcatttgcgggaaaagt

SEQ ID NO: 94737 - DNA, 196 bp, Zea mays
  Clone ID: MRT4577_186392C.1
aataaaaattcaaaaccaattttttttcttgatgttcatgatcctcaatttacaaattcaagcgtccgggcacacaaattgactacaaagaatgcgaaaggggagaagttaagcaacgggcgaagtcctttggaagaaaaaattggagatttaaatgctttcgctaaacaacaacatccctaaccgcaaaagctac

SEQ ID NO: 94738 - DNA, 316 bp, Zea mays
  Clone ID: MRT4577_186393C.1
ttatgcccttctcacctcctccgctgtctcctttggccttcggctccctgcaccccgcttctccctcccacccaaaccctaaccatagccccgacgcagatctccgatctgatcgccccatgcccgacgccgacgccgtaagcggaggcgcctcgcccacttccccggagaagcgggaggaggaggaagaggaggcgccggggaaggaggaagcccgggaggacagggcacgggcacggctacagcagcagacacagcagcgggcacccgagcggagggacgccggagcagggcggcgcaggggccgtcgatcccc

SEQ ID NO: 94739 - DNA, 178 bp, Zea mays
  Clone ID: MRT4577_186394C.1
agggaccataattggccctcactgcaccagaacaaactgaaactaacctaacgcaccagcacgctgaacaagttagattatgaacaaaacagcatgctttggcaccgcgctacttcactcgagatccaagccatctcgaattctggtctggtatgctttggcaccgcgcaactccagg

SEQ ID NO: 94740 - DNA, 901 bp, Zea mays
  Clone ID: MRT4577_186395C.1
tcagctcttaacatcaagcagacccggccaggccagcaccagccgcagcaatgacgtccatgacggcagctacagacgtgaagccggcgccggccgctggcggcccgcagctgaagctgctggtggacaggcgttcgcggcgcgtgctgtacgcggaggcccgcaaggatgcggtggacttcctgatcggcctgctgcgcgtgcccgcgggcctcgcggcgcgcgcactggccaagcgcggcgagcccgcgccgggctccctgggctcgctctacgcgggcgcgctggccctagacgacgccttcttcgtctccagctcgcccaaccgcgacgcgctgctcagcccctcgacgctgccctccgccgcgctcccgctgctgctcggcgagggcgcggtcccgccggcgccggcgcctcccccgccgcagcggttcttccggtgcaacgcgtacgcgcccccgtgccgcgggaacccgacgaacgtgacggacgtggcgggcctgccgtgcccggcgtgccggcagccgatgaccatggagatgcggctgccgcccggggacgcgcacggcaagcagctggcgcttgcgcgggcgcaggaggccgcggtgctgggcgccggcgggtacgtgaaggaggtggtgacgtacctggtgatggacgacctcaccgtggcgcccatgtccaccatctccgccatcatgctgctcaagaagttcgacgtcaaggactgctccgcgttggaggagacgaccgttgagctcggcacaaaagaggccgttgatgctcctcaaggccgtcgctgcagtcgtcgacggcgctgacggatgtcttcagcggtgccgtttcgattgacaggattagcggttaatgagggagtcgtcgaacatgaacatcgttatga

SEQ ID NO: 94741 - DNA, 732 bp, Zea mays
  unsure (1)..(732): unsure at all n locations
  Clone ID: MRT4577_186396C.1
tgtagctggccgatgacctagtcttgaagtccagctcagcagggacaatgttaaggctatcacacaggacctaatcatcgcaggacctaatcaagaaccctaagatcttagccaaggctacggaggagctgaaccacgtcatagggccgaaccgactggtgactgaaagcgacctccctcgcctcccctacattgaggctctcttcaaggagaccatgcgcgtgcaccctgccgcgccgatgctggcaccccacgtggcccgcgaggacatatccgtggacggctacgacgtgctcgctggcacggtcgtgttcatcaacgtgtggggaatcggccgcgaccctgctctgtgggacgcgccggaggagttccggccggagcgcttcctcgacagcaagatcgacgtgaggggccaggacttccagctgctgccgttcggctctggccggcgcatgtgccccgggttcaacctcgcgctgaaggtggtggctttgagccttgccaatctgcttcacggcttcgagtggaggcttccggacggcgtgacggcagaggagctgagcatggaggaggccttcaagctcgcggtaccgcgtaaattcccgctcatggccgtggccgagcccaggttgccagctcgcctgtatactggcgctgnatgcccgacgtattccttcggtggttgcacgagtggagatagcacatgatttttagctcttgggaactttgttt

SEQ ID NO: 94742 - DNA, 240 bp, Zea mays
  Clone ID: MRT4577_186397C.1
ctcgaagcttgcgttcttgtactagaggtcggcagcaagcggtggtagagcgagaggtcgagaagatgaagagcagcactctgttggcgattctagttctccaggccctttctgtccctgccggccttgccaaaaggacctccagggccaacaacaacaaaccattcctgttccggcaattgcacagctggtccggccgtgttgaactgcgacgaactcctcaacaagtgcgccgccaac

SEQ ID NO: 94743 - DNA, 2008 bp, Zea mays
  Clone ID: MRT4577_186398C.1
ctcgaggccggccggggtattctccttgctgccaaatgaccctgtacagactacagtgtacaagcctgccactttttaaaactcacaacccccgacctgctcagatcaggtaaaccagtcactctactactcgatggaacaagctacatgggccgcgttcctcggcattgtcctttgcgcagcgctcttccacaggaccttccttgcgcgcggccggcgccgggccaacaaccccccgcccggccccaagccatggccgatcatcggcaacctaaacctcgtgggcgagctcccccaccgctccatgaacgagctctccaagcggtacggtccgctcatgcagctccggttcgggtcgttgcctgttgtcgtcggcgcgtcggttgagatggcaaagctcttcctcaagaccaatgacgcggcgttctccgaccggccgaggttcgcagtcggcaagtacatcgcgtatgacttctccgaccttctatgggctccttccggaccgtgcctgcgccaggcacgcaggatctgcgccaccgagctcttcagcgccacgcggctcgagtcattcgagcacatccgcgacgaggaggtgcgcgtgatgctgcgacagctgcgccaagcggctgggcgcactgtgcggctcagggactacctgcagatgttgacgctcggcgtgatctcgcgcatagttctgggcaagaagtacgtccaggaggaggcggcggacggtgagggggactcagcgtcggcgatgacgcctgccgagttcggggagatggtggacgagttcttggtgcttcacggtgtgtttaacattggtgattacatcccgtggctagattggctggacctgcagggctacgttgctaggatgaagagaatgaaggcgaggtttggtcgattcctggaacgactcctggacgtgcacaacgagcggcggctacgcgagggagggaacttcgtggcaaaggatatgttggacgtgctgctgcagctggccgatgatactagtcttgaagtccagctcaacagggacaatgttaaggctatcacacaggacctaatcattggaggcacggatactagtgcaaaggccctggagtgggctgtctcggagctgctcaagaaccccaaggtcttagccaaggccacagaagagctggaccacgtcatagggccggaccgactggtgacagaaagcgacctccctcgcctcccctacatcgaggctgtgctcaaggagaccctgcgcctgcaccctgccgcgccgatgctggcaccccacgtggcccgcgaggacacatccgtggacggctacgacgtgctcgctggcacggtcgtgttcatcaacgtgtgggcaatcggccgcgaccctgcgctgtgggacgcgccggaggagttccggccggagcggttcttcgagagcaagatcggcgtgaggggccaggacttccagctgctgccgttcggctctggccggcgaatgtgccccgggatcaacctcgcgctaaaggtgatggctttgagccttgccaatctgcttcacggcttcaagtggaggcttccggacggcgtgacggcagaggagctgagcatggaggaggccttccagctcacggtaccgcgtaagttcccgctcgaggccgtggtcgagcccaggttgccagaccgcctgtatacgggcgcttgatcgatgcccgtacctgtgttggacacttggactgttggcatgtgtggagcacagcacgtgattgttcagctcttggaaaattaatgttgtgtctcgtatacaaattaattatggtagtgcatatataatgcacggtttgtgagagtttgatgtttcagatctatacgttgaattaggcctttatgccttgttcggttattcctaatacacatggattgaatgagattaggtgtctctgatactgtttaggccctgtttgggaacaaagtttttgaaaaccacagtttttgaaatactatagtatactttagtcca

SEQ ID NO: 94744 - DNA, 1930 bp, Zea mays
  Clone ID: MRT4577_186399C.1
ccggccgggccgggctgtattctccttgctgccaatgaccctgtacagactacagtgtacaagcctgccactttttaaaactctaaacccccgacctactcaggtcaggtagaaccagtcactctactactcgatggaaccagcaacatgggctgtgttcctcggcattgccctctgcgcagcggcagcgctcttcctttcgcgcggccggcgcccggtctacaaccccccgccgggccccaagccatggccgatcatcggcaaccttaacctcatgggcgagctgccccaccgctccatgaacgagctctccaagcggtacggtccgctcatgcagctccggttcgggtcgttgcctgttctcgtcggcgcgtcggttgagatggcaaagctcttcctcaagaccaacgacgcggcgttctccgaccggccgaggttcgcaatcggcaagtacaccgcgtacgacttctccgaccttctatgggctccttccgggccgtacctgcgccaggcacgcaggatctgcgccaccgagctcttcagcgccacgcggctcgagtccttcgagcacatccgcgacgaggaggtgcgcgtgatgctgcgacagctgcgccaagcggctgggcgcaccgtgcggctcagggactacctgcagatgttggcgctcggcgtgatctcgcgcatagttctgggcaagaagtacgtcatggaggaggcggcggacggtgagggggactcagcgccggcgataacgcctgccgagttcagggagatggtggacgagttcttcgcgcttcacggtgcgtttaacattggtgattacatcccttggctagattggctggacctgcagggctacgttgctaggatgaagagaatgaaggcgaggtttggtcgattcctggaacgagtcttggacgtgcacaacgagcggcgactacgcgagggagggaactttgtggcaaaggatatgttggacgtgctgctgcagctggccgatgacactagtcttgaagtccagctcagcagggacaatgttaaggctatcacacaggacctaatcatcgcaggcacggatagtaatgcaaacacgctggagtgggctgtctcggagctcctcaagaaccctaagatcttagccaaggccatggaggagctgaaccatgtcatagggccggaccgactggtgacggaaagcgacctccctcgcctcccctacatcgaggctgtgctcaaggagaccatgcgcgtgcaccctgccgcgccgatgctggcaccccacgtggcccgcgaggacacatccgtggacggatacgacgtgctcgctggcacggtcttgttcatcaacgtgtgggcaatcggccgcgaccctggactgtgggacgcgccggaggagttccggccggagcggttcgtcgagagcaagatcgacgtgaggggccatgacttccagctgctgccgttcggctctggccggcgaatgtgccccgggatcaacctcgcgctaaaggtgatggctttgagtcttgccaatctgctacacggcttcgagtggaggcttccggacggcgtgacggcagaggagctgagcatggatgaggccttcaagctcgcggtaccgcgtaaattcccgctcatggtcgtggccgagcccaggttgccagctcgcctgtatactggcgcttgatgcccgtacgtgtcttcggttgttggcatgcgtggagtatagcacatgattttcagctcttggaactttgttttaataaaacacaaatatatgtgttatgttggttagatgaatgtgaatataaagttgacaacctaggtaattcgaacccctattggtatataattttactttatttttgcataactgtgtaaactggtggtcatggacgttgaagttaatatttagactgtggattagatt

SEQ ID NO: 94745 - DNA, 2462 bp, Zea mays
  Clone ID: MRT4577_18639C.1
ggttttggaggctagacggcggcctgccagtggaccccgtcgaactcctcatcgcctcatcgtcatctacctcgctcgcaccacacgcgaaaccgaacaaactactcgtacaaactacaaagagaagagacaagtgtatttattttattaatcattagtactattgattagtattattgaaacagaggcattgccgatactcacgccggcgaccgatgggatcggagggtgagatcaccggcccgctcctcgcgtcgggcgccggcgcgccggcgccggaggcggtgcccccgtggcgggagcaggtgacggctcgggggctggcggtcagcgccgtcctgggggtgctcttctgcctcattacgcacaagctcaacctcaccgtcgggatcatcccctcgctcaacgtcgccgcggggctgctcggctacttcctggtccgcacctggacggcggcgctcgagaggttcggcgtcgtctccaagcccttcaccaagcaggagaacaccgtcattcagacatgcgtcgtcgcctgctacggcctcgccttcagcggggggtttggaagctatatgcttgcaatggaccagagaacctatgaacttatcgggccagattatcctggcaacagggccgtggatgtcaagactccttcactgggctggatgattggattcatgtttgttgttagcttccttgggctgtttagtcttgttgcactacgcaaggttatggtaattgattacaagctgacttatcccagtgggacagccacggctatgttgataaatagtttccacacaactactggagctgagcttgcagacaagcaagtcaggtgtcttgggaagtacttgagcattagttttatatggaactgctttaaatggttcttcagcggtgttggagattcttgtggtttcgataatttcccttctttgggacttgcagcatttaagaatacgttttattttgatttcagcccaacctatattggatgtggtcttatttgtccgcatattgttaattgttctacacttcttggtgccataatatcgtggggtattctttggccatatatctccacaaaagctggggactggtatccagctgaccttggaagcaatgacttcaaaggactctatggatacaaggtttttatatctgtatctgtgatacttggggatggtctttataacctcatcaagatcatttatgctactatcaaggaaataatgaatgcacgggctaagcaaggaagactgccactagcccaagttcaggatggcgatgaaggttcaaatttatcagctgaggaaaagcatctgaatgagacattcataaaggacagtatccctccctggttggcaggatctggttacattggccttgcagcaatatcgattgcaaccgtcccaatgatctttccgcagatcaagtggtaccttgtcctctcggcatacgttgttgctcccctcctcgctttctgcaactcatatggcactggactaacggactggaatcttgcgtctacatatggaaagatcggcctcttcatttttgcatcatgggttggtcagaatggcggtgtgattgctggcttagcagcctgcggtgttatgatgtccatcgtgtccactgcagccgatctcatgcaggacttcaagaccggttacctcacactctcttcccctaggtccatgttcgtgtcgcagttgatcgggaccgcccttggttgtgtcattgctccactcaccttttggctctactggtcggctttcgatattggtaaccctgacggcgcattcaaagctccatatgctgtaatcttccgtgagatgtcaattcttggcgtggaagggttttctgcactgcctcagcactgcctagcgatctgctcgtttttcttcattgcatctctagtgatcaacctcctcagggacgtcaccccaaagaatgtctccagattcatcccaatcccgatggctatggccattcccttctacatcggtgcgtacttcgccatcgacatgtttgttgggacagttatccttttcgtctgggagagggtgaaccgcaaggagtgtgatgacttcgcaggtgcggttgcctctggcttgatctgtggtgatgggatctggactgttccttctgcgatactgtcaatccttaggattgacccgccaatttgcatgtacttcaagccatcccttagcagctaaagttgggacaagtgttatccattttctgtatatcaaaataggacctaattgtgtatatctttaatttactacatgtaaactgttctaggaagaaaagctgtagcctaatgcaatctgttgattcttatttgcgtatgataatccagcattcgtttatccctggttctgtgtcgaaaaaaaaaaaaaaaaaaaaaaaaaaggccacaaaaaaaaaaaaaaaaaaaaaaccccccccccccc

SEQ ID NO: 94746 - DNA, 282 bp, Zea mays
  Clone ID: MRT4577_186400C.1
gtggggcccccaattggccccctccctttaaggggccttattaaacaaaacaggggttttggcctccatttgttacatccaaaaaaaggtgggttcaaacatcctgaaagggggggtttttaacaaaaatttttacattggagggggcatacaaaaacatgtttttctttgcaactaaaccataattttggatcccacccgatcataatacttggcttttcttttggggggggaaactgacttggttggctatttctcgctaaattacttgccggaagcata

SEQ ID NO: 94747 - DNA, 412 bp, Zea mays
  Clone ID: MRT4577_186401C.1
cggtcgcgtgggtttttttttttttttttgttttggtttttttttatttttcgtcgtggcagtgccttccgtctcctgtttggcggtcagctatcccttttactctcctgctgactcttgcaactctgggggcgggggatgggggttcctttcttttcctcatctcctttgtggggggggggggttgtctaatccttctgctcggtcctcgacgctgggttgcatgcttccttgctgacttgtttgtctctctgctttttcgtccttgcctcgtccgtggtgtttctctggcattgttgttttgctacgttgatgctctcttccgcttgtgctgcattgctgctgtgcgcctctgtgtgaacgtttaattgtcaagttcttcttcctcccccttttcttatgtttctgctgc

SEQ ID NO: 94748 - DNA, 252 bp, Zea mays
  Clone ID: MRT4577_186402C.1
ataactgtgaatgcacgtcgcacgcgtacctaagatcgtatacagtagagccaagcgtcccatccgctagaaaatgctccatatacggcggtggttaagcgctctgtctccggatctcgcttgtccaccgatctgcgagaggtatgttttcgtacaccaccgtcactgacgcccgccatggccagaacctccacgtataagattcttgcaaatctcctggtatggagtaccacatgtgtaggactctaaacg

SEQ ID NO: 94749 - DNA, 1549 bp, Zea mays
  unsure (1)..(1549): unsure at all n locations
  Clone ID: MRT4577_186403C.1
ggtggnggaggaggacacattctacgatttccatctgagcacgagagccgtcaagtcaacgatagtgcatttccaggtcaacaacaagcagtggcaggacgtttgggtgtgcgctatctgcagttagtcttgagtgatactagctgcaatttaatcagatcgatcaggtggatgggcatcctcagcagccgggaggagtgactccagcagggggttggaaagcttgcaatatgctgaggaacctcctgtggcctacatcgaagcacgacgtgtacctggtgcagagctactccgtgacgcactggtctgccctgctccggagaggaagagaggttctcaacgtggccggccggttggctccgacccataacgtgaagggggctggaccgttgtcgagggttcagatcagcgccatggctgtgaaggacaacctcatggtggccggtggcttccagggagaactcatatgcaagtacgttgatagacccggggtggcattctgcaccagcctgaccggtggcagcagttccatcacgaacgccgtcgacatccaccaggcacccagcggcgccacgcgagtgatggcggcgaacaacgactgcgtcgtcaggacgttcgacgccgagagatacagccttctcacgcagctcaccttcccgtggtccgtcaacagcacgtcggtgagccccgacggcaagctgctggcggtcctgggcgacagcacggagtgcgtggtcgccgacccgcagtcgggcaaggcggtggcgacgctgcgcgggcacctggactactccttcgcgtcggcgtggcaccccgacagccgcgtcctggcgacggggaaccaggacgcgacgtgccggctgtgggacgcgcgcagcctgtcggagccgttcgccgtgctcggggcccggatcggcgccgtccggggcctccgcttctcccccgacggcaggttcctggccgcggccgaggccgccgacttcgtgcacgtgtacgacgccgcggccgggtacgccggcgccgcgcaggaggtggacgtgttcggggaggtcgccggcgccgcgttcagccccgacggcgaggcgctgttcgtgagcgtcgccgaccgtacctacggcggcctgctcgagttccggcgccggcgggcggaccgctacctcgacgcgtgtttcttctgagggagaggcgcgcgcgcgcgccgtcagttgtgtactgtgcatgtgcctgccggcgggcggcacgtatacatgtggtgtgttgtgtagtgtaaaacgcagagttttggtgcgtatcggacagcgtaccggctggagacaacctggccagggtgctttcaggagctagtgtcgctttcttgtttgttttggacttcgggggaaaaacacttcagaatggtgcactcgggttgcctttaggtactacaagcttgctatagagatgctgtgtatcaattcgttaatgtaagaactgtaaaatacttctaatacttcttctgtcacctaaaaataaaaaaaagggcgagtgctgtccgctatacaggatcccggct

SEQ ID NO: 94750 - DNA, 227 bp, Zea mays
  Clone ID: MRT4577_186404C.1
ccaaaaaggcaacatagtgtttgcaacaaacaaataagcatgacgctgatgtttgaaaacatggacattgcacttattcaactacaaacatgcccattggttattacaatggttgcaataaaaggtaccttgaaataaacagggtgcccatcccacacttgtgactaaaatagggggggcaaaaaaatgaattgggggggggaaaattttacatggggtcaaaatac

SEQ ID NO: 94751 - DNA, 349 bp, Zea mays
  Clone ID: MRT4577_186405C.1
ggggcacaaaggaaagccttgattcattactgggtggaacatatattacaaaccacccagtccccgggggagcttttctaattaacgaaatctttttttacaaaggggcgaacttgtgattcttttttttccacttattaaaaaaagagaccacccacgaaggggtgatccctccccaagcttataaagaacgtagttaattaatccaaaaacacctttccgtctatggacgggggggaacaatggcgggcttaaaaagaccctctcaacctgttcaaaaagggagtggggagcgggtcccttaagggggggggccaatttgtgagcggcccctttccggggggggggg

SEQ ID NO: 94752 - DNA, 2524 bp, Zea mays
  Clone ID: MRT4577_186406C.1
aaaaacacctcgaggccggccggggactcgtcagccagcagttcgaaaccaggatcgatccaggagcttccagttccagaaggcaaggaggaagagggagaagggcgcgcgcgcgcgcagcgttcaagtggtgctggtgtcggccatggatcgggttcgcggatccgcgttcctgctcggcgtcctgctcgcaggatccctgttcgcgttttcagttgctaaggaggagaccaagaagctcggcaccgtgatcggtatcgatctcggaaccacctactcctgtgtgggtgtgtataagaatggtcatgtcgagatcatcgccaatgaccagggtaaccgtatcacaccctcatgggttgccttcaccgatagcgagaggctcatcggtgaggctgccaagaaccaggcagctgtcaaccctgagaggaccatctttgacgtcaagcgtctcatcggaagaaagtttcaggataaggaagtccagagggacatgaaacttgtcccctacaagattattaacaaggatggcaagccatacattcaggtcaagatcaaggatggggaggacaaggtcttcagccccgaggagatcagtgccatgattcttggcaagatgaaggatactgctgaggcgtaccttggcaagaagatcaacgatgctgtcgtcactgtccctgcatacttcaatgatgcgcagaggcaggcaaccaaggatgctggtgtcattgccggcctcaatgttgctaggatcatcaatgagccaactgctgctgctattgcctatggtttggacaagaagggtggcgagaagaacatccttgtctttgaccttggtggtggtacttttgatgtcagtatcttgaccattgataacggtgtgtttgaggtgctggccaccaatggtgacacccatcttggaggtgaggattttgaccagaggatcatggaatacttcatcaagttgatcaagaagaagtacagcaaggacatcagcaaggacaaccgtgctcttggaaagctgaggagggaagctgagcgtgccaagagagccctgagcaaccagcaccaggtccgagttgagatcgagtccctctttgacgggaccgacttctcggagccgctgacccgtgccaggtttgaggagctgaacaacgatctgttccgcaagactatgggccctgtcaagaaggccatggaggacgctggccttgagaagagccagatccacgagatcgtcctggttggtggaagcaccaggattcccaaggtccagcagctcctgaaggactacttcaatggcaaggagcccaacaagggtgtgaaccctgatgaggctgttgcctttggtgccgcggtgcagggaagcatcttgagcggcgagggtggtgacgagacaaaagatatcctcctccttgacgtggcccctctcaccctgggtattgagaccgtcggtggagtcatgaccaagttgatcccgaggaacactgtcatcccgaccaagaagtcgcaggtgttcaccacctaccaggaccagcagaccactgtctccatccaggtctttgagggtgagcgcagcatgaccaaggactgccgtcttctgggcaagttcgacctcaatggcattccgtcagctccgaggggcacaccccagatcgaggtgaccttcgaggtggacgccaacggtatcctgaacgtgaaggcggaggacaagggcacgggcaagtcggagaagatcacgatcacgaacgagaaggggcggctgagccaggaggagatcgaccgcatggtgcgggaggcggaggagttcgcggaggaggacaagaaggtgaaggagcggatcgacgcccgcaaccagctggagacgtacgtgtacaacatgaagaacacggtgggcgacaaggacaagctcgcggacaagctggaggcggaggagaaggagaaggtggaggaggccctcaaggaggcgctcgagtggctggacgacaaccagtccgccgagaaggaggactacgaggagaagctcaaggaggtggaggccgtgtgcaaccccatcgtgtcggccgtgtaccagcggtcgggcggcgcccccggtggcgatgccgacggcggcgtcgacgacgaccacgacgagctgtagatggtggtggggagcggtgacgtggagtgccgggaaccaagccaaattttgtaatgatgtttaggagggagggtggtggacaaaaaaactaatcttggtgctgctctgccaatagacgggctgagcatagaactttttttcccttctacttccttgtgattgttctttttatagaggattcgcattgcagtgtaatgtaaaaaaaagaagacgcacttatgaaacttgttaaagaaaaaaaaaaaaaaaaaaaaaaaaaaaaaaaaaaaaaaaaggtaatgttcttgtagtttgatggtgttcggttttgtatgttatcacgtggtgctgggttcgattccttggcccaccattgtgttttttaaaaaaaaaaaaaaaaaagcggcc

SEQ ID NO: 94753 - DNA, 2446 bp, Zea mays
  Clone ID: MRT4577_186407C.1
cattgggaacctcgggcccggccgggatcagacagacgcagactctctcacccgactcgtcagacgtcagccagcagttcgaaaccaaggatcgatccaggagcttccggaaggcgaggcgcgcgcgcagcgtcgaggtgctggtgccggtgccgcccatggatcgggctcgcggatccgcgttcctgctcggcgtcctgctcgcaggatccttgttcgcgttttcagttgccaaagaggagaccaagaagctcgggaccgtgatcggtatcgatctcggtaccacctactcctgtgtcggtgtgtacaagaacggtcatgtcgagatcatcgccaatgaccagggtaaccgtatcacaccctcatgggttgccttcaccgatagcgagaggctcatcggtgaggctgccaagaaccaggcagccgtcaaccctgagaggaccatctttgacgtcaagcgtctcatcggaagaaagttcgcggacaaggaagtccagagggacatgaaacttgttccctacaagattattaacaaggatggcaagccctacattcaggtcaagatcaaggatggggagaacaaggtcttcagccctgaggagatcagtgccatgattcttggcaagatgaaggatactgctgaggcataccttggcaagaagatcaatgatgctgtcgtcactgtccctgcgtacttcaatgatgcgcagaggcaggcaaccaaggatgctggtgtcattgccggcctcaatgttgctaggatcatcaatgagccaactgctgctgctattgcctatggtttggacaagaagggtggcgagaagaacatccttgtctttgaccttggtggtggtacttttgatgtcagtatcttgaccattgacaacggtgtgtttgaggtgctggccaccaatggtgacactcatcttggaggtgaggactttgaccagaggatcatggagtacttcatcaagttgatcaagaagaagtacagcaaggacatcagcaaggacaaccgtgctcttggaaagctgaggagggaagccgagcgcgccaagagagccctcagcaaccagcaccaggtccgtgttgagatcgagtccctctttgacgggaccgatttctcggagccgctgacccgtgccaggtttgaggagctgaacaacgacctcttccgcaagaccatgggccctgtcaagaaggccatggaggatgctggccttgagaagagccagatccacgagatcgtcctggttggtggaagcaccaggattcccaaggtccagcagctcctgcgggactacttcgacggcaaggagcccaacaagggtgtcaaccctgatgaggctgttgcctttggtgccgctgtgcagggaagcatcttgagcggcgagggtggtgacgagaccaaagatatcctcctccttgatgtggctcccctcaccctgggtatcgagaccgtcggtggagtcatgaccaagttgatcccgaggaacactgtcatcccgaccaagaagtcgcaggtgttcaccacctaccaggaccagcagaccactgtctccatccaggtctttgagggtgagcgcagtatgaccaaggactgccgtcttctcggcaagttcgacctcaacggcattgcgccagctccaaggggcacaccccagatcgaggtgaccttcgaggtggacgccaacggtatcctgaacgtgaaggcggaggacaagggcacgggcaagtcggagaagatcacgatcacgaacgagaaggggcggctgagccaggaggagatcgaccgcatggtgcgggaggcggaggagttcgcggaggaggacaagaaggtgaaggagcggatcgacgcccgcaaccagctggagacgtacgtgtacaacatgaagaacacggtgggcgacaaggacaagctcgcggacaagctggaggcggaggagaaggagaaggtggaggaggccctcaaggaggcgctggagtggctggacgacaaccagtcggccgagaaggaggactacgaggagaagctcaaggaggtggaggccgtgtgcaaccccatcgtgtcggccgtgtaccagcggtcgggcggcgcccctggcggtgacgctgacgctgacggcggtgttgacgacgaccccgacgagctgtagatggttgtagatggtggtggtgacgtggagtgccgggacccgagccaaattttgtaacggtgtttagcggcggacaatacttattttactaatcttggtgctgctctgccaatagctgtgctgagcgtagaaactgtttgtttgtaattttttttcttccacttccttggttgttcaggattcggattcgaattttatgtgaaaaaaagaagtcgcgcttttaaaatcttgcatttgcccccttgtggtaataatgctaattaaatggtgcaaagtagattgcttgtgac

SEQ ID NO: 94754 - DNA, 267 bp, Zea mays
  Clone ID: MRT4577_186408C.1
ctgcctctggcctccagccacctcccgatctggtcgagctcgcctccccggaggcggcgcatggatcccgccgtaccaccacctccgggcctcgtccgtcgtcaccgccgccgtccgctctgggggcggctccagcagctgcaggagaccgtggcgcgacgccggcgtcgtccgatgaggagccgtccaagctcgtttccacgtcgggcaccgccgccagtagcagcgcgggcttgtaggactcggctgactcagaagcataccggt

SEQ ID NO: 94755 - DNA, 563 bp, Zea mays
  Clone ID: MRT4577_186409C.1
gggaacaacccaacatacagggtaaatcaaagggggaaaccgaacgcgggccaacagttaacaaaaacaggattgcccccaggcttatgcaaaacaagaggaggctaaaaatcccaggggggggggggggaatttttttcccgtttggaagggtacgtacgggccaccgccaaaaaggcagaaactgtttggccgaataattcgaaactgtttgttacatcgccaaggaacctgccaatgccgccgccagcagggggagcactgaaacacacacgtaggggggggccttaacacccgccgagttgctggcccccccagaaaacgggggggttccattatcgcctcctcctttggcgggggaggcaccaccaaagcccaccggggggggagccggcgccccctccacgggcagggcggccccgaaaaggacaagcgtccccttggcctgaaggttggccgggtcaaacccgtgcttgaccggccccccgttggccaccggggatcccacctgccaaatggggctaaccttctccaggccgggggccagttgcagcttcccgaaa

SEQ ID NO: 94756 - DNA, 393 bp, Zea mays
  unsure (1)..(393): unsure at all n locations
  Clone ID: MRT4577_18640C.1
gtgtttttttttttttttttttttttttttttttttttttgaggagacaccggatcggacgatgcatatacaggcatgcaacgagaatagcaaaacaaatgaaggaatgcacttgctgaacagcccggcggggcgcgggcgggtaccacccaaagggggggacgagccttttcaaactttgcatcgggagggcaaaaggagacgttttgctgtgcacgtgtgctgtgtggaaatggaaatggaaatggaatgggatggaatcgttcaagtgcattttgtagccnnnnnnnaccgcncctgcctggacnttctcgggaacgaggggcacctgggggaccccaacttccattgctgccccgtcctgaaggggcattccagggctctccttggggg

SEQ ID NO: 94757 - DNA, 201 bp, Zea mays
  Clone ID: MRT4577_186410C.1
cccaccgtccgtgagatggatcggccaggcagttttatcggggatttcctgggaacacggggagaagctgacgagcacttttccgctacgggaggtaacgcaggccgcgtatgcgcgacaagatcaccggccgcccccgcggttgggttcgcgcttcgggtcccgccgcgtcacagagcgctgaagaccccccaccctgac

SEQ ID NO: 94758 - DNA, 234 bp, Zea mays
  Clone ID: MRT4577_186411C.1
gggtattgattgctgcattctgcttcatgatacataaggatatacatgatcctcgccagggtatccccagtacacattagtgggaattgcgtaagcgtgtggtggcattgtgacctctgtctgttgtttagaaccaagtttataaataaagtgtcttgatacctgcaagatcgtgctttgagtgagtataatttagtgggggggggagtatgtttttttttttggtggatgaaa

SEQ ID NO: 94759 - DNA, 472 bp, Zea mays
  Clone ID: MRT4577_186412C.1
ctcgaggccggccgggatcacactcgcctattctagttgagtaacccaatcttcttcgagctctccactgtattcctaaactcggcgtgatgattgcctgcgttaagtgcgtctcggcgctgccgaaggtgggcgcgatgcgctaccgcaatgctctccgctacaacatccagggaatcacaaagccgcaaatccgcaggctgtggaagacgatcgacaagaagagcatctccgacattatctacaacgaaagccgcggggtgctcaagatcttcctcgagaatcgacatccgcgatcgcgcttcacctacaccgaggacgctcgacgaaaaaacgtcacccgcatgaatgtatcgtgtatgcccatcacagcgccaggaacgcactctgtacaaggtcatggaccgagcgcatctcttccatcatctgaacagcatgacggaggtcctatcgtctgatccctctgaactga

SEQ ID NO: 94760 - DNA, 423 bp, Zea mays
  unsure (1)..(423): unsure at all n locations
  Clone ID: MRT4577_186413C.1
gaggagcacatgttttccacaccctagggggggggacaaataaagttaagccctcatagacagcctttgccgagtagcaaccatctgatccaaggctgaaaatgtgtttatcatcttgatccggctgaagctcaacatctgaaagtagatcccacatctgaatataatccactaaacctccaaccaagagctcccttaatgtctttgatccatcttctatttaataaagcctcctggagagtacttttgtttgcaatcctctttggaatagngtcaagtaaacttggagcaatgtcgataattcttcgaccaaacagccacctatcagtcaaggttcgagacccatttccaacttcagaaatcagaacagtggagaagagagcccgagccttaagcggaacatggataggtaggtttttaaag

SEQ ID NO: 94761 - DNA, 188 bp, Zea mays
  Clone ID: MRT4577_186414C.1
gcggcgggggcacacatcccaagacgtcgagggatctcctgtagatcatcctcttcgatccatatcaccatcgcaccgaattaatcatgcctcgaccggccaacgatgtcacgtaaggcgtacgtgaacaagcacccgttgtgcgacatcgccgcccacccccccacggcggcgcccaccgtcggcca

SEQ ID NO: 94762 - DNA, 228 bp, Zea mays
  Clone ID: MRT4577_186415C.1
cggacgcgtgggcggacgcgtgggctgtaactcggtctttatgatttcctttttttttttttttttgacaaaaccgcagcatctttgtcaagcaacagtgcccaaaagaaaaggaaaggataaagaccgacacacagcaatggcatacgcacactcctacagaaaagcgaggtctacactgcgaccaacccataaacatatggccgaaactcggaagaactactttgt

SEQ ID NO: 94763 - DNA, 552 bp, Zea mays
  Clone ID: MRT4577_186416C.1
ggcgcgtgggagcgggtgcaggcccggggaagaaggccgagatctggccctacgtgccctacagcctcgtcgcgcacccttacgccgcgccggcctacgacaagaaggcgccgccgggctacgtgcgcagggtcgacgccgtcatgcccgtctcctccacctacggcgggcccgcggcggcggccgggccgccgcaggaggagcggctcgccaccatgttcagcgacgacaaccccaacgcgtgctccgtcatgtaaattagaattactttttcttttcccctacacaccaccgtgggtgcatggcgcagctctcttcgaccacagaaaatgtaaaccgtacgtggatgcatgtcaaaaccatagatgatcgcctcggttggatgtctatgtccatcacatgtgcttgtacgtacgtagctgtatgttgttgtatgctttgtatattattgtttgatggaaccaaaagaaagcatgcatgcgtggtagagagatttttcccaaaattaattaaagttagtcttaaaaatcgctccacatgtgctgccgaatc

SEQ ID NO: 94764 - DNA, 444 bp, Zea mays
  Clone ID: MRT4577_186417C.1
cgtccgaacagaccctttgtactacacaatgcgttttatagatgggttgagacaaggaggaggcactagaatcgggtcgacgtcgacgcattgagcctatcaccaaccggacggcttggacccagagtggtcaatcatctgagtcaaccaagggtgaacatgtgcagggtgttttggagaaatcttagggagacactgctcgtcatgtttctcctatcgaccgggtggtctcattgaagagctatcgacgtgcggaggggtctttgcatcgctgtgcggagaaatgggcaccaggtcacaaatgtgccaccacagtgcaactacatgttattgatgaagtatgggatttgctcagtcaggaggaatgtccaaagatagcgacagagacaattgagcagatttttatggctgttagtccaaaaatagtgcaaatacgtgccgggt

SEQ ID NO: 94765 - DNA, 276 bp, Zea mays
  Clone ID: MRT4577_186418C.1
gaacaacataaactatgtgtggcctaaaaagtgaggtactgtagggctacagtggtctagtcggagtagagcgcgggagtaggttgcgacgtaggctgatacgctacgcatgtaggagtgctcaggcggcgttgtccagtattctctacctgtcacccttcgcctcggtaccgcgcgagctacggtgggagtcatgatgacagtagcccacacgtagcagagagtcaatggtcctgcctcggtaacgcgcaagttactgtgcggcctgcatactgc

SEQ ID NO: 94766 - DNA, 366 bp, Zea mays
  unsure (1)..(366): unsure at all n locations
  Clone ID: MRT4577_186419C.1
gggggctgcggggcttccgcttggccgcctttgctggtgcgtcgtgcctcgcgcgtgncntccatttttttttttttttgngcctngggctcgtctttgggggggggggtggtttcttgggctgttcttctttgtgcttcnctggtggggggaggctgccccggcgtnttgcttgttcctgtctgccttcttgtcgcctngnttgcttctgcgtgttcttttcggctgtcgctgggctttgattttggtttttggccgtttcttttcggcgcgtcttgtcgtttcgttggccggtggcttttcgttccccccgggtccctttgggttgctgttggtgttctctttgttngtttctggcgttttctt

SEQ ID NO: 94767 - DNA, 308 bp, Zea mays
  unsure (1)..(308): unsure at all n locations
  Clone ID: MRT4577_18641C.1
ctgnaaatcacaatcaaacgatcttttaccctgctgttccacactatattggctgtctcttttaactcatcttactacaccttcactatcttttaacagatgtgccgccccatccaaactccctacctgacaatgtctttcttccagatctgccctttaatgctcttccttctaatctaaaagatgtgctgtttctccctttcgacccaatatataatctaaatatctataaaagtattgatatttaaactttctccccgttcgcttcctctttttccttaaacctttccaagatcatttttcacata

SEQ ID NO: 94768 - DNA, 672 bp, Zea mays
  Clone ID: MRT4577_186420C.1
accgctatgagctcacccaccaacctcgcgccgcttcgccctcgctctcatcctcatcggcgccctctgcaccgccgtcgccgccgcgcggttcgccccggcggacaaccacctccttgcgtgcggtgcggcggcacccgccgtgctccccgaagggcgaagctttgtgccggactctgggtgcgcatccacccagatgaggtgatcctccccatccctggtaatccgtagcgaccccaacggcatccacagcaccagcgaacttgatcctcgcatgagctttggttttctcctgccgctcaagaaacgaattgagaggctgcataacgcgattaacagatccatggagtccatcgtacacactgtgcaggtaccaaggcgtggtcccgatcaaagtgaaccagaacaagcacttcttgcacgacaaggttaggggcgtccagcaatggaactatggactcgaggctggctccaagccagaactgcttattgctatgagctgtctccccagtaccgaagcctagcccaagccgaacttgatctgcaacggttacaaggacgcgagactacatggcgattgcgctctcgtagcgggccatgggcctgaacctcataatcgtgctcgagatggaggaggagcttgccatctgtctcgaccagtacaggaagctg

SEQ ID NO: 94769 - DNA, 263 bp, Zea mays
  unsure (1)..(263): unsure at all n locations
  Clone ID: MRT4577_186421C.1
gcagaagacgcgcaagggacgcgggatcggctccggcacagggaagacggcgggacccggccacaaagggccagaagcgcgangcaccgctagtttggccttccaaggtggccagacccgattcggcgccgcttgccccgccgtgattcaagacccctctcattccattccacccgtggactgggaaaatgcaaactcataaagctggaaaatgattccccgaatgataccagagacctaaagaacagtgccatggaacaata

SEQ ID NO: 94770 - DNA, 583 bp, Zea mays
  Clone ID: MRT4577_186422C.1
aattcggcccgagggtgaatcagacccgtcccccatacgaaaacccggtcaaaatttccaattgagatttttaactaacatggccgcccggtgaaggcctccctccgagaggagcggccaaaaaagggaggccagggaatttattctgtcagggggaaaacttcatagttagcgaccccttcggtgtggcccggccatgtattccagccttagaggccaccccctgttatttcatttgtagcacccaccagctcctatagcaatgattttctttttgtacaagattttccttctttcccttagggtgatggcgcgagagcattggtgtccgtttccgttgggaaattggttcatttttagagaaaagctgggtacataaaattttggtaggaagggtgtaaaaaggcagcctgtatagttgtggctctctcggcttgatccctcgtatcttgtcttgtgctattgttaatggagtgagaggggctgcctgtaaatcgtgggttcccaaaaaaaaaaaaaaaaaaaaaaaaaaaaaaaaaaaaaaaaaaaaaaaagtttagatatgagcgcacgggatgttata

SEQ ID NO: 94771 - DNA, 270 bp, Zea mays
  Clone ID: MRT4577_186423C.1
tttttggggtttttttttgaggttttactgggaacatggtcaaaaaaagaatataccacacagcttctatagtgtgatctaagctggatacctccgggtccaaatgatgacgctggaggcctttatccaaccacttataaaccaagagtgggagctactaaaacatggggggacggaaatactagaagactcctcacgaaaggggtctcatgagacgcatgcacggatccacaaaccgaaacaaaggtcctatatcgatacgggaccgtt

SEQ ID NO: 94772 - DNA, 363 bp, Zea mays
  Clone ID: MRT4577_186424C.1
aaaaaaagaaccttttggtattcaaaagaaacgaaatttgaacggggtgccgcagcccacttttatagttttattacaagggggggcggggggaaaaagaatcagctggttttttggggttaataaattgaatcaaaatcagccttaaatttaaactgaatagaatccctggttaatttagttgccagacaggagctctcaagaaaacaagctctttctccttttttggggatcgccaccttaagcctgcctgttgggagtgggaacctgaaaaaaacccaaaccgaatcaaaaattggtcactggctttgggatggcccggaagatcctcagccttttgctgatcttttccttcgctggtgg

SEQ ID NO: 94773 - DNA, 341 bp, Zea mays
  Clone ID: MRT4577_186425C.1
tggcatagttgacttagagcttagcaagatcacgggaacatgcttgaggacgctgcatgcctgtcggagtaattggggctccaaggctaatgcagttaacctactgagcaaacaccataaataggctatgcgagcaccttacgaatcgactgctgtttcatttcccctgtgttgtctacacaattggacttctccaaataagcacttgattcttgatcaaagagctctattcatgctcattttgtatataaacaatgtatccctcctgcttaagtgtctgtttcaacatatgcttaaaatgacactttgcttgatatggagaccctgggcgcattctttaa

SEQ ID NO: 94774 - DNA, 461 bp, Zea mays
  Clone ID: MRT4577_186426C.1
ctcttttttttttttttttttttttttttttttggttttttttggggggaacatgttgccacaaatttttcaggtccaacataacttacatccaaataaatcccaattaaattccaccccgttggggcagcccgtccatttttatgggaatgggaaataacttaagaccaggcggggtttaacttaaaacgcaggaacgggctcccaagggctgaacaactgtcctgatgactcaatttttaggccgccgctgagtcccagttttatcctttctttttgaagacaagcctgctcaaaaggttagcacggggctttttcttcttctttgggccaacagaaatggattgggggggggacttcgggaccgtgggacgaacaacgaccagggtcgtcggagcactttcagcaggctgggggcttcggccagaaacttgcttgggttctttttttaaggggcattt

SEQ ID NO: 94775 - DNA, 358 bp, Zea mays
  Clone ID: MRT4577_186427C.1
gtgtttgagttgttttttctaagatttgataagttggaattttttttttttttttttcttttttttggggaaccgaaggttatcccaagcggcaaaacaattggatggaggtgggcttacaaaggaaaagggccaacccagaagaattttgggccccccaaaaaaaatgggggggggggggaaaaaaaaaaaaacccccccaacctttgtatgggggggaaaaaaaaaaaaaggaagggggggtaaaaaaaaaacctgtaggagaaaaaacttctccttggggaaaataaacaaaccggggaaaaaaacaacccctccctttaaaaaaaaaaacaacattccatatgtccccggggac

SEQ ID NO: 94776 - DNA, 159 bp, Zea mays
  Clone ID: MRT4577_186428C.1
gccactcgtccgacctccctttagactccataccggggggtctacattcttcctaggggggctacactcctcaatcacattcacacataaacccctacgaaccacatgaaccaaaccacggcctacatctgagacattgcagatatttagacaaaagag

SEQ ID NO: 94777 - DNA, 583 bp, Zea mays
  unsure (1)..(583): unsure at all n locations
  Clone ID: MRT4577_186429C.1
gtaccctcgnagggccggccgnannaaaaaaaatttccaaaaaaaaaaaaaaaaaaaaaaaaaaaaaaaaaaaaaaaaaaaaaaaaaaaaaaaaaaaaaaaaaacctgggcaatcaaactgggggggccaaccccggaagcgggggggggaaaagcgcgcgacgcaaaaaagcgtaacttcaggccgccggtcgttctacgaatcctgttccccgttctcgtgggaaatccaccggggaagcctttctttccccttcctcaatcaagtcgatccaatttcgcgcgggggtcgggttcgccttctcctccagtctccacctccaccagggttcgaggtcgacggacgctactcgcagaagtttttctttgcgggggggccgaaaaaaagctaaggctcaggcatgagcttccggaaccagaaaaggggcgggaaggatgggggaaggacttcctccgcctccgacctggggaagccgttcatcaacaccgggagttggtaccgcatgccgccggcgggtggcgtgatggcctcccggaaatctagcctcagggagggattgggttcctctgggttctctctccg

SEQ ID NO: 94778 - DNA, 516 bp, Zea mays
  Clone ID: MRT4577_18642C.1
ctccacctaaaacgagcgtgacactgcccaggggtcgacagaaagagaagtgggaagtacatatacgtgtgccaacacataactacatatacattgttttcaggttaagggagcaatgaaaacttagcgaatcccaatacaatggttgaaggataggatcaggctacttgtcgaagcataccgtagatgtgaagggaggagacccatttctaaacaaaccgactggctcacacatgactgagaagaattgcaagggatccaggggacacaaagtgatcagcatagattgatcaatgctcgtgctgctaagaactagtcaactataactatggagacagtgcgcctgatgaactcattcgatgatagagtggaaggaacaaaagttaaaatgtctggaaaccgatcgctaccacaagactagcatctgggaaacacatctctgtggacagaaaagctgaggacactaatagactccttctccagtgcctaatacaaatgaaacttcgacagagtgct

SEQ ID NO: 94779 - DNA, 138 bp, Zea mays
  Clone ID: MRT4577_186430C.1
ttcactcgtccggctatgttcatgaagtaccagatgctctcgtcctgactgcatttagcgtaagatgtacacagcaccataaacgagagaatgaaagaccattgctgggaggcgggtggctacaactgttggaaccag

SEQ ID NO: 94780 - DNA, 666 bp, Zea mays
  Clone ID: MRT4577_186431C.1
agggcgctggcagacagtccgatataggggagatacgtggcttggggatgattatggggaccgaattcacagggaacaagtcaccgactgatctgttccctgccgaatggggggttggtgccatcttcggcgaagagtgccagaagcgcggcatgctggtcagggtcgctggcgacgccatcatgatgtcgccgacgctgatcatgacgcccggcgaagtcgacgagttggtgcgcatctacggggaagccctcaaggccacggaggagagggtggcagccctgcagtccaagaagaactagccaaaagggcgacgacgacgacgatgataacgataaacgccgggcgtcgacaggccatagctgatgtacaggtgaataaacagctaagttcgtggctgcgagatggcaatagcgcgccggtctctgttcttgctctgtcgccaagcaaatggtggctgaactttttaaacatgacatagatccccccccctcttttcctttcccttaagcaatgacaatatatctcaaatgtttgctgccctgtagttcctgaagataatgggtttcgtgtacatcgttagtagtagtagtgttcggatacatagctttgtaaaggcaaagcaataataaagtgaaggaactgcagtttcgagtctgcaagatg

SEQ ID NO: 94781 - DNA, 535 bp, Zea mays
  Clone ID: MRT4577_186432C.1
agcagtggtaacaacgcagagcacgcggggggtcgctggcgacgccatcatgatgtcgccgacgctgatcatgacgcccggcgaagtcgacgagttggtgcgcatctacggggaagccctcaaggccacggaggagagggtggcagccctgcagtccaagaagaactagccaaaagggcggcgacgacgacgataacgataaacgccgggcgacgacggaccatagctgatgtacaggtgaataaacagccaagttcgtggctgcgagatggcaatagcgcgccggtctatgttcttgctctgtcgccaagcaaatggtggctcaacttttttaaacaggacatagatgcccccccccccccccccctcatttcccttaaacaatggcactatctcaaatgtttgctgccctgtagttcctgaagataatggttttcgtgtgtatcgttagtggtagtagtgttcggatacatagctttgtaaaggcaaagcagtattaaagtgaaggaactgcagtttcgagtctgcaagcctc

SEQ ID NO: 94782 - DNA, 293 bp, Zea mays
  Clone ID: MRT4577_186433C.1
cggacgcgtgggcggacgcgatgggggatgagtacctcaacgcgccaggcgagacctactccgtcaccctcaccgtgccgggcacctacggcttctactgcgagcaccaccaaggagcttgggtggtcggccgggtcgcagtcaactagagctaggtatccgttccgtgcatctcggtctgtgtgtactccgcccgtcgatggatgatgcatccatctgtggttgttttcctcgcatgtgcaagagttggtgcggcgaattgggtagggaaaaaaggaaagggcggccgctct

SEQ ID NO: 94783 - DNA, 342 bp, Zea mays
  Clone ID: MRT4577_186434C.1
ccctggcgcacggcgaggcgcaaagcgtgaggagaacgcggaccgggacccttcccgtgaccgtacgtggcactgtgcgtggtactctgcaccctccaccgaccgatacagctactgctactggtgcttcggaagtagacaggggaatatagatgggcatccggatgccctgactgtgggcagggatatccaactagagacctagctgcgtacgggtgttccatacgtggcatgatgcctgacatgcttacgactcgcgtactaacgctgggactgggtgagagactggggctgtgatatgagctatgataatggctccttctagggcgccttctccaacaa

SEQ ID NO: 94784 - DNA, 242 bp, Zea mays
  Clone ID: MRT4577_186435C.1
ccgacgcaagccacgcatacgcgcagctattgccagagcacactctgttttaagtgcatgacatatcgctgcaggacgggtataatgaagacgacgaggctaatgctgagctatctctgcaggcatggaatggtgacatatctgatagctttgatgttaacaggcgaacaaacaatgcctttatgtctaacgaatacactgactgcgagacgatgttactcaacgttcctctactcacgtgc

SEQ ID NO: 94785 - DNA, 298 bp, Zea mays
  Clone ID: MRT4577_186436C.1
ccattcctccccaaaacacatcctgcgatcctcgaagcctccgccgagcatcgatcatgtcggcctactgcggcaagtacgcgggtacgttccatcgtctcctccttcgttgctgatctgcttgtgatgtcgtttggcctcgtgtgtcgtagatctacgatctactagttgttcgttgttgatgccctcagatctacctgcgtttgacgagtatgttaacgattcgtctagctctgagagacccaagggatttgcggatccttttttagatccgtacaggctcttgcggtcgtgccta

SEQ ID NO: 94786 - DNA, 282 bp, Zea mays
  Clone ID: MRT4577_186437C.1
ggacgcatactcatactatgctcatccattgatacaagcattctctatctaacttccccgatagagctataagggggcgctcatatttactcaacgctcgaactcaaacaacatgaccacatcaaaaagaagatatataattgctcccttgatatacataactaaatgcataatcttatgtgtacaaatgtacacttatttatattattaacggtaactttttgtatatggcattgttcaaaacttttatttatgatataccacaaaaaaattcactattat

SEQ ID NO: 94787 - DNA, 855 bp, Zea mays
  Clone ID: MRT4577_186438C.1
gtttttacagacttaatggttatgcactagatgatgtaacgttctcggttgtgcccttccgtaccggcagtcggtacttcagttattagtcagcagattgtgggccagggtagtagtcgaaagattgtgaagaaacagctgtctccaaagcgagaagacgaagaaaggggaaatcgagagatgagctaccagagagtccctcccgaggaaccctaccctcctccaggacatcctcgatctcaggcgcacccttacccaccgccaccagatgtgtacccgcctccccctcggggccatggacatccaccaccaccccatggcgtgtacccgccgccgccgcagggtccttaccccccaccacagcagcctccaccggggtaccagggctacttcaacgaccagcagcgtccttactacccgccgccgcatggagagcatcaacacaaccaccaccagggaaaccagggtagctcctctgggttcctcaaaggatgtttggctgctctctgctgctgctgcgtgctggaggaatgctgcggctgcttctgagacgtgagatgtccgggaatccgatcgcaagttatcgtcgctagcattcgggagcaccccagttattatcatataatagtaactgtgcttgtaaataatctggagcagcagtgttcatgagctcccagccccgcatttatattctcataatttgtagtacgttctatgatttatccgaaaataaaggactctatatatgggattctaaataaggtatttgtcatatatcaaaagattcaaaccagtttttttgtccctaaggcgcatttcccgcccgtttggacacgtgataaaatcatctcaccc

SEQ ID NO: 94788 - DNA, 237 bp, Zea mays
  Clone ID: MRT4577_186439C.1
tcttgaatcctctatattcaacccactctttctgtggaaattattatcactcatatggggatggttttaaagtgatgagggagttcatatcttattactacagtatttcattattgactctcttcattgtataaagaaattgcatatactgtgtggaaatatgcagctacaataacgtctgtctttccttcaccaaatgaagtcatggctattcttgtccacctattgctacaacaa

SEQ ID NO: 94789 - DNA, 437 bp, Zea mays
  Clone ID: MRT4577_18643C.1
tttttgttttttttttttttttttttttttttttttttttttttttttttttttagaccctttcaacagatttaaattccaaaccaatcattgcaataaaacatattaacacaatggtgctcacaacgaaattaaaccgacaaccataatgggggcctttggaacaaaacaataaaaaaaaaggggcgggcttggcaattggcatatggggacgctgggggggatccctttggcgggggtccccttttccttggcgccgacgtccgggaacagcagcgggtacgggaccttgggggggcccttccgggtcttggggcggggggccctgttcctttccggaatccggttctccacccgggggagctcctcccggaacctggggagcagctggagcacctccccatcggcgggccaccccgcgggggggcgctggccca

SEQ ID NO: 94790 - DNA, 314 bp, Zea mays
  Clone ID: MRT4577_186440C.1
gactaaaatgcacccagatatcacatgtgccaacggactcccaagggtatcctgtcaaaaggctcccttgagctttctgcaagcgttgactgaacaagttgcgctgaggcatctgattattcaaattcagcaactggcgtcttggccggacgtcgacagactcggtgccaggggatgtcccaaccttcataaggaataatagctctgacaccggttacataccactatgtacctttggagaacacatcctactgccaatgtcaaatgcaggcatgcacttggattggcaagataaaccgtcactggttacaact

SEQ ID NO: 94791 - DNA, 234 bp, Zea mays
  Clone ID: MRT4577_186441C.1
tcgtcacatgcctgtcgttgaagccagctaagcgtactggatcttggatgtttgactgctaagtgcattaccgcacttattataatgagctgactgacgtacgattaaaaaaatgaacattgaactgccatgagtagcttggagtttcgagaacataaagatgtccatgttctcatgtttgattgccaagcccagtgaaacgtggctttttcagggtctggaaagactgaggaa

SEQ ID NO: 94792 - DNA, 404 bp, Zea mays
  Clone ID: MRT4577_186442C.1
aaaaaatgggtttttcacgccttaaaagaatttcaaccaatggttccccccaaatgtttaaaagcaccctggttttttttcccttttatcaataaccccccttaccaatggaataacctggtccatggaatattggattggattcaattcgggtttcaacggtggatccgaaaaataaccccaaaccccaggaaacaaaaattaaaccacaggggccaaaaaaaaaaaattccctcttggggcccttgaagacaaaaggccgctcccccgggtcaaggggggctcacttaacctttggaaaggttattttggggaagaaccccccaactttggaaaaacccatatcggcccgttaaactcccaattttttgggcgaaaacaaacaacttgggtacaattgaaaa

SEQ ID NO: 94793 - DNA, 285 bp, Zea mays
  Clone ID: MRT4577_186443C.1
gactctgttttttatttttgttgaactagacacacgagatgtgacctagacatgggggcaagatgaatcatgcgagaggaacataaacaccgaacaatctataggaacgaaaagtgaaaatgggtgagttgaaaaaaacagacactgcttgaaaatattacactgacgaagatcaaggaaagcacaagccagatgaacctgagcctgcgaaaaaaagaaggcaggtaattaaactaaaaagcagcataacacaggctatatatataggtagaatagacgtacggt

SEQ ID NO: 94794 - DNA, 350 bp, Zea mays
  Clone ID: MRT4577_186444C.1
gtgtccgccaaagaggccctcattgttggacctgctctatattagtaatgggttttactgtcgggtgatccagcattttgttgtatcgaatgttcttggaaaccacacgcgtgagacatgctcatagccaaaagtactacaagctgcctgcctctccctagctatgaatcaaattaaagcccgtcttattattattattacatatgagtaattcgacggagagacaccaacgacgacgtactttgttaattccgcggtcaccacattcatcagagttggcctgcttctgatgtccatcgatccaacatggcctgacactctttcggcctgtactccggagctgtgtgccc

SEQ ID NO: 94795 - DNA, 593 bp, Zea mays
  unsure (1)..(593): unsure at all n locations
  Clone ID: MRT4577_186445C.1
cccgcgtccgcaacagcacagctgctgctaccaccgacgttgcttcggttcggtcccttttttggcgcaaacacgtctggcggcggcgacctacagggcgcctgacgacagcggagaccagcagatcggagggggggccggggcgcgcgctggcccatcgccagcggnagcggattaactgggatgggcgccgcgtcgccaccgcccggccggcaccgacgacgacacgccagcagcgccgcctgcagcatcataggatcccactgtggagctgggtgcggcgtcgtccaggtccagctggcccagccgctgagctttcctgtcgtcccgcgccagcaacagtgacgctgctgggccacgtactgacggcgactggtgacctgctggaaccgccgccggcctgtttcccttttctaggtaaaagcagtggcagaggggcgagctagcgacagcgtgcctcgtcatccatcgtccctgcgccgtggctggcggngtgggaaaaagtctgagcagttttgagcgtccggaggagctcgacgatttcctgccctcgaatagtcacttggggtggccactagttattatttgtttgc

SEQ ID NO: 94796 - DNA, 201 bp, Zea mays
  Clone ID: MRT4577_186446C.1
actacacgcattacttactgtccaccacacatagataactgagcctttgaagagaggaaccacatacgggaggggaagaattatgttcatgctataataaaccgtaagtcctgctgttaatttacatcatcctattttgaacatctctaatgaataacattctactaaatacaaaagaacctttaagttgtacaactcaaa

SEQ ID NO: 94797 - DNA, 286 bp, Zea mays
  Clone ID: MRT4577_186447C.1
gttcttctgaattgctttttcttaatgtccctcaagaccctcctcagcctggctttcccaaagggcaggttcttaaaacctgaggggctcgcttcttttatcctgtttccaggagcctcagaatggttcaggcccttgccagtcatggcacccgcctgtcactgtggctgcgtctggtaaccacagattgggggggccacgcctaaacagtgtccgtgcatttctgagaaaagtttttccagatattacattctgcttttctacatttctcattttccatgtgggc

SEQ ID NO: 94798 - DNA, 817 bp, Zea mays
  Clone ID: MRT4577_186448C.1
gtagaacaaaatgtgatttcttttccattataacaaagtagatttgaatatgctgtataaaacggaaccgaccttgtctggtaaataggactatttgatgttattacatgtcagactgtggagcactcaaatcctgatgcctcagctctgcttttttaaaagaaaaacaatgctaactgatccgtgtctgtctatactgcctctgcatctgcattttctgtatatcctgtgtgtctatactatgaacgtgtgctgctgatccatgttgatccgcggtgcatggcctggtgtcagcgcagagttgatgtggatgatggcctgctgcaactacgaactgatatgagtaaagaatgactatgaatgcatcgcgatcagctcatcatctctgcactttctgacgttgatgtctatgttagcatcagatgaagaaggtacgatgtcacagcaatggcgtcttaaggccttcccaggagccagctgcagccgttctgatgtcacttttatcagacgcagactcttcagtgggatcaagtcaggcgggcatttcctaggtggctgtctattgtaagtggtttccgtcttgccttccctcgaggtaatgccttttaggaagaaaagagctcctcttttgcactcgtctctggggtaatgtttggtgttaaacatgtacacatctgtgacattgcgaccccttttccatggtacaaaggttttctggacagcaagaaggtcagggagcagcacgttgcccttgaacacctggactgaatagccccatgagactgatactgtgagcgactctttacggtcgtagcac

SEQ ID NO: 94799 - DNA, 370 bp, Zea mays
  Clone ID: MRT4577_186449C.1
ctcacgctttcgttaatgctctgatgactggtctgacatgtcgtgggacctgacaagcctggactttgcgaagcagctaccatggttctcggcattacaattcaacctacatgcgaacaggattactgctgagactctgactggtgctggtgttcttagcgctgattggaacatcaatggtgactggcttgctgtggagaacacctctgagcttacttttgacctgatattgtctgcgacatgcgcgacacactgagactgacaggacacaaactggtacgtgacaggccatcaaaacggctcggataaggtatgcaagatgtttcactgatcatctgatgacgcgatcaattgccctagcgaatcacct

SEQ ID NO: 94800 - DNA, 579 bp, Zea mays
  unsure (1)..(579): unsure at all n locations
  Clone ID: MRT4577_18644C.1
gaggctcgggcgggggcaaaccctaatccccatcccccagccgacagccgtcgaggaaaccgggtgctggggcgggggtggactcatactcatgccctgggccctgcccatccgagccgatcgggcatcccctacccctacctgagcgggtcccctgcgcttccggggagcaccaccagggagcgggggtgagccgtggagcaccatcangagcacgggcaggggggggacgcccgcatcctgcctcttctctgcggcgggggcgtctgcggccaggagcacgggcagaaggacgacgcccctgctgctgccggtgagcggggatctgctgcgcccccatcctgcctcttctcctccctctcgggctcgcctcggtcggcggcggggggcgcttctatggggacttccaaagaacaggcgtccaagggctatgggtgggtcgagaagaaagggaagagggcaatatatatgggccacctttctcctcaagggaaggggtcggccatcaaagcggcgcttgcgcaatgtgcgaatgtggggcatgggggggtcatcgggaattacacgatcccatataaa

SEQ ID NO: 94801 - DNA, 433 bp, Zea mays
  Clone ID: MRT4577_186450C.1
gggttggaaaaaaaacttggtaataaaataacccaaccctcattatgcccattttaaaaaatgcccccaccgtaccaacagccaaattacaatattctgtaattaataaaaaaaaaaattctttaatttggatccccgctggggccgtccgcctacctaaaaggtgaataacccaaggtggccttccccgtaaacttgacctcaaagggggtgaccttttttcccattcttcggaaattttggcccacccccttcctttcggggttgaccctttccgggtaaacccccccctttggggggaagaacttcacctcccccttggggaaaacccccgaaaactggtagggcatctttttccttgagcccaaccttttgcccaaccccagacatttttccttgctccccaattttaaaaggttggggccctccccca

SEQ ID NO: 94802 - DNA, 291 bp, Zea mays
  unsure (1)..(291): unsure at all n locations
  Clone ID: MRT4577_186451C.1
gcgcggcgccgtcgtacttacgctccagggcgccggagatgggcgcgtnctactacccgcgcaagtgcggttacggtcgctcttgaggagcacgatggcgacagagcggtggcgcctgctcgccagttccgaggagcctgcgatgggcaacaagatgtacgctcacggatttggggagggatcacctgcacgtaaagcggcgatcaagctgccgcacttctttaactacatcgatgtcaacagtgtcctagcacagcttgagagttacaatacggaagcgtacttggagct

SEQ ID NO: 94803 - DNA, 474 bp, Zea mays
  Clone ID: MRT4577_186452C.1
gagagagagacgcagggagcgtaccgtcgggaatttataccgtttctacgggatgaggctccggtcggctgaggtcaagatgttgacgccgcgccaggaagccgctgatgctgaacttgatgcgcctgcaaggggaccccaccgtcgggatcatgggactgctcgcagagaactacatgatgctctggaacgccggcttatcaaggccggatgattcgccgtgctacggcggcacgttaatactgaccttgaagtctacagactatgaccgagactagccagcaactgaaagataagtgtctacgatgcagcatgcatgtatatatgctggtggaagcatatgtgcgggtagtctacacaaccggtggagatctatatatgatgttgctgcacttttgacttatatccaagtcctgctgtgtgatccaaacccaaactcccctgcaaacttagaagcagtcagactggtcagcg

SEQ ID NO: 94804 - DNA, 356 bp, Zea mays
  unsure (1)..(356): unsure at all n locations
  Clone ID: MRT4577_186453C.1
atttcaaccaatcctgttccgcctccacccatttcgtttcagttccattcatcctcctccggtcctctccccaattaagaccagccgcgaccgccgccgccgacgactccccctccggcacccgaaatggcgtgatccctgcccccgattcccctcgccccccgccgttcaaataccacccgtccaccgcgacccctccctccccatcccccaatcgcggagatcccggngcccccgaaccgtaanccaagccacaccaccaccccgcgtgaaggcctccatcaagacccgcgacgacgaccggccgctgctgcgcgccaaggtgcccatcgccgcgatcgggctgccgatcctct

SEQ ID NO: 94805 - DNA, 290 bp, Zea mays
  Clone ID: MRT4577_186454C.1
cccatattagcgaggggaagggacacagatggtagcaggaagggaaacgggggtgcaaaacatgtccagagtgagcatgaacctggggacccagaggcacgcgccatccacattaattgggggcatacacaagcggcaaccatccatgagcaagcaggggaggaaaaacccctgactgggtcttgaacatgtgacggatcaggtcggcgagacggatgctgtagggccactgggtgtcgaaccacgagacgagcttgacaaagtggacgttcagagcgagcccggcctgg

SEQ ID NO: 94806 - DNA, 741 bp, Zea mays
  Clone ID: MRT4577_186455C.1
ggccgcttttttttttttttttttaggctttaaatttagattttctgtttgataactacttaatataatctcttctgcgttgacccaatacaacatccgacatgaccacatgattcaaattccttgtgtaactaccggggatatcactgtgaaggcaatataaccatcaacttgatacactgcttcacccatatacaagcaaatagcttcatgcccaatcatctttctccaacaaatccgcagcactgtcgatggccttggtaacgatgccaatccaacgtttagtagccgcctcgtcaccctctccaatagcttctactataccaggaaaggtcgcgcccgagtagccagtccacttgcccggtgcaaagaccacatgcttgaaccagcttcgtccatcaagtccttcaggaaacaagaacttgcgctccaagtatttgtacttattgttgactgcgcgaatggcaacaaagagttggaacttcttccagggttgccaccaggggatatggtcgatgagggagtactgaagttcgagatcggcagctttttcgtcgtgagctgcagaggcttcgagaaaatgggataccgcgtcatcaagcggttgccagctttcgaacgatagcgtatctggagcagccacctgtgctgtacgtttggcggcttggacgtacttgctcaggccgagcgcgtagtctgtagcattgagctgaaggacgggcgagtcaacgagcttggccg

SEQ ID NO: 94807 - DNA, 538 bp, Zea mays
  Clone ID: MRT4577_186456C.1
ttttatttttttattttttttatttttttatttttcttttttatttttttctttttagtttttttgcctgggtttttcgccggggaattctcggcaagcgggacccagggagggggcccacagggggtccttaaaaggggagccggaaagaaagcgcggcgggaaagggagggggcgagagggggaaggccgggggcgaaatggcaagggcgaaaaaaattccccacaacaaaccaacaggaaaaaaaaaggggaaaccaaggggggacaaaagagggagcaaaaggaaagaaataggggacagcaaaagggccgggaaacaggcgggaaaaccggcgagaaagcaggatcaaagaaccggcaaaagggcgggaaaaaagggggggcaaaaggggccccagggggggcctccttggcggcaaagagacgggcaacagggaagggcccttcacgagagggcccaaaaaaaggggcaaaaaagggtccccccaggggggccccacccggcgaaaaagcgggtaaaagggggttaaaggag

SEQ ID NO: 94808 - DNA, 366 bp, Zea mays
  Clone ID: MRT4577_186457C.1
tcatgagggaggggatctcatcctctctgctcagccggcatccagggtcgaagcgggtcgtggcatctctactggctcgagcatggcattcatcgcaatcggcaaaggccccgcgacaagaccagtcgatttcgacatgatgctttacacaccttcttcagagagactggagcatggcaaacaccacctcgcgctgaatatggtgaccttcaaccagctgtcatcctaggacggagagggctggaacctaccggcagctcttccaccctgagtcaccttatcagcgtggaggaggatcgagccaacaacttcagccgaggtcactacaccactgacctcagatagggacctgtgccttgatcacat

SEQ ID NO: 94809 - DNA, 422 bp, Zea mays
  Clone ID: MRT4577_186458C.1
ccagtcgggcagtcggcctctgcgtccgaccgcccatccggtcatccctcattaaccctcgccctccgcttccatctccgcttcctagatccgacgccgccaccgttggtcttcaggccagtagccggtcttggaagggctcgtgagctacttcatcaacattcgctatgcccacattctaccagatctttcgagctgcacggggcagcaggtgtatctaaggcttgttcttgttcatggttgccataaaaggctcgtgtcctgtatatgcttcgagtgggaaagagaaacctaagattatcagtgatgtaagcagttctgcttttcccgtggattatttctttccttctccgattctaagctattgtagtgcagtaactgtttcttttacctaatccggatcatacttgatactttccacg

SEQ ID NO: 94810 - DNA, 590 bp, Zea mays
  Clone ID: MRT4577_186459C.1
cggggcggtaaaaggccggcagaagggaggcacttgagaaatgtctttcctccaggacccaagtttcttcaccatggggatgtggtccattggtgcaggagccctgggggctgctgccttggcattgctgcttgccaacacagacgtgtttctgtccaagccccagaaagcggccctggagtacctggaggatatagacctgaaaacactggagaaggaaccaaggactttcaaagcaaaggagctatgggaaaaaaatggagctgtgattatggccgtgcggaggccaggctgtttcctctgtcgagaggaagctgcggatctgtcctccctgaaaagcatgttggaccagctgggcgtccccctctatgcagtggtaaaggagcacatcaggactgaagtgaaggatttccagccttatttcaaaggagaaatcttcctggatgaaaagaaaaagttctatggtccacaaaggcggaagatgatgtttatgggatttatccgtctgggagtgtggtacaacttcttccgagcctggaacggaggcttctctggaaacctggaaggagaaggcttcatccttgggggag

SEQ ID NO: 94811 - DNA, 2298 bp, Zea mays
  Clone ID: MRT4577_18645C.1
ggccgctcgcgatctataactagcaccatgttctcgccaaggtgctgggccacctcgaggccggcggggccgggacgacttctacgcctccaccacgaggcacgcaacaattagaacacatctcgccgccgccgaggacgacggcgatgatgtggcgttcgcgagctcgtgcgctgctcctactccgctcgaccattacccggccaccgccaccacctccacaaccatatcccactcgaaccctaacccgagtcccacctccccgcttcctgtcctcctccccggatcccatccccgatgcctcctcttccgccgccgcggatcccttccctgaagccttctcctccccgaccaaggcttctcaagatgccgctgaggccggagaggacaacctgagctcgatgtgggaggaagctggcgacgccgacgacatctttgcctcccccggcagcgccgacgccgtagccgacgatgaggaggtcgcccgcatctgcgccgccgtggagtccacccccgaggacgagatcgcctccaccctcgctgacatgaccgtggacttcaacgagccactcctagccgcagtcctccttgctgctgatcaatgctcctgtaagaagctgatttccctgttcaactatgccgcgaagaataaccccgcttccaagagcctctcgaatcttgaggttctcgtgagcaagctagctgattctgctgagatagacaaggcagacgcttacttgctttgggattcgattaaggaaataggctctgtgccaggatcagtgagtacaccgttgttgaatgaaatgattgccatattttggaagcttgagaagtcgaaagcagcgttggaggtgttctccaagttcgatgagtttggttgcactccggacagtgacagctattatcttgtgattgaagcagcacgaaagaagtccttgttccgctctgcttgtgaagtctgtgagaagatgattggctctgcctgcttccctaatggtgagaaggttggcaggattttgatttacctttgtgaggggaagaaggtgaagatggcacactcattataccttgcagtgaaggaaaaaaagattccagtcccaaaactagccttggatttccttgttggtgctttggcaaggaatgatgagaccattggtactgctctggagctgctggaagagtaccaaggggagtcgcttaagcatgcaggcaagtcctttgccacagttgtacatgctttgtgtaggctaaacaaaatggaggatgcaaataatttgttgatgaggatggtgcagcttgaagagtacaaaggggaatctcttaagaatgcaggcaagacatttgccacagttatacatggtttgtgtaggaaaaagaaattggaggatgcaaaagcattgttgatgagaatggtaaatgttgggccagctcctggtaatgcagtgtttaattttgtcatcacagcattgtcaaaacagggagaaatggaggatgcaaaaggtttgatgagaatgatggagagccaagggatcagccctgatatctatacttacagtgtgctcatgagtggctacgcgaaaggaggcatgattgatgaagcccatgatctacttcgtgaagctaagaaaattcatccgaagctaaacagggttgcttatcacatacttatccgtggatactgcaagatggaggacttcgagaaggccaatgagtgcctaaaggagatgaagaaagatgggttgcagccaaatgtggatgagtatgacaaactgattcagtcattgtgtctcaaggctatggactggagaagagctgagaaactcctggaggaaatggaggatagtggtttatgcctaaggggtataagtcgcagcctcataactgcagttaaggagttggaaggggaggaaatgcagtcaaaggcgagccaagaagcatagtttctctaggatactcgaatccatatgtctgctaattaacttttggatagaacctttctttttgagcttttcagctctggtgagcttgcaagaaacatcatctttgtacctgtttttgtttgttgttatttactacaataattttgcatttatatttaaatgctagactgacaaagaagaatatttagttttggtctggacttctggagcttctgtttaggatttccatgcgccattctacatgtcgataatttattttcatgtcttatttaagaacacgaatgaattttggctgccagtggaattcaagttacgaaaatattctttcaaaaaaaaaaaaaaaaaagcggccctg

SEQ ID NO: 94812 - DNA, 135 bp, Zea mays
  Clone ID: MRT4577_186460C.1
gataattttttttttcttcatagcacaccgagggggtcttttgaatcaagcaccggtttaacaccaaaggctaaaaacatacaaggatacccaaggatgggataggtgaataacgtaagagaagcacactcacaa

SEQ ID NO: 94813 - DNA, 160 bp, Zea mays
  Clone ID: MRT4577_186461C.1
caagagctactcacgacagcacgcagtaactgtctgcgaagcggtgcactagatgataccccgtcgagtactcgtcggcaagaccggaggtgatccgcgcatagtgagcgtcacatgccactggtgacggatcatccatatacaaggacgtgacatgcct

SEQ ID NO: 94814 - DNA, 347 bp, Zea mays
  Clone ID: MRT4577_186462C.1
tccctagagtatgtcgtgttacgtcctcgtcgccgcctcggcggccaccgtggcgctcgccgcggaggctccggctccgggccccaccagcggctcctccgccgtcgcgcccgccgtcggcgccgccctcggggccgctgtcgcctcgttcttcaacgactacattcactgagcctcgtcgcggccggtcgctcggaggccgtgcgcgctacgaaacgggatatagagtctcatcgctgcacgcattccgatacgtgggcagctcttcgattcgagacatcttgtgtccgcattggcggattcagcccggtatccctcagtaacctccatcatgcatggcttgtcat

SEQ ID NO: 94815 - DNA, 380 bp, Zea mays
  Clone ID: MRT4577_186463C.1
aatggaatgcataaataaccagcggtatggccatagaaattagcatgcgtacaggcccgatgggggggggggggggggggggactgactttcttagaacatcggtatatatacttgctcagaaactagaaaaaactcttaatacactacatacataagatttatgcgttggttccatcctgggcagataaataccaagtcacttttattttctataaggctaagattgattcctttgccgttagaaaaggggaaccttgatttattacccttgcgcatagctaacacatttgccataccggaggtatactgtcagaacagggagggttttacgaaagtagtgcaaaaaatgaccttgcgtttttaaatttaaaagaaaaa

SEQ ID NO: 94816 - DNA, 519 bp, Zea mays
  Clone ID: MRT4577_186464C.1
accgcaggccaagctttatcttttctttctcttttctttgtttcttttctctttcttttgtcactatttattttgtctttctttcttctttgctttctctgtttttcatactctaaaaaatccgggcaaacctctctccctactatgggcggccccaatcctcttccaaaaaccttctttttacactgacaccctgctgccaatttaaaagaagggcccccccccattcaggcagctggctacaggctactgggattaacaacacctggtggccaaaagcccacaattgcggactgaaccccaggggttatgggcaaccccaaaacttactaccataaaagccacctcgctgcctcaagccagaacgacttctggacacagcaacaggcgctgccaatgtaccaaaaatttgcggctaaccacaaaaccctgtgacaactacgaccattggtgccctttgaacaacttgctttgacaaacccagcagcctcctaccaacaacacatgattagaggtgcc

SEQ ID NO: 94817 - DNA, 507 bp, Zea mays
  unsure (1)..(507): unsure at all n locations
  Clone ID: MRT4577_186465C.1
actgttcttgggtttggtgagtcgttttcccccttttttcttttttttttttttttttttttttttttttttataaaggaggaaaaaaaaaaacccccttggatggaaaaggaaggatcccaaaaccaaacaaagttttaccctcggggaaaaaaaaccttttttttttcagggatgtagggaaccaaaaaaaccaaccccccttttttttttttaaaaaagactnccaaaaaaagggcgggaaataaaaaaaaaccccaagggagggctgggagggcaacccaccggcttttttaaggaggggcaaccccgggttccccttctttttctttacctgggggataaaaggaatttccttaatccaaagttattacttccccaaccgggttggggggaacaaaaaacaacggctccttggggaccggggaaatcacaccctaaaagggctctgtttgaacccaattactaatttacctacgcgtgtatggaaaaaaatatttttttttt

SEQ ID NO: 94818 - DNA, 790 bp, Zea mays
  unsure (1)..(790): unsure at all n locations
  Clone ID: MRT4577_186466C.1
cttcttctcccgactccgcctccgcctccgccctaaccccagggaaggggaaaggaggtgccctaacagcctccggaggcggaggcaagcggcgcgtcacctaccgcccctcgccggcgagcaggataagatgaatcccacagctcatgatcagacaacacagcaacaaaaaccaaatggccgaagagcagttggtagctcgcaaacctggacacggtatggtgttctgctaccaagccagcagacacggaagctaaaagaatggattctaactgatgaacaacaacaagtagtcaatgctagtggtcttggacatcttgctcttacgacaggatttaccattgaccgttccttgcttacagccttctgtgagagatggaacaacgaaacaaatactgcacatttcatgggatttgaaatggcaccgtctctccgtgacgtatcatatattctaggaatcccagtgactggtcatgtggtgacggcagaacccatcggtgatgaagctgtgaatcgcatgtgcttgcattacttaggagagagccctggaagcggagagcaactatgtggattgatcagattaacctggttgtacaggaaattccatcaactgccagaaaaccccaccatcaatgacattgcattcagcacccgagcgtaccttctatatttggttggcttcaccttatttcccgacacaatgagggnngattgtatccccaagatacctaccacttttgnngggatttcaggaagatacatgagtatgcctgggggggctgcagcccct

SEQ ID NO: 94819 - DNA, 364 bp, Zea mays
  Clone ID: MRT4577_186467C.1
cccacgcgtccgcccacgcgtccgcccacgcgtccgaattctgatgctctccaactggcaaggcttgctgatcctgatgggtctcgtacaattggtgttatcaccaagttagatatcatggacaggggcactgatgctcgtaacttcttgctgggaaatgtgattccactcaagtttggttatgtaggtgttgtcaatcgcagccaagaggatatcaacttcaatcgaagtgtcaaagacgcgctagcttttgaggaaaagtacttcttgactctacctgcttaccatggtcttgcacattgttgtggtgttcctcaattggctaaaaagctaaatatgattctactaaagcatgtcacaaata

SEQ ID NO: 94820 - DNA, 343 bp, Zea mays
  Clone ID: MRT4577_186468C.1
tttttgggttttaaactataaaaaaaaacacttttaattaagaacacggcacatcctgtagaccagtacttcacgctaacatgctgggagctgcaattaatattgggtttcaagaaatctgaacggattaacataaagcaggcacgacggggtccatgataccatacataattgacattcagggtgcttaccagaaataaaaaaaattacggccccggactaagatgagacgcggagcgaaagaaaatacatctagtagcagcggagggaaggacatggaagatggggaacccaacctaccgttgtaatcaaggaggtacaaaacaagggcattgagcggatt

SEQ ID NO: 94821 - DNA, 633 bp, Zea mays
  Clone ID: MRT4577_186469C.1
tgatggtaagcccatgaagatagagatagttgggaccaatactccaactgcatctgctgctcttccagtctccaatggtggccatgctaggaatgctgtgaggagtgcaccgaggggtgctgccccagcaggtatgccgcagcgaagacctcatcagaggggtgggaggcgtagtggtggatctgggggtggtcgtcgtggcaaggagcgcagcaagccaaagtcagctgaagaactcgacgctgacttggagaagtatcatgctgatgcgatgcagaccaactaaatgtgttcaaaaatttgatattcaacatcaaatatcaagcacattagtccttccattccagctgtttgtgctactatgttcaggggacaacaaaccttatgtttgtgggggtattgctttactgaattttgtgggttttgtttacaatagaactagagttggatgatgctgagtacttccatggaaattacttgcttgcctttagtttctgtacctaatgccgaggagacaagaatcatccaagttactcgacatgtgaaagttgatgatgtatgaaggtacccacatttcctttgaccccccaccgtataatatatcttggaggtgaaagagactgggcttcaaat

SEQ ID NO: 94822 - DNA, 2541 bp, Zea mays
  Clone ID: MRT4577_18646C.1
atgaagctgaagaagaaggagttcctttcccttactcaagggaatatgactgtcagtgagtaccgtgatcgcttcactcagctctcacgctacgcaccagaagaggtggatacagatgagaaacatcaagagcatttcttggaaggactgattggacctctgaattatcagctgcagagtcataccttccccaacttccagactctgttgaacaaggcaattggccttgaaagtaaaataagggaactgtctgaccacaaaaggatgttccaaggtcagtccagcaggaacacccgcccgaacaacgctcaaggttctcagttccgctctagaaatcagggtggaaataattatcaagtgcaacgctctggacaacaaggccagagaaataatcaaagtcagaaccagcagagaaacaactcccagaccaaccagaggtctggtgggagttcacagaatcgtcaaggtggcgccgtgaacacgcaggccagaagcaacaacgcaccagtccaacccaatggatgtttcaagtgcgttttatttgactctggagcatcacattcatttataaccgagtcatttgtggagaaacataacataccaaagtacccccttaagaagatgttacacattagttcatcaggaggtgacatgaaggccacacactcatgcctccgtgttaatctcaagattcaaggaatagattttccagtcaacctagtggtcttaggatccaacgtgatacaatgtgccaacggaacaattatgttgacaagtcctcaaggtgaaagagtccaagttagcacagacatgtcaacaaatgcaaaagggaagacagtgataaatcacttggaagaaaagctcctggaaaatatcaagatagtgtgtgagtacccagacgtatttccggaggaattaccagatttattcgatcggatgaagggagctaagatagtctcgaagatagatctaaggttgggatatcatcagttaaagattcgagcagaagatgtacccaagatagccttcacgacgagatatggattatatgagtttttggtcatgtcgttcggacttactaatgcaccggcatactttatgaacttgatgaataaagcattcatggaatatctggatcagtttgtggttgtattcattgacgacatactgatatattctcttaatgaagaagcacatgaagatcatctaaggctagtcctacaaaagcttcgtgacaaccaattgaagttgcttttcttaggacacattgttactgatggtggaattaaagtggatccaggaaagataagtgaaatactaaactggaagcaaccaaaggatgtgtccaagatcagaagttttcttggaccggcaggatactacaaaagatttattgaaggtttttccaagttagtgaaacctcttacctctctactagagaaaggtaaagagttcaagtgggatgaagcatgtcagaattgttttgaagaactcaagaaaagattaaccactacaccaatactggtaatgccagacattcacaagggatttgatgtgtattgcgacgcatcacaccttggacttggatgtgtgctaatgcaagaaggaaaggtaatagcttatgcctcaagacagttgagaaagcatgagaagaattatcctacgcatgatttggaactagctgccgtagtgcatgccttgaagatttggaggcactatatgattggaaacaagtgcaaaatcttcacggatcacaaaatcttgaaatatatattcactcagaaagaactcaacctcaaacagagaagatggcttgagttgatcaaagactatgatttggaaatacaatatcacccaggaaaagcaaatgtagtggctgatgctttgagccgtaagggtcaagtgaacaacatcactactcatttgatgtcacataaattgtgctgggaaatggaacaactcaaccttggtatgctcaataatgtagaagcaacggttatggaagttgaatctacgttggaacaagagattcgtaaaggacaggaatctgatgagaaaatcaaggaaattaaaactttgattggtttgggtaaagccccagatttcacggaagatgatcaaggcacaatatggtttaaaaagagaatctgtgtaccggaaatcgaacaccttcgccaacttattttgagagaagctcatgattcggcttactctattcaccctggaagtacaaagatgtaccaggatttgaaggaaaagtattggtggtacggtttgaaaagagatgttgctactcatgttgcattgtgtgacgtgtgtcagcgagttaaggccgaacaccaaagaccagcaggattactacaacctctcaaggtaccggaatggaaatgggaagaaatcggtatggattttatagttggcttaccccgtactcgagatgactatgattcaacatgggtcatagtagactggttgactaaagtggcacactttatacctgtgaagacaacttactcaggagcccagttagcagagttatag

SEQ ID NO: 94823 - DNA, 1987 bp, Zea mays
  unsure (1)..(1987): unsure at all n locations
  Clone ID: MRT4577_186470C.1
ttgggtacctcgaggccggccgggagtggtcagcggtcagcgcgcgctctcgctacgcgttctccacttctccccacgcctttcccagccaaaagaaatatccaattcctcaccctaccccctcgctgctttctcctccccgtcgacctcgccaatctccctcccgctaaccctagtccagcacccgagatctactccgcgcaaacagccatggcggagacgctcgacatgaccctcgacgacatcatcaagaacaacaagaagagtaacccctcgtctcgcggggcccgccgcagccgcggcgtatccgcccctggcggcgggaccggcggggtcgggccgaccaggcgcccctttaaaagggctgggaacaggcaggcgccctaccagccgccgaaggcccccgacgctgcgtggcagcacgacatgtaccctgcggtcgccgcaggaggcggcggcggcggcgggagggtctcggctctcgagacgggcgccaagctctacatctccaacctggactttggggtttcgaacgaggatattaaggagcttttctctgagctaggtgatttgaagcgtttttcgataaattatgatcgaagtgggaggtctaagggaacagctgaagttgtatttgcaaggcgttctgatgctgtagcggcggttaagaaatatgacaatgtccaacttgatggtaagcccatgaagatagagatagttggtaccaatactccagctgcagcagctgctcatccagtccctaatggtggtcatgctaggaatgctgcgaggagtgcaccaaaggatgctgctccagcaggtatgtcgcagcatagaccccatcagaggggcgggaggcgtgctgctggatctggtggtggtcgtcgtggcaaagagcgcagcaagccgaagtcgactgaagaactcgatgctgatttggagaagtatcatgctgatgcgatgcagaccaactaaatacattcacaaatttgatattcgacatcaaatatcaagtgcattagtccttccattacagctgtttgtgctaccatgttcaggggacaacaaacattttctttgtgttggggggggggggtatcgctttactgagttttgtggattttatgtgtttacaatagaactagagttgggtgatgctgaatacttttatggaaattacttggttgcaagttgctcgacatgtgaaagttggttatgtatgaaggtactcagatgttccctggtgacctagttgtgtgcttccattctggtgttgctcagacttttctctgctgtaggcctgttcaagctctagccatctaagtaggaggtgtctgttgcatattgtgaaacattgtgatgtttattttgggcatcttaagctatcttctctggcacattaatgatttcatgagcttcaaggtgcctttcttttacaagttgattccttgcttgcataatcctcacttccggtgtccacgaagtccgagttaactgacttggctgccactagtccgattgaagcatcatggtgcaaatcctccttcaagatctgctattgatagcttagagatagctgcactattgatgcctctacttcattttggactactataggccctctttgcgtatttatgctatataaacatatgggggcatcctctacaatggttgatcttgtctactgtgctttggagttcctttcaacttcgcttggatcctttgatgacaaatggaatcatgtgcctctgcccagaaaatcagtttctaactgaaactctctcttttgcttgctttcatacttatgtcaatggcgatgcctgatgtggagcttgttttgtcatcaaccttggctgtgcgaatcataagtggtggtggtttatatcatcatggtttcacaatcttgggattcttggccaccatgntgacattgatatagtatatcacattangaactcacagcttggtatgtccttcccgtacatct

SEQ ID NO: 94824 - DNA, 1294 bp, Zea mays
  Clone ID: MRT4577_186471C.1
ttgggtacctcgaggccggccgggagtggcagtgcccgtccgcgtcccgctctcgtgggccgtcgcggtgtcccgacctagccattcttttgcccgcgagccccggtgcaaaaagatctccaattccccaccccaaagagctaccctgaccagatttggccgcttcctcctctgcctcccgctaaccctagtccagccccccgagatctgctccgcgcgagcagccatggcggagacgctcgacatgaccctcgatgacatcatcaagaacaacaagaagagtaacccctcctccggcggggcccgccgcagccgcggcggatccgcccctggcggcggcagcggcggggtcgggccgaccaggcgctccttcaagagggctgggaacaggcaggcgccctaccagccgccgaaggcccctgacgctgcgtggcagcacgacatgtaccctgcggtcgccgcaggaggcggcggcggcgggagggtctcggcgctcgagacgggcaccaagctctacatctccaacctggactttggggtttcgaacgacgatatcaaggagctgttctctgagctaggtgatctgaagcgtttttcgataatatatgatcgaagtgggaggtctaagggaacagctgaagttgtatttgcaaggcgttctgatgctgtagcggcggtgaagaaatataacaatgtccaacttgatggtaagcccatgaagatagagatagttgggaccaatactccaactgcatctgctgctcttccagtctccaatggtggccatgctaggaatgctgtgaggagtgcaccgaggggtgctgccccagcaggtatgccgcagcgaagacctcatcagaggggtgggaggcgtagtggtggatctgggggtggtcgtcgtggcaaggagcgcagcaagccaaagtcggctgaagaactcgacgctgacttggagaagtatcatgctgatgcgatgcagaccaactaaatgtgttcacaaatttgatattcgacatcaaatatcaagcgcattagtccttccattacagctgtttgtgctaccatgttcaggggacaacaaaccttatgtttgtggggcgggggtattgctttactgagttttgtggattttatgtgtttacaatagaactagagttgggtgatgctgaatacttttatggaaattacttggttgcaagttgctcgacatgtgaaagttgatgatgtatgaaggtacccacatttccttggtgaccaaaaactcgagcccggaaaaaaaaagtcgacgcggccg

SEQ ID NO: 94825 - DNA, 1433 bp, Zea mays
  Clone ID: MRT4577_186472C.1
cctcgaggccggccgggagctcctcctaaatggggaacgcgcagcgcaggcgtcgtcgtcgtcctccgcggatcccgcgcgcctcctccgccgatagtccttgtggcgaacacgcgaaggcaaagcaacaccgcaaatctctccccctccctggattggattgattgagctgctcgcgtccacctccgctcgaattgccattcccccctctctcttggtttctcttggatcgaattgttagtttattagagtgaagttgtcgggggagggaggctaggcgttaggtgggcgcctgcgtgctacgcctcgggagaaggtcaaaagaaaccgccccaccaccaacccaggcgactccccctcaacccaacccaacccaacctgccattgctcttctttccctccccgtcgccagctggccagagccgccccgcccggagcccaaaggcgccgcctttcctgaaccccgtccgcggcagattgatcgattggttgttcggttccttggtcgggaatcagaggaggcagcaagagaagagatgtgcccgctgcgggtgatcctcatcttcctctccgccaccgttgccggcttcttcctcatcaggggcctcaacgctgagcccgaccagttcgacgccgacgccgacgactcgggatcccccagggcacccctgccccttcattccaaggtaaccccaacccaaccgacgcccctcgccctttcctttccccctccggctccctccccctattcttagcagcttctccctggctagtaacagttacttgagatcaatcctgaaagtttatttatttatttttgtacgcaaatccaggttggatcggccgtgaaagcagggttctggacgatggtggacatggcgagcgggcggtacctctggcgcaccctcgctgcccaagcccagccttccaagtcggcgcggtgaaagtgaaagtgaaaccatctcgtcctgccgatgcagtggagactggtacagtcagtcatgttgttgtaatgctgttacgtattggtatatattcaagtaaatttgcaaaaacaaaaactattcttgtgctgagctgagccttgtgttgtgtgtaaagctggaagtggttgctgtcctgcaagtgtatactttgggcatgagatttgggtccaagtttcgtcgtgctgtgcaagggcaagaaggggacggacctggtcgtgtgcaaggagtcctgcgctctctcccagcagtccaacctggtgctgtacggcaggatccagtgcaagggcaagtgcaccgagcagaagggcatcacggcgccggccatgaaggtctgccaggaggagtgcgacaaggcgtacgtggtgaaggcggccgaggcaccaaggcctgcagggtcacctgcgccaagtagaagaacccgcgcctcagcgagaactgcaggaagcc

SEQ ID NO: 94826 - DNA, 389 bp, Zea mays
  Clone ID: MRT4577_186473C.1
aattcggcacgaggagcatacatggtccttgcgttgctcttctccttgcccgcggtggggttgagccctcccaacacacactactatatcactggcgcgagcgaccggctgtgaccgccctgctccgccggggctgcaccgatcacccagggcttcaatacaggaacgacgcggggccggggtgtcagcctagcagggacgggccatgtgcggtcaacagggcctggatggctgacgcgggcaggcaccatgtaggcatcgtggcagagcgctggtagcggcctccgcggcagagcgacgctgcacccgggcagcctcgctgacaccgcagtgaccgagctcatttcagatgcgacacagacctgcgctcacagtggctctgactctca

SEQ ID NO: 94827 - DNA, 588 bp, Zea mays
  Clone ID: MRT4577_186474C.1
ggacgttatcaccggccacggggagacgatgacgtgctccaaagagcgcaacgctgacctgttcgacgccgtcctgggcgggctgggccagttcggcgtgatcacccgcgcccggatcgtggttgagcctgcgccggcgagggcgcggtgggtgcggctcgtctacaccgacttcgccgcgttcgccgccgaccaggagcggctcatcgccggcccgcggcagcccgacggcacgttcggcccgatgagctacgtcgaggggtcggtgttcgtgaaccagagcctcgccaccgacctcactaacacggggttcttctccgacgccgacgtcgccaggatcgtcgcgctcgccgcggagaggaacgccaccaccgtatacagcatcgaggccaccatcaactacgacaacgccacgtcggtggaccaggagctcaagtctgtgctggacacgctaagcttcgtggaagggttcgcgttccagcgcgacgtgagctacgagcagttcctggaccgggtgcgcaacgaggaggtggcgctggacaagctggggctatggcgagtgccgcacccgtggctcaacatgttcgt

SEQ ID NO: 94828 - DNA, 333 bp, Zea mays
  Clone ID: MRT4577_186475C.1
ggaccaaaaaaaaaaaacctcattggaaagtggaaaaaaacaagggaaaacccatgggttcaccattaagggggcaaaagggggcccccccccaaaaaacattgtaacccggatggaacaggggaccccacaagaaaaatccctcaaaggccaaaaggggggaaggaaaaatttggccccgggtccaaacccccgggatttcgggcccctaaccccggaaaaggggggggaaaagccctggccatccttcccaaggccggccccggggaaaaaccccattttcaccatatttttggagccaaaaccctgggggggtttctaaaaggaaccaac

SEQ ID NO: 94829 - DNA, 497 bp, Zea mays
  Clone ID: MRT4577_186476C.1
ttgttttctccagagggtgggagttattggaatctccaactcccacgcggacggggctaagctggatgacgggtcttacactgatggggcacttgatccactgggtgccgatgagcgacctgaccttgatcctgttgaggatcacatgctgattacatgcctaacacctgctaacattagtgcattgtctgccttacgcgctgccatgatcaccttgacttgacctgcatatgctgtactgggtggtgaatcttctgatggtcacagagagaacaccgctcctgggcttgcagcgcctatcaccagtatgcgcgccgcacatgcagcgtttgatagctctggccacattgataacagaatatgttatacatgtcacatgcaagaagatgcttgactgtactataaaggactaaggctcatcaatgtgcagttagctctgaaggcaaatgagctagatggcatggcatacgagttggcccgcaacgagctggtactgc

SEQ ID NO: 94830 - DNA, 838 bp, Zea mays
  Clone ID: MRT4577_186477C.1
caggccggccgggacatttttcgcggatctgaaaccggcaacgagcgcgccatggatggttgcagagctgtccttactggagacatgcaatggcacgaggcgacgatgagtaacagcagctgcgactctgatcatcttcaccgcgagaggggagagcaaggcttgatgagctcgcagcttcagcagcagctggaacagatctacatgctgatggacatggagctagagcatgagctgcacctgcaccacaacgtgccaccgcagggctgtagccagcggcagctgtcgtcgccgttcctgcctttcgccgtcagctccgatgtgacctcgtcgcccgtgctcacgtcgtcgagcaccacaaccttttgtcaacagccagccgaggcctcaccctcacccctggacacgccattttccccactcccctacagctactctgacacgatcccggacctggaagagatcatgagccgaccacggcacaaggacggccacgcggagtccagcatcagtgcattcaggcagtgcgtccggcacctccgccccaagaagaagctaaagcagggcggctgcgggcagagggcgatcaagacggccatgtcggtcttggcgagaatgcacagctcaaggctttcccagtggcagagacagatctcctcgacggagatggcggcggcagtgccgtccgacgagagcaaaaacgtccagcttctgcacgtccggtcggagcgcaagcgccgtgagaagattaacgacagcttcgaggctctcaagaatgcgttgcccccttcctgctcgcagcgagataaacatccatactgatgaggggcagggacta

SEQ ID NO: 94831 - DNA, 301 bp, Zea mays
  Clone ID: MRT4577_186478C.1
ttatgaaccttggtgttccaactacggtcttcactatcacaggagtgaccatgggtgcatttgttggctcaaaacatgatcgctgcaactacatcaacttgtgctaggaaacctcgatgcctactctgatgaacagcggcatcttccattcagcgaactggctgcatcgaaatctggtgcttatttgctacaagaactaccatgcagtcacctatgtgatggctactggaagaaatgtcttccattaaaacaactgagacctttgaactctgatggctatttaccacatcttgagatacta

SEQ ID NO: 94832 - DNA, 439 bp, Zea mays
  unsure (1)..(439): unsure at all n locations
  Clone ID: MRT4577_186479C.1
ggggggggggggggttttttttatttttttttgtgtggtttttttttttttttttttttttttttttgggggaacctaacccaaagtttattttcaaggaagagcccaggaatgctcatttccgaacaattcaatgtctttttacaagcaagggggggggggcgggggctctttttttttttcnttnaagacacatcactgaacaaggaaacaacccaaaacagactgggctttttccattcaccggttggcagggcaaccgtttcaagcagatgggttttttgggggagcgaccttttggacaaacgggctttccattggaccaggccaccaggccttcacatgcggttgggggtcgagcacaaatgccgtaggcgtttcgaacatgccgtgagtgtcatacacatggtttaggtgggtgaggcctggggaagtttcc

SEQ ID NO: 94833 - DNA, 432 bp, Zea mays
  Clone ID: MRT4577_18647C.1
attgggacctcgagccggccgggaacagctttaagcgacgatacttgacctttccccggcccacgggaacttgatcgtcgtcacctgccctaggtcgaacgagggagcggtcaccggcccgccgtcccgcttccgttagcatcaccgccggcctctggctggcggccctctccgctgcggatgtgatgctactttttgagtcagggcacctgctggaccagctactttcaggacaccttcggcggcactatactcgatcctgatggcagacacgtggataaagttccacgtggtgaagctcaccacgagcctctagatatgtatatgcacctagatgttgccacagacgcttatcgtatgcctcgctccgagagacttaacatggaaatagcgcctactctgaattttccaggcacccctgacactgacata

SEQ ID NO: 94834 - DNA, 330 bp, Zea mays
  Clone ID: MRT4577_186480C.1
attcaaccaactagctgcattgaagaaactgttgttgctacaacttgagctccacgtagggagggggctatttgcttacttccaagacgtattggcatcatgctgccgtgctacaactttatgacgtccagaatgtgatctgttatgacaagctgtacgattacatcatagatctgtcggtctcattcttactgtccgtacattatcgccctaacagagtttgtatcttcactctaatcatatctcagacaccctacatctgctgatactatataatctaatcactctttcctctacttgaatcataacttgatatctatatatattcca

SEQ ID NO: 94835 - DNA, 167 bp, Zea mays
  Clone ID: MRT4577_186481C.1
gttcttttcgtaccaatgcatatcgcggggagctttacaaacagagggtacaggccaataataccttgatttttaaagtacacacctctgttattcacctgatacactatctcgatcatcttcatattacatctgactatcatttgcgagaatgcacactcttacca

SEQ ID NO: 94836 - DNA, 656 bp, Zea mays
  Clone ID: MRT4577_186482C.1
gcactcaccgcttcctctcgtcgctcgccctcggccatggtcgtatctccttgtcccagcactggtgtctacgcgacgtcaccatggcgtcgtcgtcgaccctgctcggactccaccacgccaagttgcgtgggacacgctccctatcccagcgctgccccttcccctgctcggctctctactgtcgagctcctccggctgtgctcccctgctcagcgcattcctccctgctctctccctcatctggccatggatgcttgggagcagcagtagccctagctcggcaacaccaataggctccctggaaccagcgccccagcccccatcctccctcaagtctggttgtcccagctcgtcctggtggccgccaagtccggccgttatcctccactccaagccgcgctcaggtctccggctcccatgcgcttgccccctgtgcacgagtcgccgcgccgtgggagctgctcttgccgccgtggagctctgttctctttagagtttccgtcgttccatcccgccggtggctagtgccagctcaccctgtcgtcgacctcgttggcgctcgcgtccctgcttctctcattgccggtgctcgacgtaatggcggaattagaatcgtagttgtgggtcgtcgccttcgagtcggattaaattac

SEQ ID NO: 94837 - DNA, 481 bp, Zea mays
  Clone ID: MRT4577_186483C.1
cgttgtctctcacgcgacagagcataccaagacagcggctgggggcgcccactcaaagcctggtattcttgacgctgcctggcacacatccggcaagaaaattagacgaggcatagctcgagaacctaaggcttaccactgggctagaaacttctcatccatggtatggatgccaatccacactcccaaccaggagctcgaggccgatcaagtgccagaccaactcttgagtcacgtacctaccctgaggatgatgatgcgcaacattctgctggtgctgctgcgacccccctatcttgctggtgatgacaactggaccgacacagaccgtcctgatccaggcgctcacgcttgtctactcctgcctggtaacgcagtcgtgacacatgactaccgagcctccaaacggggacctagctcaggacctccagcacctgcttcccaaactggtgaacctgctgggtgcaaagaatccttatgc

SEQ ID NO: 94838 - DNA, 740 bp, Zea mays
  unsure (1)..(740): unsure at all n locations
  Clone ID: MRT4577_186484C.1
ctgccacaaagagacatcagttagcttcataaataaataaaaaatgcagctttagggcgccctggagtgatttttagaggtatttaaagaataacaagtaatcataatgccaaattagccctactacgaccaacatctcctttctctacgaaactggaatacacgcatgaaccagctaattttatggcactactgtaacaataaacaaggtggcaacagatcgcaacaccagcaaccagcatccaaccacagaagggttctgctaagtcagcttgacatcatgtatctgctcaaatgaaatcctatttcctgaacagaactgacataaacccttgaagcgtgacaacagcgaatgtttgatgaggattgattctcaacaaaactgaactaaaaatgatttcatatctacatatcagggatgacccaaatggtgctctggatcccctgtgataaccagacgtccagcaggatctgattgaacatgcaccaacatcatgcgaggtcagaatttgcaatgcatatgtacccattgtaaaatgcatttaaagctgccgctctctgcataactgttttctttgctgtgcgtctgaatgtgccnnnnnctagagctttaagaatagatctcacagaaagtgtgnnnnncacatcctttaacggagcacgaaggccactggcacnnnnnccggggtatctgaaagatgatatcaatgcagcaaacttatccattgattttctgcatt

SEQ ID NO: 94839 - DNA, 2064 bp, Zea mays
  Clone ID: MRT4577_186485C.1
gagctcggatcgcggccggccgggccgggctgcccactgctcagtccactgcccagcacggatctcatctcaccagctgcccgcgcatccaattcctctcgctggacggctgcagcacatcatcaggtgagaccgtgagagggaatgggatcaacaacaatgtcccctccatcttttcccgtcgtcctcctgctcctcctcctcgccaccatagccgcagccgccggaagcaacatggatgaggaggtggtggacgacctccagtatcttattgacaactccgacgacatccccaccaacgatcccgacgggtggcctgagggagactacgacgacgacgaccttctcttccaagatcaggaccaggacctcacaggccaccagccggagatcgacgagacccacgtcgtggtcctcgccgccgcaaacttttcctccttcctcgcctccagccaccatgttatggttgagttctacgcaccttggtgtggccactgccaggagctcgccccggattacgccgccgccgccgcgcatctcgccgctcaccaccaccaggcccacctcgcccttgccaaggtcgacgccaccgaggaaaccgacctcgcccagaagtacgacgtccagggcttccccaccatcctcttcttcatcgatggcgtccccagaggctataacggagccaggaccaaggaagccatcgtcgactggatcaacaagaagctcggcccagccgtgcaaaatgtcaccagcgtcgacgaggcccagagcatactcaccggagatgacaaagccgtccttgccttcctcgacacactatccggtgctcacagtgatgagcttgctgctgcttcgaggctggaagatagcatcaacttttatcagacttcgactcctgatgttgctaagcttttccatatcgatgcagcagcgaagcgtccatccgtagtgctgctgaagaaagaggaggagaagttgaccttctatgatggggagtttaaagcatcagccattgctggttttgtgtctgctaacaagcttcctttggtgaccacactaactcaagaaacttccccttctatttttggcaatccaatcaagaagcagattttactatttgctgttgcaagcgagtccaccaaatttctgcccatctttaaggaagcagcaaaaccatttaagggaaagttattatttgtctttgtggaacgagacagtgaggaagttggtgaaccagttgccgactactttggtattactggacaagagaccacagttcttgcttacactggtaatgaagatgctaggaaattttttcttgatggtgaggtgtcacttgaagctataaaggacttcgctgaaggtttcttggaagacaagcttacaccattctacaaatcggaaccagtgcctgaatctaatgatggggatgtgaaaattgttgttgggaagaatctggatctaatagttttggatgaaacaaaagatgtacttcttgagatatatgcaccatggtgtggtcattgtcaatcgctggaacctacttacaacaatctagccaagcatctacgtagtgttgactcccttgtggtagccaaaatggatggtactaccaatgagcatccacgtgcaaagtctgacggatacccgacgattctcttctatccagctgggaagaaaagctttgagccaatcacttttgagggggagcggacagtggtagatctgtacaagttcatcaagaaacatgctagcatccctttcaagttgaagcgccaggagtcgagaaccgagagcactcgggcggagggtgtgaagagctctggtacgaactcaaaggacgaactgtaaagagctcagggttggatgtgtgttggagtggatcagggtgaaagtttccatctcaatacaagtagatcgatcttggtggatgcgagtgcagtgttggcctgagggaggagcagcagagatgagtgcttactgcttagagagaggaatgaaatcagcaactaatcaaataaaatcaaattccattattcctttaaaaaaaaaaaaaaaaaaaaa

SEQ ID NO: 94840 - DNA, 800 bp, Zea mays
  Clone ID: MRT4577_186486C.1
ccttgatggcgaggtgtcacttgaagccattaaggacttcgcggaaggtttcttggaagacaaacttacatcattctacaagtctgaaccagtacctgaatctaatgatggggatgtcaaaattgttgttggaaagaatctggatgtaatagttttggatgaatcaaaagatgtacttctggagatatatgcaccgtggtgtgggcattgtcaatcactggagcctacttacaacaaactagccaagcatctaagtggagttgactcccttgtgatagccaaaatggatggtactaccaatgagcatccacgcgcaaagtctgacggatacccaacaattctcttctatccagctgggaagaaaagctttgagcctgtcacttttgagggggagcggacagtggtagatatgtacaggttcatcaagaaacatgctagcatccctttcaagttgaagcgccaggagtcaagaagggagagcatccagacggatggtgtcaaggacgaactgtagggcaggccatgcattgatagatagctgagttttgaattttggttttataaaattaggtccgccaccgaatttcgcgttttcagcttaaacatcacctaaatctgtttctttactatattaaagcaccagttttaacggtagtcccgcgtcaatatttttcaaaagacctcttacatttttttagaatcaacctcactcttataatttcttttatactactataatatgagagttatgtaaaaaataagttaaaattatgtataataaagtgtttgaatcttggttg

SEQ ID NO: 94841 - DNA, 173 bp, Zea mays
  Clone ID: MRT4577_186487C.1
tgccgcaggacctgcaggctgcccgcgccctcgtcatcatcagcatcatcgtggctgctctgggcgtgctgctgtccgtggtggggggcaagtgtaccaactgcctggaggatgaaagcgccaaggccaagaccatgatcgtggcgggcgtggtgttcctgttggccggcctt

SEQ ID NO: 94842 - DNA, 746 bp, Zea mays
  unsure (1)..(746): unsure at all n locations
  Clone ID: MRT4577_186488C.1
gtacccccgggttctgccgggctaacatcttaagactttgtgtgtgggaaccatgagttcaacactagagtagcattcacttgtttcattacaacaaactatctgttttttttaaccttttcaattcaggcacatcttaacttttcttttttgtccgtatgattttttacgggatcgattcaataaaccagagctgccagtggtaactagctggcaatgtagattccctgcttttgtttgttaatttgttttcactacacaattggtagctgtggtgtatcacagaagaattgcttagcacttgtgcaattgtttttttatatttggtttggatcactattctgaagccaggggaagaaatcataagtttgtgagcttactgtggtatgccattgttgataggaaatattgcccatgatagtaataatactgttcttggcttcttgcaataaactagttaccaagacanntgggtgttgaggatttaccattttttctcctggtttatagttgtacttaccaaggcatagggtgttgaggatttaccaattcttctctggctttatttccatttgctacgaanacatagggtgttaggatttaccagattttcttgaatttaagctgatttgaaagttgaaaccaggtatccggttttttttggtaaacactgatccagcattcttttttagaatttcttagttttggtattatatcgtaaacaagtttgaaattctgcatatttg

SEQ ID NO: 94843 - DNA, 515 bp, Zea mays
  Clone ID: MRT4577_186489C.1
tcgccctcgcgtccgaaaaataaattaaaaaaaaataattaaaaaaaaaaaaaaaaaattaaaatttaaaaaaaaagaaaaataaaatgtaaggttgatgatttaatatcggggggccctctcttaggtttcctggctgccgtcccttagttggctcttatgacctgtccttcttgggtccccttctggcatttccttgggcgcccttatgcccgcgtgcggtcggggattcccctgccgtcccccggtttatccccgggttggcccctcccctttgccccctgggatctttccccttgctgcccttgcgcttgggcctcttcttgcttttggccctcctgttcggccttgggccgcccccctcctgggggttctatccccctgtggtttggtcttttccgcccggggtcccctttttttttttattttccctcccgcccggtcttttggccctctccgtcttttctttggcgatttcccgggttttcctcctccggggctttcgggggcccccc

SEQ ID NO: 94844 - DNA, 4128 bp, Zea mays
  Clone ID: MRT4577_18648C.1
atggatcttggcacacatatgctatgcgctcggttctacccctggaaccgggttaacaccagctacgcccctccgcctcggcaaatccctatctacccagtggtagtcgaggaagttctggtggatctccctcacattcgagtggagaatgtagtcatcctgaaggacagctcggaggaacaactgccgacgcccaccccgttggcagagtcactagccttcgtagctaggtcatcgacatcggcactgcctacactagcagtccaagctcctgcacccggaggcgatgacccagaagactcaggggatgacgatgacgaggatgacgatgacaacgaaggagaatacaaacaagtcaacaaagaagccaactatgcccagcaggactacttcatggggtttggtcctatcaccgaacattacacatcaatgttcgagatggggcacttccccaacctgctgcaagaagtgctgcacgcgctaggaacctacgtccgccccctgtatgaaacaaggcgagtgagcgagcctccccgggctttctactacatcactcgcatccacgtcagggtgatggatgcaggggataggggattcaggactctatctgctcacgagtccctgacaccactatccacctacgctgcctcggtcagcgatgctgccagacggactttggggtctctcagccacacataccggcagcagctgcaggacacgaggttcaggcatcttcctctgcgtctgagtggaggaagccagaccagcatcgttccaggtggagctggtgaggagcgcctcaacaccctagctggtgtggtggccggcctcaacaccgacctagacagtgccaccctggatctctctagggtgcacttggagctggaggatgcccatgccaggattgtcctggaagcccagcttcaaggacgggatctgcctgaagcccagatggtgaacgcttgccaaggacccaacaacaacaggaaccaacgtggtcaacagataccaccaccaccaccgaaccccaacatggaacagttcatcgccgcccagatgcagtttctacaaggactcactgcaactgttcaacagattcagcagaaccagctgaatcaacagcatcagcagcaacaacagaatgcacccgcggctagagacaaacaccgggattttatgagtcatcaccccccaatgttctcccatgcggttgatcctttggatgccaatgactggctcaaggtcattggaaagaagttggatattacccagtgcaacgaccgggagaaggtcttgtacgcctcaggaagactcgagggagccgcgttcgattggaattatgaagctaaagaagaaggagttcctttcccttactcaagggaatatgactgtcagcaattagccttgaaagcaaaagaagggaactgtctaaccacaaaaggaagttccaaggtcagtccagcacgaacacccgaccgaacaatgctcaaggttcgcagttccgctctagaaatcaggatggaaataattatcaagcgcagctctggacaacaaggccagaggagaaatcaaagccagaaccagcagaggaacaactcccagaccaaccagaggtctggtgggagttcacagaatcgtcaaggtggcgccgtaaacacgcaggccaaaagcaacaatgcaccagtccaacccaatggctatttcaagtgcgttttatttgactctggagcatcacattcatttataactgagccatttgtggaaaaacataacataccaaagtaccctcttaagaagatgttacacattagttcaccaggaggtgacatgaaggacacacacttatgcctccatgttaatctcaagattcaaggaatatatttttcagtcaacctagtggtcctaggatccaacggtattgatgtgattcttggatgcgactggttgaaaagttgtgatggagtgatacaatgtgccaacagaacaattatgttgacaagtcctcaagatgaaagaatccaagttagcatagacaagtcaacagatgcaaaatggaagacagtggtgaatcatttggaagaaaagcccctggaaaatatcaaggtagtgtgtgaatacccagacgtatttccggaagaattaccagatttatttgatcagatgaagggagctaaaatattctcgaagatagatctaagatcgggatatcatcagttaaaaattcgagcagaagatgtacccaagacagtcttcacgacgagatatggattatatgaatttttggtcatgtcgttcggactgactaatgcaccagcatactttatgaatttgatgaataaagtattcatggaatatctggatcagtttgtggtcgtattcattgacgacatactgatatattctctgaatgaagaaacacacgaagatcatctaaagctagtcctacaaaagcttcgtgacaaccaactatatgcgaagttctcgaagtgtgatttttggttgaaggaagttgcttccttagggcatatcgttaccgatggtggaattaaagtggacccaggaaagataatgaaacctcttacctcactactggagaaaggtaaagagttcaagtgggatgatgcatgccagaatcgttttgaagaactcaagaaaagattaaccactgcaccaatattggtaatgccagacatccacaagggatttgatgtgtattgcgatgcatcacaccttggacttggatgtgtgctaatgcaagaaggaaaagaattatgctgggaaatggaacaactcaaccttggtatgctcaataatgtagaagctacggttatggaagttgaatctactttggaagaagagattcgtaaaggacaagagtccgatgagaaaatcaaggaaattaaaactttgattgggttgggtaaagccccagatttcacggaagatgaacaaggcacattatggtttaagaagagaatatgtgtacccgaaatcgaacaccttcaccaacttattttgagagaagctcatgattcagcttactctattcaccctggaagtacaaagatgtaccaggatctaaaggaaaaatattggtggtacggtttgaaaagagatgttgctactcatgttgcattatgtgacgtgtgtcagcgagttaaagccgaacaccaaagaccagcaggattgctacaacctctcaaggtaccggaatggaaatgggaagaaatcggtatggatttcatagttggactaccccgtactcggggtggttatgattcaatatgggtcatagtagacatgttgactaaagtggcacactttatacctatgaagacaacttactcaggagcccagttagcagagttaaacatgtcgaggattgtttgtctgcatggagtaccgaagaagatcgtatcagatcgaggaacccagtttacctcgcgcttttggaaaagacttcatgagtccatggataccaagctaaactttagttcagcttaccatccacaaacagatgggcaaacggaaaggacaaaccaagtgttggaagatatgaccggagaaagtcaagtatttggtccagaaattcttcaagaagcggaaaagcaagtgcagattatcagagaaaatttgaagacaacgcagtcaagacagaaaagctatgctgataatagaagaagagagctgatgtttgaagtaggagactttgtctaccttaaagtttcaccgatgagaggaatgaaaaggtttaaggttaaaggaaaactatctcctcgctatattggcccattcatgattttggaaagaaaaggtgaagtagcctaccagttagagctacccgatagtttatcagacgtgcatgccgtatttcacgtgtcacaactcaagaagtgcttgagagtaccagaggaacagttacccatggaagaactgaaagtcaataaggatttgacttattcggagtaccctatcagaattctggaaacatctcgcgggattacacggagtaaagttatcaacatgtgcaaagttcagtggagtcatcatttggaagatgaggccacttgggaaagagaagatgaactgagagcagaattcccccagttattctcgaaagtttcttaa

SEQ ID NO: 94845 - DNA, 358 bp, Zea mays
  Clone ID: MRT4577_186490C.1
ccggccgggtggttgttctgcgtacgggggaaatgtcagtacggtggtggtgtcgtactcgtctgctagtcggaagcaggcatcatcatccatctcgtcgctcgtcgcttgtgtgtggaagtgactgtaaatactaccactgatgacatggctctcgtggtttcttcgtctgaaactaaagaaacggaatcacatacgtacttgtgtgtgcgtcgtcgcctggagtcctgactcctgagtggtgacataaccatgcactagttgaactgcaagagagctagtactcgtatgctctgtgtattgaaacgcaagtgatttgactggagattgaacgctgaaatgcaagtgatttcggtgg

SEQ ID NO: 94846 - DNA, 331 bp, Zea mays
  Clone ID: MRT4577_186491C.1
tcgagcggccgcccgggcaggtcaagcttttttttttttttttttttttttttttttctttattggaaaatttttttatgaccattcttattttattggtggaacaacacatgagaaggagagacgtattacggcgtgggtagaccaatagagagagaggggggggagagaggagattgccctaaatgaatgaaacagaaaaagctaggacgggaacgcgctaagggggaaggaggcagatattaatgagacaggggggcgcactagcagggggccaaagggggcaaatggtgctatagcgggcagagttagaatggatggggcggggctt

SEQ ID NO: 94847 - DNA, 1121 bp, Zea mays
  Clone ID: MRT4577_186492C.1
ggggggccatgggtacctcgagccggccgggaggaaactcagcgctccggcgcttagagaagagcgaaaggcgagcgcgcagcacagcacggctcccgtgggccgtggcggaggcaaaaaccccgacccgcattaccccgaaaccctccgattcggcccggggcgagctcgaatccgtgcaacctcgccgccgccgggctcgatctgagccagggctaccgcgcgccggcgaggaatgaggagcgtgaacggcgaggtcgaggggacccacgaccacgaagctaatcggcgtggtcagctgatcgaatggatgaacgccttactcccggaattcagtttgcctccggattcatcggatgaagagctacgagagctgctcagtgacggcgtggtcctgtgccgtgttgcgaacacactcatcccgggggttcttgagggatcctgggacggttatgcaccgtcggatcaacggttgggcaatgtgaagaaattcctctcagtgattgctgatatggggctgccaggtttcagtgtgaaagatcttgatgagggatcaatgtctcctgtagtggaatgtctcttggttttgagagacagtgtggatcctagattaggtgacgatattccaccagatgttaccagaactcctttgagaaaacaatggggagttccagaaatggacaagcctcaagttcctggtgcagcactagggaaaagatcccctgcagaggacagagaaatggcgttgcagatcccaaagcccatcagataacttctgtcttttctggacaaagtttttgatggttccattatcagttgtcacatattctggatgctgctgcacaaattagttggtatgcacgccagcactctggattgtcacccttttgaagctcagctattattgcatgcatgctctgtttgatgcagtaggtcttagtagggtgcccagcgttgtcagtcttgtttccagtcggctatggactgtcgagtataagttcgcaatgtgcatcgatatgtgagtcctttctctttaacgtgatgaatgtgttcttggcatccttgcgatgggcaagctatgtttgccctgcaaaaaaaatgtaaagatctggttccacagt

SEQ ID NO: 94848 - DNA, 700 bp, Zea mays
  Clone ID: MRT4577_186493C.1
cattgggtacctcgaggccggccgggacaccatccttcggccaggacaccgactagctgcggtgatagtgaaacgggtcatcaccctgacgctttcatgcggtaccctccttgatgtccgacgcaatcgcttgagagatgcccgagcagcccgaggattcaccgcctgctcgcctttgatgtcgtcctcttcgctgcgtccctcgcaagtcgctatatagtcctcagtcgcgaatctcaacttgacgcccctctcaaccctcgtgggatcaggtttatctcgaccatggtcaagctcacctatgcctcgggcctcgctcaggcctcaatggtcctcgccccattagccatcgcctacctcgtctccgcgcccaacacacgtcggattcggatcgctctctggctggtagccctcgtttcgtggattgcagcgttgaagacggcagattggggatatctgggtaacctgcgagtgccatccgacggaaccccgctggtcctcggctttgcgacgttttgggccttctccaagtcggctccgagcaatcaccccctccctcggacaccgccctacccccgtctacgacaatcgcgcttgttcaaagccatcgacttgttctggaacagccgtcgacacgtcaatatcgctcccttctctacccgacctctcccagggtcaaccaggcgatacccttggctct

SEQ ID NO: 94849 - DNA, 839 bp, Zea mays
  Clone ID: MRT4577_186494C.1
attgggtacctcgaggccggccggctctcataccaggctttccttcagctgcttttgcatatttgtttttgtagcaagcagcagcagtaaagatggcgtcccaaacccccgccgttgtcatggacaacggtacgggatactcgaagctcggcttcgccggcaacgactctccctccttcgtctttcccaccgcgatagctaccaagggcccaactggcggtaccggcggatctggctctggacgcccagctgtcgcgaacaagccctcattcctgaccggtggagctggtcctggtggacatctttctggaaagcgaggcaccgaagacctggacttcttcattggtgatgaagctctggccgcagcaggaggcgcgggctatggcatcaactacccaattagacacggccagatagacaactgggatctcatggagcgtttctggtccaattcgatattcaagtacctgcgagtggagccggaagaccaccacttcctgctcactgaaccaccattgaaccccccagagaaccgcgaagccaccgccgagatcatgttcgagtccttcaacgtcgccggtctctacattgccgtgcaagctgtgcttgcattggccgcgtcatggacaagctccaaggtgcaggacagatccctcacgggtaccgtcatcgactccggagctggtgttacacacgttatcccagttgcctgaggttacgtcattggctcctcaatcaagagtgtccccattgccggtcgagacattaccaactttgtccaatcgctcctccgagaacgtggcgagcctgactcgtcccttcagaccgctgaacgcatc

SEQ ID NO: 94850 - DNA, 456 bp, Zea mays
  Clone ID: MRT4577_186495C.1
gccagccctatacggtgcgcgagatcctcgccagccccgcgttcggcgaccgccccgtcaaggacgcggcgcgccacctgctcttccaccgcgccatgggcttcgcgccctccggagacgcgcactggcgcgggctccgccgcctcgccgccaaccacctgttcggcccgcgccgcgtggcgggtgccgcgcaccaccgcgcctccatcggcgaggccatggtcgccgacgtcgccgctgccatggcgcgccacggcgaggtccctctcaagcgcgtgctgcatgtcgcatctctcaaccacgtcatggccaccgtgtttggcaagcgctacgacatgggcagccgagagggcgcccttctggacgagatggtggccgagggctacgacctcctgggcacgttcaactgggctgaccacctgccattgctcaagcatcttgacccccagggcgtgc

SEQ ID NO: 94851 - DNA, 453 bp, Zea mays
  Clone ID: MRT4577_186496C.1
ggacaacaaggccggccccgaatatttatcgcccgctaatttttaaaccaaaaccccccaattaaaaaagaaacgggccgggtttttaggggacaaaaagggaaacaggggtttttaaaaagatttagaaaaaaaacaaagttggcagtcttggttaggggcaaaaacttggtgactttttaagggaagaggggcttcgggcccccaaacccaaagcccagttttgggcacaaaattttgctgacccgagggggcaaaaacagccccggggggtttccaaccccaacattggcggggggagaataaacccccctccagaaaaacatttttcccaaggggtgaaaaaaaaggtggggaaccgcagttaccggagtcccccaaaagcccaaaacgggccccgcttaaattttgacctttggacccaacaaaaattttggggatttgggcgaaaaa

SEQ ID NO: 94852 - DNA, 390 bp, Zea mays
  Clone ID: MRT4577_186497C.1
accaattgaaaattttatttgcatttattttcctcatgtttggtttgctattataattaatgaatctgagatcttttgccttttgtgctttcctgaactgtgaattagactaagagctgtagaagtttattggtcacttctgtatcctttgcagttcagatctttgttcttgtttgttgtttcacaataagtgctgcaaacattaatcagattatatcttagtcacttctttttatttttacatatgtctaagagattagccatgtctgattgacggaaccaagatctagttgttgtgcagatgactttcttcactttagtatggcaatacggtgtcttactagcgaaattggttatttgaatgccatattattttgataccatcttctt

SEQ ID NO: 94853 - DNA, 325 bp, Zea mays
  Clone ID: MRT4577_186498C.1
cgatcgacaccatgagggtgttgctcgttgcggtcactgtgctggctttcgctgttagcgccacctacacgcatacaagcggcggatgcggctgccagccaccggcgccggttcatataccgccgccggtgcatttgccaccttcggttcacctgccacctacggtgcatctcccaccgccggtccacctggcgccggcggtgcacctgacaccgacggtccatgtgccgacgacggttcatctgccggcgccaccatgccactaccctactcaaccggcccggcctcagactcattcccaagcacacccatgcccgtgccaaca

SEQ ID NO: 94854 - DNA, 399 bp, Zea mays
  Clone ID: MRT4577_186499C.1
cggacgcgtggcttggtacaacgtcttcctcttcctgtcaataatagagggagagtgaggcacccagtgggagacaaggggaaatggggaaggtatgtcaagggaccgtattcccttgagtttgattccacagtggtaacaaaaatgcctatctccgtggacagacgaacaatctcaatacccaactattcaatcctacatggtacaagatgtcattcaagcaagcatattacgggcattagtatgaaccctgcaacaaccatatgctctattgtaacatacatccttagtgcatttttatcttcaaagaattggtgcacaacaactaccacaccagttgctatcaaccatctattaagtatcttgcagcgaaccttgtttgtttacctcagcaaacaa

SEQ ID NO: 94855 - DNA, 405 bp, Zea mays
  Clone ID: MRT4577_18649C.1
gtgcctgcgtggccgcgtctgtacctgtacggccaccaccatttccatctccgattcccgcgacccgccacccagccccaggcgcccgggctagatccggctcacgcgtctacccgtcccctccggctccccttctccctaatcgccgtcgccgggggtgcaggcacagcggctgcttccgctcccgctcccgaggggggaggcggcaggcaatggcgcggcgggtgcggccgtcgcacctggtgctggcgctggcggcggcctacctcctcctcatctccctcaagttccgccgcgtgctggacctggccgccaccgacctcgcggacgaccctgccgccgtcggcgccttctcctctccgtgctccggcgaccacctgcccccggccgggtccggtttcggca

SEQ ID NO: 94856 - DNA, 130 bp, Zea mays
  unsure (1)..(130): unsure at all n locations
  Clone ID: MRT4577_186500C.1
gcgggaanacgcgttcccacaacagaaaagcggaggcgggggcaccgaagcggcctgccaggcaagctagagccccgaaccaggcgacgcgaagaagagcaaaccacgcgcaccgagccgcacgccggaa

SEQ ID NO: 94857 - DNA, 329 bp, Zea mays
  Clone ID: MRT4577_186501C.1
ctcaattcggcggttccaaaactaggagctcaacattgcattatcaaatatctcataatctatacaactataactctcacattctaacttcatcaaattattctaataaattaataatctctaaataattcttaaaaatacaaattgctaattaattcattttcaatttacaaaaatttaaattcaaaaaaatgtgtcttaattatatcatatacaactactacacattcattcaagccattattccattttcttacaaaatattatatacaaattgatcaacccctatcttacaaatttcttccaaaatacaacacacctttttatac

SEQ ID NO: 94858 - DNA, 341 bp, Zea mays
  Clone ID: MRT4577_186502C.1
tacgggtgtgagaagactacttattcggttttcaaaacagacaccaatagagcaaaaggggttatctgacacaagcgtcatgtccacctatgcattttataaatcatcattctctgatccatctactctcaaacatatcactgagttctcacccaggacctactactcctggatatgacacactaacactccactaaccgtctatagtgcacctcagagcattggatatcgccctgaccgtgccaagtacttcgatgaatactctgagcataatgaatcatacctgaccggtgaattacatggtgactacggatggaacactcatgaactatcacctgacc

SEQ ID NO: 94859 - DNA, 842 bp, Zea mays
  unsure (1)..(842): unsure at all n locations
  Clone ID: MRT4577_186503C.1
aattcggcacgaggcgcacccgcaaaatttcccaaaccccgcacacaattgccggaaccctagctccactccatcctcccagcccgcaccaatgacggaccaacaaacccaggatctcgtcaaggagctcgtccaccgcctcctctccgccgccgaatccggcgggcgcggcggcgggcgcgacacgggcggtgcgctgcggttcgcgcaccgaatcctctccagccgcctcgcccccgcggtcctccccgatgagcacgcgctcgcggagtccatcaagcgccgcctcgccgcctcgggccgccccgatgatgcgctctcattcgctgacctccactccaagctctccgtccgtgcccgcccagcgtcgctgtggccgctcctctacctgctcgactctctctcctcgcagtaccgcgccgccgccgcggcttcgtgcctcccaaaccttcccatcgccgccctaccgcagaatgccacctcggggacggcgccgggcgccggtgtcaggccgggttcgcggacgcacggggcgccgccgggcggcctggtgctggtctccaaggatccggacacatccgcgagatcggctgcgtgagtacaccgactggtgatcgacagagggagtgtcggagccgngctgtgcgggagtgctnnnnnnnnnnnnnnnnnnnnnnnnnnnnnnnnnnnnnnnnnnnnnnnnnnnnnnnnnnnnnnnnnnnnnnnnnnnnnnnnnnnnnnnnnnnnnnnnnnnnnnnnnnnnnnnnnnnnnnnnnnnnnnnnnnnnnnnnnnnnnnnnnnnnnnnnnnnnnnnnnnnnnnnnnnnnnnnnnnnnnnnnnnn

SEQ ID NO: 94860 - DNA, 697 bp, Zea mays
  Clone ID: MRT4577_186504C.1
tttttttttttttttttggtcggcgtagaagcccataaaattcgaattgagcacgcagtcgtcagcttattccacgaacaacaaggctcagcagccaagccgtaatctcagctacttgccaaggggagggaacaaagctcatggccttaaccctaaatgataataaccctaactcctcagacggttgtgctagtctattaaagtacgatagtgcaatatcgaatatatcccgctcaagccagtatttcacaagatagcaatcattaaactccaaagcccagtgttacaacagtttatgaacagcctcctccacctccaccatctgcgccgccgcctccgccgccgccatcaccgtggcctcctccatgatgacctcctccgctgtaatcggcccaagctcctgctaaatcaccggcagctgaggcgtagtgacggccgtgtttacgcgacttcttgccgccgttatagtatccgtagtcgttgtagccgtatttctttgagtagcccatggctggttgtggatggtaatcgtagacccgatcatgtttcttctttctgaagagtggtatacacattttgggttgtgtgtatttgaggtggtgttttgtgtcgatgagcgaattgtttgctaatgctgaagcactgaagtagatgagaagttcgtttcgtttggcagtgcaagctgtgaatgcagttg

SEQ ID NO: 94861 - DNA, 154 bp, Zea mays
  Clone ID: MRT4577_186505C.1
aatattgagcttgtgagagaataaataactgctgagatcatctttgtgcttctcagagagatggaaaaatctagtcttcaccagtctttcatgctttctgctataagctcaactacttatcaattaactgctctgacctatttgtttatcatgt

SEQ ID NO: 94862 - DNA, 500 bp, Zea mays
  unsure (1)..(500): unsure at all n locations
  Clone ID: MRT4577_186506C.1
ctcgagnngccggccgggaaaaaaaaaaaaaaaaaaaaaaaaaaaaaaaaaaaaaaaaaaaaaaaaaaaaaaaaaaaaaaaaaaaaaaaaattggcgggcagaggcgggcagaggcgagaagcaagaaaaaaaacgaggggagcaaggaaatcgaggcaagaaagcaagggcagaggcgcaaagcctgcaatctgctgtcccccgtcgccgccgttgcctcgccgttgcaatcgaggcaagaaagttagggagtgctggcgttgggcaagtcgctctgggcctttggggaaacgggggctggaggggcggcaagataatggaggccggcggcccggaagcggggggaagggacaagagggtgccgcagtggggcgtgcaggaaacacgggagctgatcgtggcccgcagggagatggagcggaaggccgtcncggcgcgccgcaacgccaagacgatgtgggaggccgtcgcggcgcggctccgggagcgaggctaccga

SEQ ID NO: 94863 - DNA, 1071 bp, Zea mays
  unsure (1)..(1071): unsure at all n locations
  Clone ID: MRT4577_186507C.1
atnnnnngggctgtttgaattcggacgaggcaagtccacaatgtttcatgtctgagaacagtatggtcgtatggatgacccaggcaacgtcactcgatggttctggacagagtaggaatgaggagcagaggcaccatatgatgcaagcgcccaacaaacaatctgaatgttgtagctagatgtgtatcttgctgaaacggtcatgttgatatttgggatgggtctctacggtctcttcgtcagcaacgcttccgcggatgttcgttctgaatccgaccgtgccctgagcggaccgtcgttgttcggggtgttcgctttgnnnnnnnnnnnnnnnnnnnnnnnnnacgcgggagcggtaggcgagccgtggaggaggatatggaggtnnnnnnnnnnnnnnnnnnnnnnntcgtggactctgatgtggagggtttcattgttttgatgagtttacattacaggttgcttttcttaaatcaagaaaaggttttgtcaagatagctatacagtctggatgtcctttagtcccagttttctgctttgggcaggtaacaatcaatcaaccatgctctaacaaggcattgtccattccttaaatttaggttccaaaagaactannnnnnnnnnnnnnnnnnnnnnnnnnnnnnnnnnnnnnttattagcgcatgtctacatattctattgtttggttaacaatgcagatttggtgtccttgggtgcaggcatccttgttagctgaagtatcatgttgttttgtttaaaagatcatcacnnnnncatctatgtagtacatataaagtgaaatatagttgcaacagatcagtttgaaattcatcctagatgtcaaggaagcaaaatagacaagcaggcaatctgacactattcatcatgtgacagtgannnnnnnnnnnnnnnnnnnnnnnnnngcataaaagatgaattctaaactgaattgttatggctacacataacttatgtgatgacnnnnngaaatattgtaacatgttattttagctaaagaggactatcgcacccctggatgccaaaacattggtttaatcgtaaatttga

SEQ ID NO: 94864 - DNA, 1693 bp, Zea mays
  Clone ID: MRT4577_186508C.1
aaagaggaagtcacgaaccagcaatgcatatcattttgccatcaacacaagagcagtacagcagaccatcgttgtgtggggtccagaacagaccggccaatctagcgttacgagactagggtagaaagttatctgccggacgagggatgaatgttaaacttctgtccattgctgacagagaaaccaattatctctcaagcatattagcattggtctgtagacctacttggcagtatgatacttacaaccacaattaaacataaaattagctttgcgctactaaacaactgaaaaaaagagccctatgaacctagtacagatgctgaaagaaattgaacaatcacatgtcataatgtcaacaaatgtaggagctacaaagaattgataaaataaggtgagaaaatgtccacttctgcagctaaaccctgatgaaacgaaaagcaagcttatcctgctatagatcttcctgcaggagtttgttcaacagagtggtcaggagtgcatcccttttttcagctcgtgcttcttctctcatccttcttcgctcctcccgttccatccacgagtgttccagcaacaaccgctcctgctccagcctctgcattgtcagccgccattgttgttcaaaaaccacccgctcctgggcgcgtctctcgatcatctcccgccaccggacatcaatgtgctgttgctgcaccaggaaatcctgcagcagttcatggatgctcgaaattcctgttcttgacttctcagacattctttgatgttgctgtttcttgtcatcagctttcctctttctgttgtgcatcggcttctcatcgtcactttcttcaccatcatcgtccttgtcgtcagactccccagatgaccggtcaccaccaggtcgcttcagtttcgttttgacagaaactccagattcagactcaaggagttgttgctgcatatttctagcacgctctgtgaagacaccatgcagctcatcaaagaagggacactgcctaccattttctggatcagaagtttctttccccttgtagcggttgacgaggttcttccacttgcacttgcactgctcggcggttcgtcggtagcctcgctcccggaggcgcgccgcgacggcctcccacatcgtcttggcgctgcggcgcgccgcgacggtctcccgctccatctccccgcgcgccatgattagctcccgcgtctcctgcacgccccactgcggtaccctctcgtcccttccccccgctcccgcgccgaccaccaggcaaagatgaacccactatgtgtccaaacaataaacaatcggccagtctctgtaagtaggaactgggttttcttgagcataaacgtagatacattataatgccaagcttgaagccggcctccatcatctcgccgcccctccagcccccgtctccccagaggcccagagcgacttgcccaacgccagcactccctaactttcttgcctcgattgcaacggcgaggcagcggcggcgacgggggacagcagattgcaggctctgcgcctctgcccttgctttcttgcctcgatttccttgctcccctcgtttttcttcttgcttctcgccgctgcctgcctctgcctgccattacttttctgcccattcacacagctcggtctcagagaaaggggcctgccgcattcacactagctcccggcacggccggc

SEQ ID NO: 94865 - DNA, 261 bp, Zea mays
  unsure (1)..(261): unsure at all n locations
  Clone ID: MRT4577_186509C.1
ccccgcgtccgcccacgcgtccngaaaaaaaaaaaaaaaaaaaaaaaaaaaaaaaaaaaaaaaaaaaaaaaaaaaaaaaaaaaaaaaaaaaaaaaaaaaaaaaaaaaaaaaaaaaaaaaaaaaaaaaaaaagggggggccgccttataaagaaaccaactttccgtcccctttgcatccgaagggaactggtttttacttttggggtcccccaaacttaaatttccctgggccgggcattttacatttcgccggattggga

SEQ ID NO: 94866 - DNA, 2257 bp, Zea mays
  Clone ID: MRT4577_18650C.1
atggagcagttcatcgccgcccagatgcagattctgcaaggaatcactgcggctattcaacaaattcagcagaaccagcagaatcaacaacatcagcaacaacagcagtacgcacccccggccagagataagcaccgggacttcatgagtcatcactcgccgacattttctcatgcggttgatcctctggatgccgatgactggctcaaggtcattggaaagaagctggacatcactcagtgcaacgaccgagaaaaggtcttgtatgcctcgggaagactcgagggagctgcgtccgattggtgggatgccttcacagtggcacaccccaacgtggatactataacttggcaagaatttcaggagaacttccgcgctcaccatattccctcgggaattatgaagctgaagaagaaagagttcctttcccttactcaagggagtatgtctgtcagcgagtatcgtgatcgcttcactcagctttcacgctatgcccctgaagaagtggacacggatgagaagcgccaacagcgtttcctggaaggactaattggacctctgaactatcaacttcagagtcacacttttcccaacttccagacactattgaacaaggcaattggccttgaaagcaaaaggaaggaattatccgaccacaaaagaaagttccaaggtcagtccagcaggaacacctggcctaacaacgctcaaggttcgcagttccgctctggaaatcaaggcggaaacaattatcaagtacaacgctctggacagcaaggccagggaaataatcagaatcagaaccatcaaaggagcaactccaagaccaaccagaggtctggtgggagttcacaaaaccgtcaaggtggcgccagtaccacgcaggccagaaacaacgcacatgtacaacccaatggatgtttcaagtgcggtgagctaggccactatgctaacaactgcccaaggcgcaaccagcagaaaccccagaaaagcaataatcagaggaatgaccagaacacccccgctcgtggatctgctcagaacaagactcctcagaaccagagcagaggaagggtcaatcacgtcactgcagaatcagtgcctggggatgccgacatagtgtatggtatgtttcttgttaactccatacctgcatcggttttatttgactctggagcatcgcattcgtttataactgagtcatttgtggaaaaacacatcatacctaagtaccctcttaagaagatattacatattagttcaccgggaggtgacatgaaggccacacactcatgcccccatgttaatatcaagattcaaggaatagatttttcagtcaacccagtggtcctaggatccaacggtattgatgtgattcttggatgcaactggttgaaaagttgtgatggagtgatacagtgtgccaatggaacaattatgttgacaagtcctcaaggtgaaagaatccaagtcaacatagacaagtcaacagatgcaaaagggaaaatagtgatcaatcacttggaagaaaagcccttggaaaatatcaaagtagtgtgcgaatacccagacgtatttctggaggaattaccagtgctatttgtgaacaagaaggatggttcgaggagaatgtgcgttcattatagaagtttgaatgaagtaaccatcaagaataaatacccactacctcggattgaagatttattcgatcagatgaagggagctaagatattctcgaagatagatctgagatcgggatatcatcagttaaagattcgggcagaagatgtacccaagacagccttcacgacaagatatggattatatgagtttttggtcatgtcgtttggactgactaatgcaccagcatactttatgaacttgatgaataaagtattcatggaatatctggatcagtttgtggtcgtattcattgatgacatactgatatattctccgaatgaagaaacacacgaagatcatctaaggctagtcctacaaaaacttcgtaacaaccagctatatgcgaagttctcgaagtgtgaattttggcttaaggaagttgctttcttagggcatatcgttaccgatggtggaattaaagtggagccaggaaagataagtgagatactggattggaagcaaccaaaggatgcgtccaagatcagaagttttcttggattggctggatactatagaagatttattgaaggtttttccaagttagtgaaaccacttacctctctactggagaaag

SEQ ID NO: 94867 - DNA, 465 bp, Zea mays
  Clone ID: MRT4577_186510C.1
gctaagggcaagtttactgcctaccacgtggtgggtcttcgtctcaaaaccaaaccaatagatcctaattgtaatgccttcctgtggagtcatagcgctattggtcctggtgcgatgggctgtgttttacagactagcgagggggtgtctatagcctatggtaaacgctcgcgattgaagtgcgagcgggccaccgccctgcactctctgctgtgtttacataaggtggaatgagacgccttataaaatggctacccttaacaaagggcagtattgcaatcataactctacatctagccaagctagtgtactgcttaagagaggttcacactatgaataactgtgtgtgagatgcatataccccaggcattcctaagctgtcatatatgcctatggccacgaaaactttatctcttatataggatctaatccttgtcctgttaattgcatatggaggaacattta

SEQ ID NO: 94868 - DNA, 179 bp, Zea mays
  Clone ID: MRT4577_186511C.1
catgattacacggcccactcaggaccaacgacacacacattgatacgtatgtttcgcttcggccgtgcgttatgtctgcttcttcagactccatgccggtgcccttcctgtcgcttgaagttgttgtcggggttgtagtcgaatggctgacacccctttcctccacgctcgttcttgtt

SEQ ID NO: 94869 - DNA, 616 bp, Zea mays
  Clone ID: MRT4577_186512C.1
cttcccacactcacgatttcgtcgagcacctcgcgagcaaagcaggcagacggcggacggataaatcatggaggagagcggcgcgagcgcggcggccgtagtccctcggctgttggcggcgaaggaggagtccgggaaaagcttctcggacatcgcggccgagacggggctcaccaacgtttacgtcgcgcagctgctgcgccgccaggcgcagctgaagcccgacatggcgcccgcgttccgggcggccgtcccggcgctcaccgacgagctcgtggagctcatgatgcggccgcctttccggtcctaccacccggacatcgtccacgagccagccatatacagattgaatgaagctgttatgcattttggagagagcatcaaggagatcatcaatgaggattttggtgatggaatcatgtcggctatagacttctactgttcagttgacaagattcaaggggctgatggaaaagatcgtgtggtggtcacatttgatgggaagtatctgccttacaccgagcagagatctgaacatatgatgtcatgattgaaccggaatgcatcttgagatggctggtgttacgaagaggatgtatgttcatggtgtaacaca

SEQ ID NO: 94870 - DNA, 534 bp, Zea mays
  Clone ID: MRT4577_186513C.1
caaagatgaactctgccttagcaagaatgaactaattcgaactgcgaaactgtaataggcatattaaataccctatcgctggtccgatggagcaggcttcttggttgaccggggggacactagagctaatacgtgcatcataccccaaattccgggaggggcgcttgcattaaataaaaggctgacgcggtctctgcccgtcgatcagatgattcatgataactagagggatcgcacggtcttcgtgccggcgacacatcatttaaatggatgccctatcaactattgatggaactgataggagactactatgaaggtgacggcagacggagaattaaggtttgatatcggagagggagcctgataaacggataccacatgcaaggaaggcatcaggtcacgcaaattacccaatactgacacggggaggaagtgacaataaataacagtacacgacgccgcagtgtttggagattggaatgagtacaatctaaatcgcttaataaggatacataggagggtacatctggtgcc

SEQ ID NO: 94871 - DNA, 396 bp, Zea mays
  Clone ID: MRT4577_186514C.1
gggaaaaaaccaaataaaacgctaagttactttcccaggcgggaggaaaaacgccggggggtacagcaaaaggaaaacccccccaaggctttgggttaaggaagggcataagggaacaaacaaactttatcccggttggggttattcccaaacaagggtatttttttgcagatagcacacgacagcagagcaggtggacaacggaaacaaactccttattcccttcgaaaaaagggggccgaggctctaaacaaaagggggcaacgaaacaggggggaaaaaaaaggggggacaaaaaagggaagggggggaaaagctaaaaaccccctcgggggcttcaaaacgggaaaaaaggcccccccacaggaccggggggggaatttctctacagctggg

SEQ ID NO: 94872 - DNA, 307 bp, Zea mays
  Clone ID: MRT4577_186515C.1
cggacgcgtgggctcggcctgttcacaaacgcctgcgcttactctcgcccgagcccgagggatctttaggtccctattccggtcaccgatcgaccttcacaccagtctcggtctcttccgaaagcgtcgcgcgcggttgtttgagaggagaggaggaagatgagggagtgcatcttcgttcacatcgggcatgccgtcattcaagtcgttaacgcgtgctgggaactttactggcttgagcacggcatccagtctgatggtcatatgcctgtagataagaccgcgggacattactatgaatgccttt

SEQ ID NO: 94873 - DNA, 856 bp, Zea mays
  unsure (1)..(856): unsure at all n locations
  Clone ID: MRT4577_186516C.1
ggaacttcgatccaatgatgtggctgggctatgggatgaacatctttgatatgaaggagtggaactggtggaaaaagaaagaatattactgggatctaccacaaatggcaaaatatggtgagaattcaattcttgttactgaattgcatgattttcaaaaaaatattttagaaatctgtacattcttatttaaactcatcgtatctcacatagtcctcctgctgttctgttccatcttgtgaaagaaaaatcagatgacatttcagcaaggaacaaactacataaagaccgcttagatgcaagtaagaaagcaacttaggaaaactcgatgcctcatctgaaagaagtatacacctgtcactaagtgagcataatacatcacaaatataaggaaataggttaactcatttaatgaagaaacataggtgaactaattttggctaatataatacaacatacaccaaaaaaatagtacatttaatgtcgttctcgtgttaaccatcacaaatcatcatctcatcaatgtgtgccttacggaatagcatggtgaattagccttttttctcttccttttatttatacaaaaatatggtaaaaacatgctagatgtagcaaggactaaaccatgtgttcaaagatgaagaacagctcatggttttccatcgtcacttccttcagcttcacaatgttagggttaaatagtttttgaagggcctgcagaaagatagttctttctttgttaagaaaatcaagctgcaggatagtatcttctgaatacgtatgtggtcctctttgancaaagagaatacttcacttctcgcagactaatacattcttcccaatgacatattttctc

SEQ ID NO: 94874 - DNA, 596 bp, Zea mays
  Clone ID: MRT4577_186517C.1
gtgcggcgtcaggcggcgggtgcgaaaacgtccacaggttatctctcccgtgccttgaagtgtctgctacctctccccggccggcatcgtactgccgccctggccctgcccgaggtgtccagcctcgtcgtgctgatctccactggcctgggccgtgtcctcaatggagcgtcctagagcccctcgtcgccgtcgggcctgccgcgaccttcgccatcacgttctatgaccgcccctgctcgccgatgcactagagcttgatgtcaagccgggtccctccaccgccacctcgcccgagcaagatgtgcagccgcagttgccaatggcgccctcccagcaccctccgtccatgggcaactgatgcatccttcccgcggtcttggttttcttggtccttcgatctgtggtttttgttgtgggaaacaaactgattttgccattacatgatcgagatgagtcgtacgagtgttgtgatgtttaattggtcatttgaaaaataaggttcagatctgtatcttagaaccatgcaaggcgtcgtgattgcatttgaatacgaccaccatttgctaagaaaaaaaaaaaaaaaaaagcgccta

SEQ ID NO: 94875 - DNA, 245 bp, Zea mays
  Clone ID: MRT4577_186518C.1
gtactaattaagtagaacttttgatattttaatttcatgaaataaaacagcttgtgactggagaggcatggattctcatcatgcatgagtccatgatctttcataccactagagatatttcgcaagtagaaattaagagtgttgttgaatgtataataatacacgtcttcgtgcctgtgtgatgagtttaagagaaaattaaaataaattggtgaatataaaaaaaaaaaaaaggtgtggcctcc

SEQ ID NO: 94876 - DNA, 1539 bp, Zea mays
  Clone ID: MRT4577_186519C.1
cgtccccgcaaagcaggagaatggaggtagctgccttgtggcatgggattcagtcacaagacctttgaagtatggtgggcttgggatccctaatttacaacacatgtgttgggcccttcaagccaaatggctttggcttcaaaaaacagatcgggataggccttggcttggcttatccatcccctttcagcaacatgttaaagacctttttgctgcatccctgatttctcacgtgggaaatggctctaataccttgttctggacagataagtggcttaatggatgctccatcagagatcttgcttcagaagtggtgtccaaggtggctaagcgagctcttacctctatgacagtggttcaggctcttgaaaacaggcagtggattgcacatatcaaccccccccctttccttgattggaattcagcaatttcttttcttatgggatactttaggagatgtgcagctttctcaggaggaagaccgccatgtttggagacatgagacatcaggggtgttctcctctaaatcctgctacaaggtccttttattaggttctactgtttttgagccttggaagagattatggaagacctgggctcctcccaaatgcaagttctttctttggttggcaataagaaacaaatgttggacagctgacagattacagttgaggggactgccacacccagatgtttgcccaatgtgtgatcaagcccaagagacaattcagcacctccttactgcgtgcatttttgcccggcaattttggcatacaattcttgctgctattggcttggggcatctcactccgactgctgatgagggaaatttttcagaatggtggggaaaggtgtgccttagagttaccaagacaaggaaaaagggacttaactctctgataatcctgggggcttggtgcctatggcttcagagaaacagagcagtgtttcatggggagtctccttcattgcccaggattcttagatgtttctcagatgagtgtgtttgctgggttttagcaggagctaaggaggtcggtagtatgggcttagttgctgccctgggcgaggtcgggtctagtttcagtacttctatgtaatttccttcggaattttgtgggtctttgggagatttgctttgcaacatctcctcttttgtaatgtttctcttcctctttattatataagatgcgcagttctcctgcgcgttctcaaaaaaaaatgtttaggacaatatttggccaaaccataaaaaatgcaaacgccaataaccattacacacattagagcatcttgagaagtctttcttaaactcactccctaaatcctcatttggagagcaattcgaataaaaagtgttccctatatctttccatcacacaataatttctctatatcttgtgcacacagctgcacccccaatctccgtctttggctagcgagaaatccagaatagagaaattaaagttgtcggagacattttccaccaaaattctctattcctatgaatacagaatgatataaccaggcccggccggc

SEQ ID NO: 94877 - DNA, 3018 bp, Zea mays
  Clone ID: MRT4577_18651C.1
ttaagaaacttccgagaataactgagggaattctactctaagttcatcttctctttcccaagtggcctcatcttccgaatgatgactccactgaaccttgcacatgttaataactttgctccgtgtaattctgcgagatgtttccagaattctgaccgggtactccgaataggtcagatcctcattaacattcagttcttccatgggtaactgtgcttctggtactcttaagcacttcttgagttgtgatacgtgaaatacgtcatgcacatctgataatctatcgggtagctctaactgataggctacttcgccttttctttccaaaatcttgaatgggccaatatagcgaggtgataattttcctttaaccttaaaccttttcattcctctcatcggtgaaactttaaggtagacaaagtctcctacttcaaacatcaattctcttcttctattatcagcatagctcttctgtcttgactgtgctgtcttcaaattttctctgataatctgcacttgcttttcggcctcttggagtatttctggtccaaatacttgactttctccagtctgattccaataaagcggtgttctacacttccgtccgtagagtgcttcaaatggtgccattttgagacttgattgataactattgttgtatgaaaattctgcataaggcaagcttttatcccagcttctaccatgctttagagcgcaagctcttagcatatcttccaagacttggtttgttctttccgtttgcccatccgtttgaggatgataagctgaactaaagtttagcttggtatccatggactcatgaagtcttttccaaaagcgcgaggtaaactgggttcctcgatcggatacgatcttcttcggtactccatgcagacaaacaatcctcgacatgtacaactcagctaactgggctcctgagtaggttgtcttcacaggtataaagtgtgctactttagttaacctgtctactatgacccatattgaatcatagccatctcgagtacggggtagtccaactatgaaatccatactgatttcttcccatttccattcaggtaccttgagaggttgtagcaatcctgctggtctttggtgttcggctttaactcgctgacacacgtcacataatgcaacatgagtagcaacatctcttttcaaaccgtaccaccaatacttttccttaagatcctggtacatctttgtgcttccagggtgaatagagtaagctgaatcatgagcttctctcaaaataagttggcgtaagtgctcgatttccggtacacagattctcttcttaaaccatactgtgccttgttcatcttccgtgaaatctggggctttacccaaactaatcaaagttttaatttccttaatcttctcatcggactcttgtcctttacgaatctcttcttccaaagtagattcgacttccatcactgttgcttctacattattgagaaatccaaggttgagtcgttccatttcccagcacaattcttgtgacatcaaacgagtagtgatgttgttcacttgacccttacggctcaaagcatcagctactacatttgcttttccggggtgatattgtatttccaaatcataatctttaatcaactcaagccatcttctctgtccgctacagtttataggaagctccaatgcaggaatcccttgcaggaccgccatcgcagcaaaatcctcccgagggcctccctacactgaccactcccctactgcccttgcccctttcgggtaaggtagtcctccactagctttcctaattaatcagccaagggcgtcccattatacccttgtggtagcactgttttcccgggtggtcgctccatgttccaattaacataatgatcttatcatgaacgataaataacaacggataacaaaagtataatcatgaacattgtatcttcatacccaaaaccacataaagcactagcaagtactacccaaaaagttcagtggtaaacaaggtataaagataggcaaactagggtaacctattgggtcccatcaaaattaacctatgcagatcattatgattaattagaacatgagtgggtaaaaagaagtgatcaagggcacaacttgtctggcacttgagattccaggtacctcaccaaattggtcttcgggtgactcgtgacctcgctgaaaaatataggcacgacggcagcttggacgacgtgacgcgattatattgaagccagccacacatatggacatggggtgtttgaacgatgaagatccatgagacatccaggaacgaacagtggcttgcttcttttccctacgtatacaacgctttcttcgtttcttctctactgcaccaacgacacgcacagcgggtcggaacggcaccgacggagtcttgctggcggccggtccagaggaatcaacggtgaccggatcatcaccaacctcaacaacagacggtagcagcacagcccggcggcgccttggaatctggcggccggatctcaccggcgacagcgattaggcgccccagtatcataatcaccaacgttcggaaggaacagggacagacggccttcagagactcgaccgagagttttggctgtccggcaatggagtcagccctggtagtagaggcagaccacgatgcagcagcccggcgatgtagcaccccgcaggtgaaggattccccggccaccagggcaccctccatgtgactcgacgaccaaactgtctctacctctctctcggcattttcctcgctgtttggcccatggtaacgcagcagaagccccaggcgacggcaatagaggcggccgtgcaccagaggaagcgcggagtcgtcagagggagccccgctcggccgccaaggaagaggagcagggataccgggtgccgagcaccatggatgggcaggagaggagctcggtcgaggggagagaaatggagaggagagggaggagagataagagaactcggcgacgaagactccaaccccccggccgg

SEQ ID NO: 94878 - DNA, 351 bp, Zea mays
  Clone ID: MRT4577_186520C.1
cagggaaggtcccatatgtcgtgtatctctttcctgatgaggataagcagcatatggtcctggccagattgagtgatgaaaagattctgcaatgcgatatgaagctaatgcagattacacaacagcatgatcaccatttaacgcctgctaacaccatcactcatgtggataacaacatgcaacttgtgacctccagagatgacacgtctatacctgtgtggaagccctgcatcccagtactgatacactatatcagtgagcctcacatgcactcaacgccatcaattgcactacatactaactcaaagtgactggctgcacacagcttggacaaatagatactgatataca

SEQ ID NO: 94879 - DNA, 1223 bp, Zea mays
  Clone ID: MRT4577_186521C.1
atgcttctgcgtttccctcgctctcgtgcctcccacgttgtaacagccgcctccgcgtccctcgccacgccccaacccccaaatccctacaccatcgtctgctccccaccctcctcgccgccgcgcacgcccggagagccatcgacgacggctatcttggtctgcgtccccacgtttgtgggcaggcagagatctggatctgctctcatccgcttcgccactcagcgggctcggcgcagcagaagaagaacaagcagctcgccgtcgagttgagaaggaaagcatcgcgagttcgccatacggatgggttccaaagcgcctttctgtctcacgctcctcttgctgctcgccgcggcctgtggacctgctgcacatgcccacgatgctgtcgagctcccgcatcatggctcagccttgaaggaacagatttcttcaaccaagattcctgctcgtctcaagagtggcagcggactatgctcggcctgtgaaaacttcacgagcgaagccgtcacttatctcagcaaggaacagacacaggacaggatcatggagttccttcatgatgcttgctcccaatcattctcctttgaacagaagtgtgtcgagctgatggactcttatgcgactctcctgtttgccaagatcacggagattagaccggaagcgttctgcaaacggtatggcctgtgcagggacacggctcttctctccggtgtgggaagtgacagcacgtgtgtgttctgccaccatctgctcgatgaaatcatgtccaaactgaaagatccagatgcggagtttgagataattcagattcttgtcaaggagtgcaataagatcgaaggtcacgtccagcaggttgagcagatagtggttgaaaggtctgaaggttggcattgtggatatttttgctatcatgcatggattcccagacaatgtgaggacgaaccagaagggcgagttctgggtggcgatccactgtcggagaaggacagcccgatggccagatgcttcacatcatggaggacgacaagggagaggtggtgagagttatcatcgaagtggagggtctgtctgatgccattcatcgctgtctttgacctcgtgaaggcgtcttagccacttcaatttgattggaaatattgttgatttaagatacgggtccatggttaatgttgtacgcttctctgagaagacctgtcattccaataatttggttctggagc

SEQ ID NO: 94880 - DNA, 123 bp, Zea mays
  Clone ID: MRT4577_186522C.1
ggacttagaagagacctgtaagtaaatcctgaaaatgagccaatccccacttgaatggttactggagtaaacccgcctttaccaccccaattacagcacccgaggccgataaaccaacttggc

SEQ ID NO: 94881 - DNA, 1529 bp, Zea mays
  Clone ID: MRT4577_186523C.1
ggtaccctccgggtcggccgggagtggattcttatttttctaggcaagtgaatccggcacgcaacagcaacgaccgccccgaaagagagccggaaaaaaagggcaggaaatcgccaccgcccgcacctatttgagcagccgcttgttccttccgcaatccgcgtcctcgctgctcctcaattcgattggctccgtgtcgacctccaggttgagaaggaaagcatcgcgagttcgccatacggatgggttccaaagcgcctttctgtctcacgctcctcttgctgctcgccgcggcctgtggacctgctgcacatgccaacgatgctgtcttgaaggaacatatttcttcaaccaagattcctgcccgtctcaagaggggcagcggactatgctcggcctgtgaaaacttcacgagcgaagccgtcacttatctcggcaaggaacagacacaggacaggatcgtggagttccttcatgatgcttgctcccaatcattctcctttgaacagaagtgtgtcgagctgatggactcttatgcgactctcctgtttgccaagatcacggagatcagaccggaagcgttctgcaaacggtatggcctgtgcagggacacggctcttctctccggtgtgggaagtgacagcacgtgtgtgttctgccaccatctgctcgatgaaatcatgtccaaactgaaagatccagatgcggagtttgagataattcagattcttgtcaaggagtgcaataagatcgaaggtcacgtccagcagtgcaagaggctggttctgcaatacattcccctcatgttcctcgaaaagaacgatggttgcgcgctcgcacaggcttgtccagcgagcagtaggaagacgttcagctcgatgttaaagggagcgttgtggagtgacgcctggcttgaaggttgaagaagaacacacggagcggtttagcagtggtcagaaatagtgtgaacaagtgctgtgctgtacatataataatgtcgtgtataaacgcatgaaggacgtgtgccctgcattcttttcgtcttgtatcataaattcataaacacgtcgtcttaagtaattgtttatggacacctagaggggatgaaggttaaaatatttggccttgaggtatgatgcagccaatcaatttgtatccacaaagtttcagcgctggcgacttgaaactgcaaatgatgtggtatttttatttgcatcaaagctcaagatttcagagtaggaaagagtggtgtttcagaaacaacagaatacgttgctgttaaaagtgacgctggaacggtttgctgcacttactgtttgtgtgtaaaaatagtgaagttagtggaatgaatgatcctggccagtttctcttaatgaatgattctggccggtttatgttaatgaatgattctgggcagttttctcttaaaaaaaaaaaaaaaaaaggcccctaaattgttgttttttattattttttttatatttttcttctttactataagggggtgcctttttattggttcatttcct

SEQ ID NO: 94882 - DNA, 313 bp, Zea mays
  unsure (1)..(313): unsure at all n locations
  Clone ID: MRT4577_186524C.1
tcggctgcgttgacctcgggttntggtcgacaatatttgtggttctgtgccgggtaatggccggttgcatgcattatgtgaagtacagatgttggaggctcgttgtctcggtgccttgctcgagatgctgcttttcctgtgatgtcattttgattacattataatgcttgtacgtgtttgtaacgttgtctcagactttctgttgacctatcgtttggtctattcgttaactttgtcgttagtatatattatttttactttatcaattaatctctattatcttaattgtttttcctctaattaattttttttt
